United States Patent Application Publication US 2004/0214272 A1 - sequence listing, part 11

SEQ ID NO: 43018 - DNA, 1160 bp, Zea mays
  Clone ID: MRT4577_139240C.1
gaccctccgggccggccgggctttccagcgaccggcgagcgcacagccacacgcacagaggggtgttgccgtgtagcagagcagctcgcgccatgtccctgtccgtcggcggcgcgcggacctctctcctcccttcttcgttcaccgcctcttcatcccgcccgcgcttcctcgcgctccctctccaccgccgctcgcacggctccctcacctcgctgccggccgcgtgcaggcggcggctccgggtgcgcatggcccggacggagtccaccggcgtcaccatcggcttccgcgcgccggatttcgagctccctgagccactgactggaaagctctggacgttggatgacttcgagggcaactctgcactgcttgttatgttcatatgcaaccactgtccatttgtaaaacatctgaaaaaggacatcagcaagctcgcctctttctatgtggagaaaggacttggtgctgttgccatatcgtccaactcagttaggacgcatccccaggatggcccagatcgcatggctgaagaagcagagctgttcaaatatcctttcccatatctttacgatgagtctcaagaggtagccaaggcttttggagcggtctgcacgccagagttctacttgttcaaaaaggatggccggaggccttttgaacttttctaccatggacagttcgatgactcaagacccagtaacaacgtgcctgtaaccggaagggacctaagccgcgcgattgactgtgcgctcagtggccaagaactgccctttgtgcaaaagccaagtgtcggctgcagcatcaaatggcacccatgaggtgctcacagtcacagcgtcatcctgtccaaacaggccctaaaccttgttcggcatttcttgtgtgacggagctgaagatgagacagagctgtgtgggagaaacagaaacatgggaccttctcttgtgtgacggcgaaatagtgtagcgctagcgcagcaaccagcaaaaggctcatgtaaagaattgttcacgaaacagaagagcttcacttctaccttctgtaggacatggtcatcgcaagaggcataaatcgcaaaaggcattggtattaaaaaaaaaaaaaaaaaatttctgccgggacggatattcattttcagggtgaatttgaattttttt

SEQ ID NO: 43019 - DNA, 854 bp, Zea mays
  Clone ID: MRT4577_139241C.1
cccacgcgtccgcaggggtgtagatacaagccgtgataaacaacagccttgccaaattggcttgcttatataagagcaataggtctcaacaagttgctgcacacaggaaaagaaagggcatatcgaggaggtttttagggtggtggtggtgttgtgaggagctgctgccgctgctctccagtctccaccgatggcgatcaagaacatgacggtggcggcgacgacgcggtcgctggacgcggacatgacggtggacgagttcaaggagtggctgcggcggttcgacacggaccaggacgggcgcatcagccgcgacgagctgcggcgcgccctgcgtgccatccgctcccggttcacggggtggaggagcaggcagggcatcagttacgccgacgctgacggcgacggctacatcgacgacagcgaggtcgatggcctcatcgagttcgcgcagaagaacctcggcctcaagatcgtcgcctactgatctcacatggggcgcggcgcgcggcggtcggggggtgggacgcactagctcgccatgagctagctatagcgacaatgcaactcaccatcactctctccggctaaaataagagctgcttgatctatcatcgcttgtctgttaaaattgctttccatgtacttagtcaattcgagttcgggatcacgcactagctctctacgctgttgttgtgtgatttatgaaaggtgtgtatgatacccatgcgtggctgcctgcatcggcttgcatagcctagctccggccgtgtcatgggtgctatgatgttaatttgcactagtgaaattgacagtataatgcttgaccaaaaaaaaaaaaaaaaaggccccta

SEQ ID NO: 43020 - DNA, 212 bp, Zea mays
  Clone ID: MRT4577_139242C.1
gactcgcgtacgtagctcatcaagtatcttctcagggagatccttcgggagatcatacagatgctcaaatgacttgagtcatgacgtgagacctgaggtcatagattgtgtctgcgatattggaggcgacatactctatgacgttcgctatactactgcagattgcatagttcaatgcaacttacattacgacttgtctcattaacttgcgc

SEQ ID NO: 43021 - DNA, 594 bp, Zea mays
  Clone ID: MRT4577_139243C.1
gccggcctggtcggggcacagccggatccttccctcgaacagatccgacgccgacacggtatgccgacaccacttctagatgcctatcgcttgcactcgcaagacacacgagcctacgctggaaccacaaccaaagaccctaacacaattagaacctaagctcaaatcaatactgcttccacaactgaagaccaacatgaaaccaaagactgtgcctctgcatgttgcaccacagagttatcctgtgcataagcgactattatctatctcatctcgtacgcggtgaaactatcatgccatgttgcagagcgcttttgtaggtgttgataattggtgcagctatcctatcttttctttggcatttttctgtgtgccatcgcatatcactatgatcatctccggcaccttaatttgctacctgtatacacgacatctatgcactcgcggctacttgcacttatgaggctacatgttatgtggtcgtgtccaacttcctaactcacctaaagattgtgttagtacaacacatatgattacatacataattcattcggccaagaaacataaaaaaaaaatggccctagggtcgcgaaa

SEQ ID NO: 43022 - DNA, 190 bp, Zea mays
  Clone ID: MRT4577_139244C.1
gcacgagccaaggtgaaccgtgccgtgtgtatgatctccaactccaccagtgttgtggaggtcttctcccgcattgaccacaagttcgacctcatgtacgccaatcgcgccttcgttcactggtacgtcggtgagcgtatggaccatgacgatttctccaaggctcgtgaggatcaggcgccgcttgaaa

SEQ ID NO: 43023 - DNA, 541 bp, Zea mays
  Clone ID: MRT4577_139245C.1
gactgcagcaaatccatcaaatctagcagaactgtgtccacctcatgggtgttggccgagcgcgtgtagaccggagatggcgccaagcgggtggaggatgagcgcggaagcgcgggtcacctgttgcccgcccactgcatgcctgtgtatcgcgctcacctcatccgcactgtcgttttcccattctacgaaggacctgacggcggctactaacaacgtctacttaatgatcgagatctacagccagcccgcctgccggatagtcatgagcctctacggcatgactgttcctaagaccgtgtacaacttgcgagctctttgcaccggacacataggcctcggcaagactgtcaaactgctccactacaaggcaagtacgatccacacaatcatcctcatactgatgctcccaggtggtgacttcactctcggcgaccgtagtggtggtgaatctatctaccggttggagcatgcggatgcgaactgtaagatccatcacactgctgcagggcttctgtccatgggcaatgctgagagagat

SEQ ID NO: 43024 - DNA, 218 bp, Zea mays
  Clone ID: MRT4577_139246C.1
ccatttcacccaggatcctgtctgctaaactagtactcaaagacattgtactactgaccctaggtcatgctgattagcctgcactgagcctgcaggatccttgagctcttcatgtgaaccttctacttgaagtgcgaaaattgctcgccagcccctcagagcaggagcagccatccttgtcctgacagtccaccgtgcccggtcctttgcccattttt

SEQ ID NO: 43025 - DNA, 1027 bp, Zea mays
  Clone ID: MRT4577_139247C.1
atgggaaacctagaggcatgggtctaaaatcgaaaacagattacctgctcccaaaatgaactatgtaaatattttttcgctttccatcatcatagtctagacttctggttcaacttcatattcccttgtagctttcagcttcgccaactgcttttctgccttattcagttcttgaagcctcaattctctgtcacgaatgcttaattttttggcctccaactccaacatctccttctcaagttccctatcttgttcttgttggatgaagccttctttctttcgcttttagaggagtcccttcctagtggccattttcctgtcaaacctggtgaaccactctccatgtcatccacaccaaaagatggaccagaacttgatcccgtagctgtgccttgtaatcctctaaatgaagttccttgatatatgccctgctatttgggttcagccttgagcttatgccagcaatgcatgaaatggaagggtttgttctcctcatgtgcaaagatagtggcagccttcgaagtctcgctttcacttgaatgccatctttgcctccagcgcgtggctccgacgtggtggccctcctcatcgccgacgaactcggtcgggtcggactgtgcctgcttgcgtccgcagagcctcatcatcgcttgcccacccgaatgcagtcatgggtcgactcggggccgaacactaccgttgctttcttgtggagcacgcgagcgctggcgttcacaagaaggcactgcatggggtgaacaacgtccatgtccatctgccgtgagacagaagggtagcactgcgtagggggtgttgtagagggcggcattgcgggtggaacagggaaactgtatcccctacgcgatgaacagtattaggggagatgtgggcacgggggctgcgttgaggacaatctaattcggctctccatgggagtaagcaaaacattgctagtgtcatccttgaggacctcgagcgagtgaaccaaacatgtttcctaagataattaaaataagcgacagcaacg

SEQ ID NO: 43026 - DNA, 611 bp, Zea mays
  Clone ID: MRT4577_139248C.1
ggccgctttttttttttttttttttttagactactgacttcacaaatgaatgaataaatgaaggacactggtgaccaccaacatcaacaacaacatggtgcacaacacccccccggagcgactgatgtactactaatgaggaagaggcgcaacacacatcagacaacaaacagctgggcgacactactaataaactactaagaagaggcagccgcctcctgcagcagctgcaccatgttgatgaagtaattaatcatctcatccttctatttgccttcaacaaccttccaggaatcctactaggccctcctcttcttgtggaagatgccccgacgaccagcggtcacaacatcaaccaccgcttgttggttgagcagccataagagcaacaagttgttattattggtggtcttatgaaacgaggttgccttcttatcatgctgctcaaaaaactcctgcagaccaccgactggttggcaggatgattgtccttcttcctgctgtcttctcgggtgtaacgacgaccaccgccgccctccaggatgccccataagccctataatgaggagtattacgacccccgactggtcgccgttctacaacaacgtgac

SEQ ID NO: 43027 - DNA, 283 bp, Zea mays
  Clone ID: MRT4577_139249C.1
ttcaaaagtgagcgtgtttaggctcgcggacgccgtgtccgttgtgggggcagcgaatggcgactgcaccgactccttgctggtctggaccgcactgctagagccagccgagaagcccccagcactgagcatgatcaggtggggtggaagacgaggtctctggttgcgattcttttgcctcttctttatagtgcgccggctgctgtatatcattggcgagatcgtagtggtgaaattattcactcgctacgtggctatatccaacaaagcacgcatagtaagg

SEQ ID NO: 43028 - DNA, 333 bp, Zea mays
  unsure (1)..(333): unsure at all n locations
  Clone ID: MRT4577_13924C.1
gtgaagctaatgccatggaatggaattctcaccacgtttgctggctgtacgagtacacaaatctgatgaatggattcagctaaaatgtcatagaatggacccggaatttatgctctttttttgtgctctctcagcatgtgctagctggttaagtactagcattgctattgggcgctattttgtatgcttgttctgctgtcttttggatgtaaacgaacaagtttgcatgcttgttctgctattggataagaagtattagcattgctatttgcatgcttgttctgctggttaagaagttaagaagtattagcntnnnaaaaaaaaaaattaaaa

SEQ ID NO: 43029 - DNA, 480 bp, Zea mays
  Clone ID: MRT4577_139250C.1
gcggggggttttttttttttaaataaaaagatcttccctacggttcatgatccccaaaacgggtcaaattacataagcgtacccaatccaaaattttctctgcaggcgcaaaaacattgttgtgcacataaaagattgctcacaactaggggggggggggggggggccacaatacctctaccatgctcaaacggtacagtttactaattcttccagaatggttttatcgccaaccacactttactaaaacacaccaaaccggaaggggtaaaacagaactggcgactctgggcatgtacctctatgactacagggcctacttattgacgggacacatcagacaggaacccaaataactgccggagatggcctgcagggtccacaagcgattgatggtgcaagggcctgtccagaaaaaggatgggggggggctttgccacaggggcgacgaccatcataaagggcatcagggggcttcac

SEQ ID NO: 43030 - DNA, 225 bp, Zea mays
  Clone ID: MRT4577_139251C.1
ctgtgcactgagccaggtgacgagtacgttcagaggcgctacatagctgccttaaacaagatctaggcgtgactttcagatcagtactctcactggggtgctggcaatggcggtggctggacactgtaccagcctaatatatccatagctatatgtctagctatgtgtcgccactgatatcgccagagagaatgttcatatcctattcaaccgctaatgtaccag

SEQ ID NO: 43031 - DNA, 806 bp, Zea mays
  Clone ID: MRT4577_139252C.1
gataccatgttggaatgagaaccataaccttaatcagggctaggagtggtattaatagacttggtaaatgggccaggcccaatacagagggtgagttggtaattacagggggaacaccccaagccctagacgggtagtctaacattaggatatgtagttaacgttagatatacctgcttagtcatctcatgcgtcaaccacatcaatacaatatctctatcatcagtgcacgcactcaaggaaatttgtcgattgtcagggactcagggtccttgaacaccttataggcttcgaccttcttatcctttgtgacctccaatgtgtttagaactactatgaaattcttctgtctcaaaggtgtaggagccggacaataaaacgatctcaatgtttttgtcctcttcgttctcttgttttgaggtcaattgcttatagtgtatggcaatatgggcccaatcgccgagcgccaacagcagtcactcttggttcacggcagtacggcaacggcaccaaatcgccctcctggccgctagatccaacagcggcaagccggcaacaggatacctccgctctggcggctggctctccagtctccaggctccggtccggcggcctcctttgtcctcgcggcgggctcgcggccggctgatcggctgtcaggctccgtgcacccacggccgcggaggccggaggagactggatcactggacagtggagagaggacacggtctgccctctgcgtctctgccggcgtccgctctccgcctctccgagcgtccagcactccagcagagcagggacggccg

SEQ ID NO: 43032 - DNA, 1249 bp, Zea mays
  Clone ID: MRT4577_139253C.1
tggagttttgccctggtggtgacctgcatgttcttaggcagaaacaacctaccaaaaccttttcggaagcagctgcaagggtttatgtcgctgaagtcctcttagccttggagtatctccatatgttgggggtcatttaccgtgatctgaagccagagaacatacttgttcgagaagatgggcacatcatgctctcagactttgatctgtctctgaggtgctcagtgagcccaatgcttgtgagaatatcatccgtaggcagagatgagcccagcaggccttctggtccttgtgcacaaagctgcattgatccgctgtgtatccagccatcctggagcaattcctcttgcttcacgcctcgtctggtttcgtcacgaaggcctagagccgagcttctgaagaaaccatcacttccacagctcgttgttgaacctacggaagcaagatcaaattcgtttgttgggacccatgaatatcttgccccagagattattcgaggagatggccatggtagttcagttgattggtggactcttggaatcttcctttacgaattactctatggcaagacaccattcaagggacctggcaatgaggaaacactctcaaatgtgatctcacagggcttgaagttccctgataatccagctgtaagcttccacgctcgagatctgatcagagggctgcttgtgaaagagccagagtaccggcttggctcgtcgagaggagccactgagattaagcggcatcccttctttgaaggcctgaactgggccttgatccggtggaccgcaccaccagagaccctgaagaacattgacactgcaccaacacctgtaacgacacgcaagaaaaaggaaggcaaatgtctggaattccggctgaatggtgacgacatcgagttcgagctcttttagttgtagctgtagtggcatcgctgttgtagtgtcaaggatatatcaaatatcatgataagctagcaagagtagtcttagtccctcttccctgcagttttctgttgaaagttagtcatcgttgggaagtaaggtaagattggctgttaagcctgtaactttatgccttgttaataccatcaaatattagaagacacggttgggaaattcctgggcatgtgcgagatgctgagatgcagctggcagaaagtgtacattgtgttgctggatggaacaaaacaaaaatttgtgcctcgcttacttgatgatacagctgggagtcggcctgtaactcc

SEQ ID NO: 43033 - DNA, 301 bp, Zea mays
  Clone ID: MRT4577_139254C.1
tgtggacacctcgacttccagattgagcacgatctttgtcccacgatgcctcgagacaattaccacagagtggctcgcctggtgcagtccttgtgtgccaagcatggcatagagtaccagtccaagcccctgctgtcaggcttcgctcgagatcatccactcactaaaggagtcatggtagctctggtcagatcgctatcttcaccagtaacgacagccaccctgcccagtctggaagaagaggacgaagactctggagtcaatgcagaggggagcttgacggacaatgccactatagttt

SEQ ID NO: 43034 - DNA, 3050 bp, Zea mays
  Clone ID: MRT4577_139255C.1
ggaagaagggggcgagcgagaggaggccactggatcatctgctcctcgtgatgcgcgccgctcattgctgccgagcgctgccgctttcgcccgcttgaactcatcctcatccccacgccactcccccactctcgccgctcctcgccgccgtttcggccagaaaaccctagcaaatcctcgctcgcagcagccagcttctccaagtgggagcaacccgcgccgccgaccgagcgcgagccgtagcagctcccgccgccgccacccttcgcgtgccgcgccagcgccctcggccccgggtgccgccgtccggactccgtgatgccggttcttggcccgggaaagcggcttcgtcggccacctaagtgcaggcaaccgtcggtcctgatgacttgaaatgcggcagcccttctacggcctcccacccagatgaagatgcagcttgtggaaccggaaggctcgaaggggatgggttctcctgggtgctcggagatagtcgaactggtggacgagccgaaagatgctcgttcgtgtgggcttacccacttgagggtgagggtcaagccagtggggcaggagcttggggcacggtcgtgctcggtggaggatgatcttgaccagctcatcagatcgatcaacgtgcgcacgtcggcgagggcttctgggcagacgagcacggataggcggcttattgggctcgggaagtcgccagtgtcgggctcagagattgtggagtccgtgagcctgaagcaggccctgaggaagatgtgcatctcccaggcgtcggagatggcagccatgaagagactgtcaaaaccgacaggggtgtccaccccttctgattctggggcaatcaagaagctatatggctctgttgcagttcaaaccaacgaggagcaagatgacaagagtaaggtgggcaaagtttatatgcagcctgagaaaccggcaggaagttcagtgggtaaggcaagtgaaatcagcaaggggcagagcaagagctcagccaagaagaatttgagatcagcatctcctaccacagggaatgttcataaaaccagaatccaagatgtgatcagtaacaagtcatcagagggagttgaaggtatttctgtagaagtaactctgccaaagcagagaaaggggaaatctatgaaaacatctagcccccgggctgttccggtcggtggctcacggctggtgaggccaatgtttcggaacaaaacctcgacgaaaaagaaggtgaaacctgaacctgctatagtgcccgcatctcacaagcattgtgagacgaaaggtcctaagtctcacgctagtaaacagaaggagtcccttcaggatgaacccagaaccccagcaccagctaacaagaaggctgctgtcagctccactgttgatggatctgattttggcaccaaagggtgtggcgctggtgtgatccatggctcgaaggttggtgagctgtcaagatcaaaggagaagggtgaatgctcccaaagctctaagagtagcattggtgattatagcaccagcaccagcatcagtgaggacagttatggcagcttcagtgctaacggaagcaggcctcacatgtcaaaggatgtgagatggggagccatcaggcgcatggctatccaacaagggagcttgggattaaagaacttcaagcttctcaaacaacttggttgtggggatattggcactgtttatttggctgagttagtgggctcagactgcatgttcgctttgaaggttatggacattgagtacctcataagcagaaagaaaatgctcagagcacaaactgagagggagatactgcaaatgctcgaccacccattccttccaaccctgtattctcatttcacgacggacaacctttcttgtctggtaatggagttttgccctggtggtgacctacatgttcttaggcagaaacaacctaccaaaaccttttcggaagcagctgcaagattttatgtcgctgaagtcctcttagccttggagtatctccatatgttgggggtcatataccgtgatctgaagccagagaacatacttgttcgtgaagatgggcacatcatgctctcagactttgatctgtcgctgaggtgctcagtgagcccaatgcttgtgagaacatcatcagtagacagagatgagccaagtaggccttctggtccctgtgcacaaagctgcattgatcccctgtgtatccagccatcgtggagcaattcgtcttgcttcacgcccagtctggtttcatctacaccgtcaaggacacggaggcctagagctgaacccctgaagaaaccatcacttccacagctcgttgttgagcctacggaagcaaggtcaaattcgtttgttgggacccatgaatatcttgccccagagatcattcgaggagatggccatggcagctcggttgattggtggactcttggaatcttcctttacgaattactctatggcaagacaccattcaggggaccggacaatgacgaaacactctcaaatgtgatctcacagggcttgaagttccctgacagtccagcattaagcttccacgctcgagatctgatcagagggctgcttgtgaaagaaccggagtaccggcttggctcgtcgagaggagctgctgagattaagcggcatcccttcttcgaaggtctgaactgggccttgatccggtggacttcaccaccagagaccccgaaaaatattgatactgcagcaacactcgcgggaacacgcaagaaaaaggaaggcaaatgtctggaattccggctgaatggcgacgacatcgagttcgagctcttttagttgtagctgtagtggtagtcccaatgatatatcagtaccacgtaagcgcaagagtagtctttagtcccccttccttgcagatttctgttcatccttggtcatttcggacgttgggaagtaaggtaaggttggctgataagcatgtaactttatgcgttgttaatactatccaatattagaagacgctgttggaaaattcctgggcatgtgcgagatgcaactagtag

SEQ ID NO: 43035 - DNA, 281 bp, Zea mays
  Clone ID: MRT4577_139256C.1
acaatctcctatatcttacctccttctctcatacctcttaccaacaatttcttcaaaaattcaaaacccaatttctcaaccctacactatccaacatttcaatcactatcattcatcttaccattatcacccttattcctcctacatccttctatcctattacatcaattacctttcttccatttcattccacaaaacattattacacatcaactacaacaacattttctaactaaacctttcttcatactatcatcaacttcattttcattcattctacc

SEQ ID NO: 43036 - DNA, 730 bp, Zea mays
  Clone ID: MRT4577_139257C.1
cggggtatggacctttagtcgtgtcatcaatgtgctatctttatgcactattagctactttaccaagaactaaaaatggtgattatataatctcactgcatttgctaccagatagatgtttttttgtccagtgatagtgaaccatgctattgtaatccaatattttgcattttttttatttaggttgcatattactaatgagttattgtaacttaagagaattaacattttatttatatgtttcattttagtactgagctattgtaattcaagagatctacattttgtaggttttatgtcgctgaagtcctcttagccttggagtatctccatatgttgggggtcatataccgtgatctgaagccagagaacatacttgttcgagaagatgggcacatcatgctctcagactttgatctgtctctgaggtgctcagtgagcccaatgcttgtgagaacatcatccgtaggcagagatgagcccagtaggccttctggtccttgtgcacaaagctgcattgatcccctgtgtatccagccatcctggagcaattcctcttgcttcacgcctcgtctggtttcgtcacgaaggcctagagccgagcttctgaagaaaccatcacttccacagctcgttgctgaacctacggaagcaagatcaaattcgtttgttgggacccatgaatatcttgccccagagattattcgaggagatggccatggtagttcag

SEQ ID NO: 43037 - DNA, 889 bp, Zea mays
  unsure (1)..(889): unsure at all n locations
  Clone ID: MRT4577_139258C.1
cattgggtacctcgaggccggccggggaagtgatcgaacgcgcaacccggaacgaggcggagccaggcagtcactttgccgcccagtatatccttttcttccgcatctgacttctgttgacttgcaccgccaacatgaacatcatcaagctgcaaaagaagtacccccagttcgagcagggcgagatctttggcctgcaagatgccttccggaagctcgacatcgacgacaagggctacctcgacgagggaaccgtcatcaaggccgcgcagcagtcggagcaccagccgtacgacgtggtgcgacaagccctaaaagaggtggaactagacagctcgagaagagtagagcttgacgactatgtagatctcatctccaaactgcgcgtctcgtctcctgcccaacagcgcatgtcaaccggcccaacccgaccacgagccggcacagcttcaagcgtcaactcgccttccaaccctgggcatgcctcgaaaggcagcgtcggtggcggcaggatccaggtccagggctcttctgcaaatgtcacccacaccatcaacgaagatgagcgaaccgagtttacgcgccacatcaacgccgtcctcgccggcgacccagacatcggcgaccgcctgcccttccccacagacacgtttgagatgttcgacgcctgcaaggacggcctggtcttgtccaagctcatcaacgacagcgtaccggacaccattgacgaacgtgtgctgaacagccgngcaagaagatcaagtcgctcaacaacttccacttcacagagaacaacaacatcgtcatcgagtcggccaagggtattggatgctcagtgggtgacattggcagcggagatatcattgaagtacgcgagcatttgattctg

SEQ ID NO: 43038 - DNA, 468 bp, Zea mays
  Clone ID: MRT4577_139259C.1
aaaagagaggcgggtcctaggagggatagtcttaccatggatcccctcccaaccccccgggggggcgggacttttttttttttttcatccccggcccccccctttgataagcaaggggccccccccccaaggggggtttgctgctacctggatttattctttagggagagaggcaaaccccccggaaggcttgcattgccccacccataaatcagctactaggggcaacatcccccgaaaggctttgggcccccccatgccatgttgcccccgtaccccactccgagcaaaccgcaataccttttgtaaaaccccaccccgcccttggcggctttggcccccgcgggggagcggtcctcgccccactctaaaccaccgttgataatgtttggggccaggccctatccggggagcccccccccggcccggtcgggggcgggagggcccccagtcgccgggcataacggg

SEQ ID NO: 43039 - DNA, 1874 bp, Zea mays
  Clone ID: MRT4577_13925C.1
ggtaccctcgggccggccgttgttggctgaagaaatggaatttgagtatgattggaaggatatttttttcgaagaggccactattgtggatagggagacgatacaggaagttgtgcaggatgaggaagcaataccggctcgaggtgattgggctgtaaaactgggcattaatctgtactatagtgctaatcttgctaagtctcctttatacagtaagcaagttccatacaatagagttatctatgaggcatttggctgcggttctcccaatgactcaccagtgaagctgaagacttattccagaaggcaatgcagggcgaagaaaatagtcttggctggcaggtggtgtggaaaagtatggatgtcaaaccaggttcatccatacctggctgacagaatcaaaaatcatgagccgaaagaaatcgatgaaacatttccttctgatcagaaatcccatgctgaacctgttgaaaattcaagtagagaggcagcctccacaagaaagagtagcagcagaacaattgaaggaaaaacaagcaagagggagaaagaacagttggagaaagctaatgccaagaagccaaaatttactgaagaggacaactccaaatcattggagggtactgctgaagcctccacacagaagataaagggcagatcagttctagaaaaaacaagcaagaaggagaaagcgtataccaagaagctaaagcatactgaaaaggtctcggaagcactaaaaggtccttcagaagcctccttccctgcaccagctgggatggtagtccgcagcagctctaggatcgccaataggaaaatcatgttgaaatcaaagatggaagaagaggataatggctcagctgaccgtccaaagtcaaaggtcgaagacgacaaagataatcctgctggccgttcaagagcaaaaccactaaggcaaaagactaaagtagacgcgaagaagaaaacgaaggaaactagagtagaaaagcgaaaggctcccagtccagcttctcagaaggacgaagaggagcaatcagatgatgtcgagggacgttctaccactaaacaacggctgtctttacgtaagaagggggctaaaacagaaggaaaacagcgaatggagaaacccagattcgggggaagtgctcctcccccaagctctccgaagcgcaaggaagagtacgtgtgcgacatcgaaggctgctccatgagtttcggcacagagcaggcgctgtccctgcacaagaacgacatctgcccggagaagggctgctgcaggaagttcttctcgcacaagtacctgcagcagcaccgcaaggtccacgccgacgaccggccgctgaagtgcccgtgggagggctgcggcatggcgttcaagtggccgtgggccaggacggagcacgtgagggtccacacgggggacaggccctacgtctgcctcgagcccgggtgcggccagacgttcaggttcgtctccgatttcagccgccacaagcgcaggacgggccatggcgcgtccaagaaggcgaaagcgaagaagcaaggcaaagcagcagtaacttagtactagtagtttagcacccaaaaccaatggcgcccttctgaaatgagtagccttggaagggacaggaggaaaacttgtagattccattagcagtttagcacccaaaaccaatggtggtctctgctcacagttccattaattgctagttgaacgggttcgttggagcccacaattaggttggttccctgtgagtaatttgggtaatcattaagacattctcgtacagtttgccttttgcttatcgttcgtttatcttttgctggatgatgtcttgcttatggtaagcacctgtctagctccttttgccttc

SEQ ID NO: 43040 - DNA, 280 bp, Zea mays
  unsure (1)..(280): unsure at all n locations
  Clone ID: MRT4577_139260C.1
cccacgcgtccgcccacgcgtccgcccacgcgtccgagaggtcacacatatcagcatgagaactttattattacagtataaatcataaaaaatctagcagagtatttagtgttagattattgtagaaattacgatttagacttgtttctaaatgaataattttatatataattagaagatcatgatcggttgagaaaaaaaaaaaaaaaaaaaaaaaaaaaaaaaaaaaaaaaaaaaaaaaaaaaaaaaaagggnnggannaaaagggggggggcccttt

SEQ ID NO: 43041 - DNA, 1559 bp, Zea mays
  unsure (1)..(1559): unsure at all n locations
  Clone ID: MRT4577_139261C.1
ttctgaggagcgtccgctcgcaccgttccccgacgcggtcggtccccccacgtagagctaacgaaccgaagcgcgccataatatattgcagggcagcgcagcgagcaaaaggggcgcttcttccatgatcatcataccataccaaaaccttccacaagcttcagggcaatcttgtgcggctgtgccccatccaagctgcttttgtgctgctttttattcattttcggattggtttcgtttagtttccctgctggtctagtagagcgttttgcgaggtaaaaggcctgagcatttcagaagtttggaagaaaaaaaagatgcccctggatttttgaggtgggcatgagtggagagtatacagggcagagatacagccatacaggtccagcttgctgctgctgctcctcctctactcctgccattgtttagtacacgcaacaagggttcgtatctgtgccttacttctgaggaggggtggtcgagaattggttagcacagatgctgctagggagaagaaggctcctccttgtgtgcgcaagcctcgtgcttctttcactcctcgggccatccaatggcgcatcgaactccacggggaataatctcggcgagagccgcaacaggaccagcagccatcctctggaggtgacaccgggagtgtcgttccagctcaggctgcacgcgctgttccactggtcttcgtttggtttcttgatgcctctggggataatcctggtgagaatgtcgagcaagtgccgcggcggcagatgcgtcagagccctcttctactgccatgccatctcgcagactgtggccgtcctcctcgccaccggcggcgctgttctgtcgctgatgaacttcgagaactccttcagcaacagccaccagagagtggggctggcgctgtacggagtcatgtggctccagccaattctcggcttcttcaggccagaaagaggcgtcaaggtgaggagcctatggtacttcttccactggctcctcgggatcgcgatctgcgccacggggatcgtcaacgtctacatcggcctccgcacctaccacgagaggaccgccaagagcgtgaggctctggacggcgctcctcaccgtcgaggtcgccttcctcgccttcttttacctcatggtagacagatggagctacatgctgaagcaaggccgcgccaccgtcgagcagctaataaggccgaccgatagccgcagaacctacccgaccaccttcggaaggagctgaccgtggtgcagcagtgagtgaatctccgaacagaaaggcgagaggtgctttcagacttgctgaagaagacggtagagtgctgctgatggtcttttgtggcttgtttgctttgagagaggtgnggagttctttaatttagaacatgtctcatgtgactgagagcgngcattccggttccagaatgtatattgtacagcttttttcacggttgaattgaggatgcagtctgttgccagcagacagacagtacaggtgcagcatgatactaccatgcttttactgctggtgttcagtatatatatcctgcattt

SEQ ID NO: 43042 - DNA, 263 bp, Zea mays
  Clone ID: MRT4577_139262C.1
aattcggcacgagggctccttcagcctggaggctgtcagtcttctctcttggataaatggaatgccgtataaaattgtctacttcttcaagcaagagatggagctttctttggtcgggctcaaaaatgctaggaaaacatcacttgcagcagctcgcagcgacacccccgcctcctcatcatggaagctgtatctattttagaataagcaagggtggtatttaggaaagcagctcgtggtctaatagttttgcatgcttgcat

SEQ ID NO: 43043 - DNA, 209 bp, Zea mays
  Clone ID: MRT4577_139263C.1
acgcccacgcgtccgtccacgcgttcgaaaggatccgattgtcatggatttctcgaacttggagtttgaggagtgagctggaatgactaaattatggttgatgcagtacagatatattttgagcttgaagaaaaatggcgggcttagtcttgcactacaagaagacagagtgaaagaaaaggggaggcacttcttaagggaccaatttt

SEQ ID NO: 43044 - DNA, 318 bp, Zea mays
  Clone ID: MRT4577_139264C.1
gtggaggcgagtggtttgaagcttgcgatctggagttcatttctgggaacgaggcgatgatttactcatgcaggaacgggctcgctagctacccccacccaggctgttacctgatgagttccgtgacgctcgatgtcggagttagaaacaatgtggcgcgaagcgatctgtcagcggattcgagcacgcggcgtgagatcatctcgcgagggcatcacgtggaggaccgctgttgcggaaccgttctggctgcagtacatgatggagtggcgactggccatcacgcacagctcacgtttagagatagacacgtggctg

SEQ ID NO: 43045 - DNA, 832 bp, Zea mays
  unsure (1)..(832): unsure at all n locations
  Clone ID: MRT4577_139265C.1
cggccgggccgggatacctgttcagaagacacaatcttctaacgtcactcccttggacatttgatacttcggtctcttccccaaaactctaccaaaatggactcttaccaagcacctgctgctggcgccggtggccgtggctgctacaactgcggagactcgtctcaccgcgctgccgagtgccccaccaagggtaccccaacttgctacaactgtggtgagaagggccacgttagccgtgaatgcacttctccccaggctgagaagacgtgctaccgctgcggtggcaccggccacatctcgcgcgagtgcaccaaggacggcggtgcccagatgggtggccgtggcggcggcagccaagagtgctacaagtgtggtcaggtcggtcacattgcccgcaactgctcccagggtggcggctacggcggtgctgctggtggatacggtggcggccgtggaggctacggtggcggtgccggtggctacggaggcgctcgccagaccacctgctactcgtgcggtggtttcggtcacatgagccgtgactgcacccagggccagaagtgctacaactgcggtgaggtcggccatctgtcgcgcgactgcccccaggagacttcatnctgagcgtgtgtgctaccgctgcaagcagcccggccacgtccagagcgcctgccccaactagggtgttccagatgccgttcgatgttttgatctggaacgagtttcgatgcaccgaagcgcttcgttgtaaagcgatgtcggtccttgcgcccacgatgtgacgaatcatcgacatgattacgaattctttttctgatattttcattca

SEQ ID NO: 43046 - DNA, 334 bp, Zea mays
  unsure (1)..(334): unsure at all n locations
  Clone ID: MRT4577_139266C.1
tgacttaacgtanccaggaatttcgggagatttgctcgaccatgtggtgtttgttccatactcaactgatgctgaggacagccttgccgtcgacccgttcaaccgcgtcttcctcgagcaatttcgcgcaagcactgagaacacctagaagaagtggtgtttgaaggaggaccctacttcagctgatcaagtggaggaaccatctaaatggtatttgatagagggatctagaacctcttcactacaacaaagtatagtactgaatattacaggagcttcgtaaccataaatgcttggggttaacacaggaggagcgaagcaagcttggaccaac

SEQ ID NO: 43047 - DNA, 725 bp, Zea mays
  Clone ID: MRT4577_139267C.1
ccacgcgtccttggactcgtgggcggacgcgtgggcccgcggcgagatggcggaaataggaattaggaaaaggttgggcggtcattttcctccctgtcgatctaccgaaaccgcagctgccccgaaagcaatggcgatccgcaccgcaccgcaccgcacgtctcgtgccaggtctggttggtccgattcgcggcagttgggcggtaggtcagcggtggttgcgggacgggctcttctcgtttcttgccgccccgccaagggcggcgtgcatgagacccggttaataaactagcgacgtcggcgtcgacccttccgtcgtcacacctcacaaggaaaccacagcctgccaggccccgccccggacaaccgagaggaggaggtcggcgaaagctcccgtgaaagcgtggcgccggccagagtattacgcgccgctgcatgcgtggatcttttcccggtttctcatcgaggggacagagccaggcgtgactgcgtgagcacatgtgtcactgcagggatcattggtccaccgccgaaaccagttttcaatgtggctgcagaaagtcaaatgttttttcttcttcttcttaatttgagctgacagcgaggaggaggcgtcggtaaacggttggaaacactccatgtgtccgcagagaaacttgtactcgaatggatgattccgtttccgtgaaaaaaaaaaaaaaaaaaaaaaaaaaaaaaaaaaaaaa

SEQ ID NO: 43048 - DNA, 703 bp, Zea mays
  Clone ID: MRT4577_139268C.1
cccccagggcccattttaccccccttaaaaggaaaaaaaaatgggggcccggggccctttggggccttttttttttttttttggggtttttttttaaattttttttaattttttttttttttttttttttttttttttttttttttttgccccttttttttttttttttttttttttttttttttttttttttttttttttttaatttttttttttttttttttttttttttttttttttattcattcattatatatattgatgatgattgacatgtatatcgatcaggtagcagcacggatggatgcatgcattttgtacgtttcaatatggacagcagcacttccatgggtcaccacgtttatcgcagtagccgccattcttagcagggaagttgtactcttggcaaactttgccgcagtgaaatggcgtgcagtattcacgatcgtatggaaagcagaatggtggccgcaacctggggacgacgccgccttttgcttcgcaggatagggaaacaattacaaccaccacaagaaagcatgtcgtcaggatggacacgaaggtctttctccaaccgccgttgagtgccatcatcaggaggttagaagagggatgcctgttgtgctctcttctttttcagacgagaaaaatgaggaagaccccttggtcccggcccgggccgggccctcgagggggtacccaa

SEQ ID NO: 43049 - DNA, 432 bp, Zea mays
  Clone ID: MRT4577_139269C.1
cccacgcgtccgggctatcgcagttgagcaccgtaaagatgttgattccgcggtggttactgtccttgatgaagtcatgccgtccatgactggttcagctggaactttgtttacccataaagaagtgttgccatctatggatgattctgttgggaatttgtttgctaatcgcagcacacatgaagtgggtagttcatcatgtgcaggacatgagatacatatcgatgagattgatgtaagtgttcaccctgcacaacacacttcttctggggaggctaaaactggcaagcaagaaaacataaacaatgaatgtgtgggaagacttgcatcagtcgaaggggtcagtgagcaactaaatctacattctgatcctataccaaatggcagtcagcatgatttgattcccaaccttgatgtgctatcatcaaatac

SEQ ID NO: 43050 - DNA, 468 bp, Zea mays
  Clone ID: MRT4577_13926C.1
tcaccagctttcaaacgcgcgctcgcacacggcagagctaggagactgagtgaggaggaacagccatggctacatgaccggcctcttgtacggcgtactgcccatgatgcgcgccgacaacagggacaggacggacgacgtcaacagggcttccgtcaaggcacacgcgcaggccggccatcatgccgtgctgagtctggtggtcactggcatctacagatgttccttgtcacaagctgtgcactccgagaccgtcaagatcattaagatcaaagactcgacaacaacctcgcggaaggactatcccgtagactatacatctctctccaacgcgaggatacattcttacctaccattgaaggagcggatgtacctgcatccgctgtcgattgctgacgcattatgctaggtgaagacgtttgatcatgacatgattaactctcaagccactacttgacaacaaagctt

SEQ ID NO: 43051 - DNA, 588 bp, Zea mays
  Clone ID: MRT4577_139271C.1
atactccgccatcttctgcagacaccgcaatcgaaggccgtcttcgccggcgccgcctctgctatgcccggaggggcggaaacatgtctaccgagctccagcgcaccggcccccgggacggtccagtgcttctggcgccacaagacggctgaggtcgccgtctactccaagatggggcgcgggttgatcacggcgaacagggtgccgattgagcttcatcgcgacggagatgctccgcctcaagggcttccagcccattctggtggcgtagcgctccaggttctgggacatctgcatgaggatccgcgtcccagggggcgtggaagacgattttgtatctacgccattcaccatgccgttgccaagggggtctgacgcctactatcataggtacgtcaaggaggccgtcaacatggaggacaaggacatcttcacccggtacgacctgaaccttctcgtcgtcgacccctggtgctgcgagccgaacaaactcggtggtcgtcttgcccgcgccttgttccaaaatctctagcgtagacacctcagatgccctcgcttgacgcaacgatgactgagatgtcccacttg

SEQ ID NO: 43052 - DNA, 403 bp, Zea mays
  Clone ID: MRT4577_139272C.1
agggggtgtggagggtgaatgcggggcggcgggggcgccaagaagggggggaccgggccgaaaaaggaaccaaacaccgcggggggggggggaaagggagacaacaaaccaacgcgggcacaaaacaggacagcaacggacccccgacaccccacagcacgacaacacactggcccacaccggcaccccaaccccaccccaccggggcagcccgaacaccccagcccaaaggacaccactcacaccgggccaaaagccacaaaacagcgccccgcaccaaccgacagaccacgaaacgaccaaaaccccagcacgaccccggccgccccccgacctacccccgaaacgtccccgccgaacaggggccgagtgacgactgctccccgccccagccgaacctcca

SEQ ID NO: 43053 - DNA, 693 bp, Zea mays
  Clone ID: MRT4577_139273C.1
taccctcgggctcggcgcgagcttgttatcctcgccgccctctctatcttcctccttttgattgtcaatctcgtcgtcggcctcttcctcctcctgttcttcttccccctcttcctcctccccctcttcctccaccacctcctcttcctcttcctccgcctgttttttttttccctcttcctcatcttcctcctcctcttcctcttcatcttcctccaccatctcctcttccacttcctcttcttcttcctcttcctccaccacctcatcctcttcttccacctcgttatcctcttccttattcttactactgcgtgctgtgcccgcagcctcgagcgcccgcagctggctgaaccggcgcgagatggaggattggacggaggacacgtgggcatcgaggtcctcccaggtgaaggggagcgggtagggcgagcaggcggcgagggtgtggaaggcctcgcgcaggacgcccttcttggcagggagctcggcgatggctgcctcaaggtcctccgtcggcatcatcgccggcgccgccgtccccatgggctgggtcagaaacgtcggtcacgggagcgagtaaatttacaattcccggcctcgaaggcctttgtcctccttttgtctccctaaactatctccatcaattctaaattcatcctctgtattcgagtcttctcttgaaagatttag

SEQ ID NO: 43054 - DNA, 322 bp, Zea mays
  Clone ID: MRT4577_139274C.1
gcgcctctgaaagttcggagtttccggtctgttcgcctacgtctccgcctagcgtcccgaagggtaatacttgtcaagtggcaatggcggaccaaggtcaccaacccactgttcttcataagctcggtggccagctacagctgcgctcgatcatctatgaacgtgttctggcacgtaacatattgccatctggcttatcttatgaaaggagatgtgtcacaaggaactacaagaccgagagcctttggggcccttcaatgtgagctagcggtggcatgaatgtaccagcgatgcagaccccggtttgagctaatgctcctgc

SEQ ID NO: 43055 - DNA, 548 bp, Zea mays
  Clone ID: MRT4577_139275C.1
gttgttttttttttttttttttttttttttttttttttttttttttttttttttttttttttttttttttttttttttttgggttggggggaaaaaaacccggggggaaaaaaagttttttttttttaacccccagggagggttttacggggggggggggaggttttttttgggcctttggaaaccgggccaaaaccgggattttctttaaaacccccagggtttaaaaccccaagaagggttttacaaaaggtttggggccctaaaaaggccctttggaaaattaaacggggatttccttttgaaaagaaaggggggggggacccaaagtcctttggaaaacttggcccccgccctaattggggtgcccgaaaccggttaaaaacacagggtttttaaggcccagccgggaccagggaaaataattggggttttgggccccggaaaaaaggtttaaaaatcccaatggcccctgggaagggtttcaggggcccccggaaaagaaccccccttcccccccagaaccccgggggcccccctttaaaccc

SEQ ID NO: 43056 - DNA, 405 bp, Zea mays
  unsure (1)..(405): unsure at all n locations
  Clone ID: MRT4577_139276C.1
cagggcttagtggtgtgtgacatatgtggcagtggtagtgcccctcatcttattgcaaactgcgctcggtgcaatgcgcgtgagcacgggtactccctttcttttctcctacctgcctattacctttttcctttggtcttcacatactgaactcgtggaaaatgtacatatacatacaacatatgttcgtctgtgtataacatgtggtgatcagttggtagacatgctttgtaaggatgtttggatagtagttactagtgaatggtaagagaagagaagaatggtaaagagaagagaatgttttgccacagataactcatgtaaatactgtaactaaataaggccttggatatttcctccatttgttgttttgttctttacaanatagccactatctgttaaaat

SEQ ID NO: 43057 - DNA, 217 bp, Zea mays
  Clone ID: MRT4577_139277C.1
tatgtatgcatatggcaatatatatctgtatataggtatgtgcaatgccgtaggaggtgactgcgaaagtaatatccacagccactatatacgtatatatatatatacacatagcattctgaaccagtaccacattacgaacgaatcagtcaggctttttgttgttaaatatagacaagcagggacagccacacacccacattgccaacaaacctgg

SEQ ID NO: 43058 - DNA, 465 bp, Zea mays
  Clone ID: MRT4577_139278C.1
tggcttggaacctttgggctgatttatgtgcttgcgtatgttcggttcgggtcggttgttcttgattattgcatgcttcttattgtggtggtgctggctggttctcgtttgatttgggtcgttcgtgagggtcctcgacggtttctgatgttgcttcccttcttcagcgtttagtcccaccgtagacttagtttctcgacttctgctcctccctattctcttaatacgaaggctaatattaagactaagtcggagttggctacggtgttgctgctgctttcgttgtagaatgttagtgagtcatttgatttggtgctattgtctagtcttaatatggtgtattattttgctcttgcgtttattatattcaggccgcttccactgcgtctgctgcctgggtatacggcgattttagttattgatatattggtgactatgtctattaagaagtaggatgataagttg

SEQ ID NO: 43059 - DNA, 1371 bp, Zea mays
  Clone ID: MRT4577_139279C.1
gcggcggattgaacaggtctacaggcgcgctcccgcacgccccgcgaaggcttttctcgacaagcttcagcagcggcgcagtcgaccagccgaccaccaggcaccagcccaccgccaaacgtaggatggcggcggagactaaaccggctgcggccagcggggttgccggcgagatggaggtggaggcgtaccgccgccttttcccggtggccttccttgagcgccacctcggcgagtccgtccgcatcgatgcccgccgcctcagagaggcccgccccaccaccgtcgccctcggcgccgtctcctccgcgcatggttccgctctcgcccgccttggcgacaccgccatgctcgcgtcggtcaagctcgaggtgatgtcgcccccggcggagcacccagacgaaggatccgtcgctgttgagttccacatgccgcctatctgctccccgctggttaggccaggccgacccactgacgttgcacccgtcatctccaaggcccttgaagacgttttgacgagttctggaatgctaaatttgaaggacctctgtttgatcactgggaaggcttcttggctagcgtacctggatatctattgcttgaatgctgatgggtctctgtttgatgctgcacttatttcagcagtggctgccttcacacatttggagattcctttagtttctgttggtgacgatggtaaattatttactgttggaggcaatgacggaaaaaacaaatttgaattggtaaacagagaaaagaggaaactgacacttggcgacattccattgtcccttacatgtgcacttcataaaggatctatactaacggacccaacttctgaagaagaatcaattatagagacctatgtgactgttgtcgttgattcttcagaccgcctagtgtcattacaaaaagttggaggcacagtgacatccatggcaactattaaggagtgcattagcttggcgaaagaaaggaggctgaggctaagagaaattctgatagactctgtcaaagccatggaagtcgaccatactgaataattctgcaaatacattcagttaatctaaccggattatttcttgatggttctctgtgcctcggctgcactgattgtaacagcatttttgttgggttagtccaagtatgtagctatttgtactccgcacatgatttttgacttaagtagccagacaattttatctgacgagcatgtctgcaatgcatctttttcgcgacttggcatctttgtaacaccctaattcacattttgcaatattttattttattttttataatcaataagaactactgcatactccctttgtcagagtgtttggatctaggtggctaaagtttagtcctgtc

SEQ ID NO: 43060 - DNA, 725 bp, Zea mays
  unsure (1)..(725): unsure at all n locations
  Clone ID: MRT4577_13927C.1
cattgggtacctcgaggccgaccggtgcgccttttactacaactatggtgtttcgtcccgccgccgaaacacgagtgatcatctgtggagcgacccgctgagaacaggattaagagagctctccatgcgccatggggtactcatcccatgccgaggagctctagatacagctccactacataaacagtatgtgttatactgcactctgtggtgatcggataccttctacctcctagtatgagctcttgatcctgcgaataagccaccgaatggacaatgagaattttttgtatgcttttgacaaattctccgcagaacaggaggagatctccatcatccgttgctcttttctacatatgctgtctcgttgctgcatactacaactcacgttgggcgatgtgatgaatgatatgattttctatcacctacctctagaattatactcgattatgagtgaagtcacaacctgcttctgatgatctatgagaagacgtcagcggattgttagcagatgtctcctcaatgaggtatctatatgcatgatgaggctagttcagntctacataaatagctgactcacacgatgtgttttgactagtaccgtgccgcagcttactcttgttatcccgatgctgaaatgttaccatgccgctgatttgcttctaatacttgtttcacctgctgataacagccatgccatcagtacgcaatgcaaagcctatctg

SEQ ID NO: 43061 - DNA, 624 bp, Zea mays
  Clone ID: MRT4577_139280C.1
actccatagggcgattgggttcctcgaggccggccgggatccccaaccgatctcgcgaacccgccgccgacgtagcgcaggatacgcgcgcacgaagacgccgcaaggaagcgactatcagggacaaggtgcacaagaaccatctcgaggacagctgacagagcactcgccgaatcatgactgctagatatccggaccatgctgtcctaccgtcgatgtgtgcgtcggccatagtgagacacgtttctgccatgcgtgagcccatggacacatgtcacatcctagatcctcagcaccgttggccaagagcccaatgcgtccccttggcatcctgcacttccctcggccatctatcggggactctccctacgaccacagctatgcgctactataactcagcccctcccactctgaagctattatcgtcgacatctacgtccaggtcatatcgacctgcctgtcaattaaaaatctgtctgactgtgctggggacgtaaggtcgccgcactaatcgcttgcgttgcccgatctgctccgtggagcgaatcttgctcttgcctgatattgtgtgagtatccgagtaccgctcacataagacactacatgcgaactgttgtcataagg

SEQ ID NO: 43062 - DNA, 578 bp, Zea mays
  Clone ID: MRT4577_139281C.1
aagaacgtacgcgtgaggagaatgtgggtcggactctggtacagattgtggtcctggtagagagcatactaacatgtaaagaatgatcggaggggtgagtacagaggtgcaggtgaagatccatgatcaagaactccgagcctgacacagatcgtgactctggtaggaactctggacatgcaaacgaaatgatgcgggggatggtaaggttccggagaaagattcctggtaatgattctaaatctgatataaattgtggttttggtaggaaatctggcgatgcaacgagtgatccctatgggggacagttggtattgaagaagagctctgggaatgattctgagtctgattctgacagtggttctggcagggagaatgtggagcatataatgaatcatctcaatgatagacacaatgagctaaagaaggaactttctgaataactctgagtctgattctgatagtggctctggtagggactatgtggagcatgcaaaaggatcatcctgatgatagacggaatgtgcacatgaagagacctcggtatgattctgagtctgatactgatagtggctctg

SEQ ID NO: 43063 - DNA, 351 bp, Zea mays
  unsure (1)..(351): unsure at all n locations
  Clone ID: MRT4577_139282C.1
ataacnctnntgggtcggtcttttttttttttaaaaaaactgcaaccttatttgcttttggcctcgatgtggaggaggtagtcaacgatctgacggccgccgagacggttgatgagggcggaagggatggatccggcggggtcgatgtgcatgatgcgctggatcttgacgccgccttcgacgggcgtgaggatgttgccggtgaaggtgaccttgccgcggacgtcgtccttgggcttttcggggaagtcggggtgctccatggcggtgtagccgataattgtctgctcgccgcgctggagcttgaagaagagagtgacgaaagatcggttccagatgggccaggtgagc

SEQ ID NO: 43064 - DNA, 991 bp, Zea mays
  Clone ID: MRT4577_139283C.1
ggccgctttttttttgtgtgtaagctcccaaaaaatatagtaaaatagcacccaaaaaatagtaaaatagcagacccgattcgtgaggttctacctagacgtgcacaaccgaaccttgaaaaaacaagaaagaatccaaatggaaggaaccttactcagttcctgttagcaacaacggaatatctcattctcagtatatacagggcagaaaatgccaacctatatctctccacgtttatcagtttcctgatttcaggcggctcaacctgcacatataccaccagatctttgtagccaaaattcagaagcaagtgttcttttcacatcaatgtacggattacgtttctggtggcatgtttgtgtagagcaatgtgtagaagagttccacttccggcatacttcggatgatctgaatgtgtttgttcttgtttggttcctcaagcaacggggaactcagatgatcaactttgggcaagagcgttgctaagggtaatcccgatcctggagttacaatctgcacacccagatcctctaccaccactcccgcgatcttcctcaatgacctctccatgatatttctgaaatcatcacttgccagtactattcgtgtctcagacattagttggtctagctttctgaaatcgtttaggagtgatgaatcatcaaagccactactggacacagccatcaactgtgcataaacagggggattctcatgtacaagataatttatccatgagttatcttcagaaaggcccatgaacatgtccaatatttgtaatactgtctgcaatacttggtccatgttcatacggtctttcagttgcttctctttaaggacttcagttgctgcacgttgcatttgcgttaggaatccagtgattttgtcagtgacaagataatcagccattgcaagaaagctcctgtgtccattttcactaaaggtgtcagattctgcctgtaactgtggaccatttgtacccccggccgg

SEQ ID NO: 43065 - DNA, 467 bp, Zea mays
  unsure (1)..(467): unsure at all n locations
  Clone ID: MRT4577_139284C.1
cggacgcgtgggcggcgctgggcctcgtccaggctgcggcggtggaggtccggcaccatgcggaagcggcggcggcggttcttgacgagcgcgcccacggccgagcgccatcgccgctgcgcctcctccgaggggttcttgggcggcacgtcgaagtgctccttcaggtagctctccagcctctccatcgctcccctctcgcagtctcggtcgcgggggagatgcggtggggggtggggggatttccggcccggaccgacgggggagacgagggagcactggcctgtacggaaatggtttatatatatactccacaagtctatgttcccaatcgcattcgcacacccttatgccgtttgtttcagcaaatataaagtaatggtgattgtaatgattcacaatccattantagtaagggggtgtttggtttaaagggactaatttttagtgtttttattttataccat

SEQ ID NO: 43066 - DNA, 1838 bp, Zea mays
  Clone ID: MRT4577_139285C.1
caagcgtcacggaaaaaattacataatgcaagaaactcagctgtttcaaacattcaggcaatccagttcttcctaaagcaaaactacacaagcaatcatatgcctgcaggatcgcaaactgtgggctcgaatattcattcacccaacacaggattcaacagacttgcaatgtatacattagccacttgtggcaagtaaaacttctggaacatctgtcatcgatcaaaaatatagcgaaatagcagccccagtgcgtgtgactatctaaacgtgcacaaccgaaacttcaaagaaagaaagaatcgaaatggaaggagctttactcggttcctgctagcaacaacggaatatctcagtatatacaagggcagaaatccagtctgtctgcgtttgttggtttcctgatttcagacggttgaacatcatccacatgtaccaccagatctttggagccaaaattcagaagcaagtgttcttttcgcatcaatgtacagatcatgtttctggtggcatgtttgcgtacaggaatgtgtagaagagttccacttcaggcatacttctgatgatctggatgtatttgttattgtttggctcctcaagcaatggggaactcagatgaccaactttgggcaagagagttgctaagggtaatcctgatcctagagttgtctgcacagccaggtcccctaccaccacttctgctatcttcctcaatgacctctccatgatatttctgaaatcatcacttgccagtactatccgtgtctcagacattagttggtctagctttctgaaatcatttaggagtgatgaatcatcaaagccactactggacacagccatcaactgtgcataaacagggggattctcaggtacaagataatttatccatgagttagcttcagaaagatccatgaacatgtccaatatttgtaatactgtttgcaatacttggtccatgttcatacggtctttcagttgcttctctttaaggacttcagttgctgcacgttgcatttgcgctaggaatgcagtgattttgtcagtgacaagataatcagccattgcaagaaagctcctgtgtccattttcactaaaggtgtcagattctgcctgtaactgtgcaccatttgtaccctgggcaaaatctaagtagagatgcctgcctaatatggtgacctgaactctaacatacaagctaagcaatgtcattgcccacattgaagaaactgtctttgtgaaactcttaattttaatctcctcccaggtttcgtacttctcctttggtgtcagtgcacttgagtctaccttcgcttgccgtagcttgtcagtcaattttgaaatatccagttggcttgttatcttatcactgagatgatgcatggccaaaggcaatgtggtagtgtcgcaaatcctcttcaccttctcaaagtgtgcctggagcctacaacaaaatggaagcatgcaagtggttcttaacgaagtcgtcggcggcctgctcctccatggcgcgcagctgctcgacccgcacgacctgggcgcgtcgcgcgtcgtagaagtggtaggcggcgtatcccactccggcgacgcccagggagacgaggatcttccggcggtgccgcgcccagaacccccttgccgaagccagcatggaggcggggattgagatcgcgcgggcgaatccggcgacggcaaggcggggctggtctgcctggcctgcggtgctcgggatcaagaaggcatggaggaggggcgttgagagtcgagactagtctgcttgtacaattgcggtgtagacttctatactatactcctcccggccgacctcgggggtaccc

SEQ ID NO: 43067 - DNA, 673 bp, Zea mays
  unsure (1)..(673): unsure at all n locations
  Clone ID: MRT4577_139286C.1
ttgggaatggatcaggtgcaaaccatgcaagccgtcatgatgattttacaaaacaaccctcccaccgtgtatccgttttcaaaacgaccattccatttcccctgttacatttttaaatttaccttgccccttcaccaacatgttggtttgcatctggtccgttcctattggtttaaggctttgtttgacattagaatggctcgagtttattttttgtgttattactttgatttttgttgaagcaccaattttcttggaaccatattgtcaaaatctgatattttcatgtactctttgctgttcaacttttgaagctgttcttaaaataattttattttcgagatggcttttcttatcgtcttgcttgaaaggctttagttctgcaacccatcgttgaagatgatggctgcttgtactttcatctgaactcagcaacatcattcatgaatatgggaggagtatatttttagaattattgggaagactttgttgtgaccctcgtctcactttcagtctcaccgcattcggtcatgctctccagaattgttgcagtttaagaaatagctgtatcttgaccatgtaatatgtgagcctaggtggaaaatcattttacctaattgcaattctttatnnnnnnnnnnnnnnnnnnnnnnnnnnnnnnnnnnnnnnnnnn

SEQ ID NO: 43068 - DNA, 294 bp, Zea mays
  Clone ID: MRT4577_139287C.1
caggtaaccacctgagcccagagtggaccttatcaaacactatgcaggggagcgtagcgggctacctgagactgcttataaccaggcatgcgaggagaatgaatgcgttgtgctgactgaatgggctcaagcattgattgcttagcacgctatggctagatgttgatcccaaatcatgttttggaccttacaaacacatagtgtgacttcctctctggcatatgatgaggaacgacctcatgtctactttgaactaccttgaggaattttttatacttttgcaagaacatgtac

SEQ ID NO: 43069 - DNA, 282 bp, Zea mays
  Clone ID: MRT4577_139288C.1
gcacacgatcgtccaaggcaaggagcggaacaccaaggatgaccctcctggtgctcggttaactttgtaggatgttactcccactcaaacacctaaagatgaaccttatacagctgttgatcagcgactacaccgaacacatgatgcacaacggtatgcatgtatacttcgacgaattcactggccccaccgaaagtatctaccaaggtgttatcttactcagtcttgcttaactgactgatgcatacccttacatatacgaggacatcggcgttcatcaac

SEQ ID NO: 43070 - DNA, 274 bp, Zea mays
  Clone ID: MRT4577_139289C.1
cccttaaccatgctgaatacattatattttggaatccgaaacaaatgcatggtcaagtttcattccaaaatatcccctaatcttgcttgaggagtagaactagttttatcataattatgaacattggcctcaaatcccgtcatgaattgcgacttatggaacttaaaagctcctctttatcttgggatcctaacaccagggcttattttttttgacttaggaggtctactttatgtgcggaacgggggctaataaaaggattttatagccttta

SEQ ID NO: 43071 - DNA, 282 bp, Zea mays
  unsure (1)..(282): unsure at all n locations
  Clone ID: MRT4577_13928C.1
ggctgagtgtgatcgagtgtctccggcctcgctggaggtgacctgatcgccataaggaaggcaaccttcatttgttagaaaaagatgataaaaatgagtcacataaatattcagcccacacctacgtatacttccacacaacatattatctatncngcatgnnaacaaatggaaaagaaaccatgaaaacaaagataacttanagactacaacaaaagattacgtgaaaactatgtcagtggtgagtatcggcaaaaaataaaagtaatgtagtggagtagt

SEQ ID NO: 43072 - DNA, 550 bp, Zea mays
  unsure (1)..(550): unsure at all n locations
  Clone ID: MRT4577_139290C.1
aatccaatacaaacatcaacttttnttctttagaaaggggcataaataaactagcaaaaggccatttgcagatcgcaattgcaagcccaaccgattgcacacctggaccacgggtcccttctctttttctctgggtgggggtcggacgcagaaggggatactatttctttcaccgtgccctcgagaaagatgccatttcaatgacttaatatccaaaaccgggggaggagagcacagcttcgagaattccagcaccaatttgacccatttgcatgggtgacaatccaagtccaattatgcaggacgaaccacagctgcagatctgattcagcagagaacacatcgcactgctcctcacctatcttttccacccttcacagcctttgagctgttcctgccacacaaaagggccacaaaccacaagctgctgatgaatgacaagacactctctgcatcttcggcagagctggcatctcctcaaagcagcaaaggcgtcacgagccaaaaggaggaagcagtaatggccaggtgtagctttcatcaaacaaac

SEQ ID NO: 43073 - DNA, 347 bp, Zea mays
  Clone ID: MRT4577_139291C.1
ctattgtagaaaggggctttcttatttcggggaagccacaaacatcaaacaaaaaactttatttttgaactttaactcaaaaaaaaactaaaagaggcccccccccattatggggtgtaggaaccaatgttttgggtttgtcaaaacaagttggtctaatggcaccatttgtttcattttttaaagggtgccctcttaaggtccaccgttctgttaaaacggcaacaactggggttgtgataaaaaggtatcaggcctcaccccatcttacttgttcaatggataaacttgttgctccttaaaaaaactggaaaacttccatgccctccattgggtgaaaggaaaaa

SEQ ID NO: 43074 - DNA, 837 bp, Zea mays
  Clone ID: MRT4577_139292C.1
tgctgtgttaattaatgctggacaagcaaatgctgcaactgtaagtgtttataagcaccatgtcatagtcatcagtagcagttatgaactcagtgactgatatttgttgaagtgttaggctgactccagcagttcacccaaagcttacccataagcactgttttgcactgtagactgcactgttcgcagagtggagtttgaatatgggcatgagtatgtgtaagctgttggagatagtcttagagtggacgcactagcgagttcgacccaaaggttaagctgatgggagaaagtagtttatgcacctttttggttgaactggttagtgcatccactctaacttggtatcaaagccagaggtctcgagttcgaatcctggcagaggctttatttgtgccttcacccattttattccatgtttgcgcctttctctttggctgcgtttgctcctttctctctggctgcgcgtgagtgaggatgttgaagtgtataagtggataaactatcttcttccgtcagcttaagcttttgggtcgaactggctagtacctccactctaacaatattgaggttttgtctcaaatgattgcctatcagggtgatcttggctatcaggatgcagtggatagtgcagatgctgttgccaagcttctcaatgtaagcacagataacatactgattcagtctactggtgtcattggtcaaaggataaagaaggaggcacttttaaattcactacctagacttgtgggctcactgtcttcttcagttcagggtgcgaattctgctgctgtggccattacaactacagaccttgttagcaagagcattgctgtc

SEQ ID NO: 43075 - DNA, 237 bp, Zea mays
  Clone ID: MRT4577_139293C.1
gcacgagtgccgttcccaccggtgtacggcgtggcgtacgcgtcgccgccgccgccggtggaagccgtactagtaaaccacgcgttggccgctcgctcgcggtgcctcgccgtcgccgtcgccggagtatactacttttccagccgccagtatagtacttgtccatgcatccatatccatctagtattttttctctgatggtttcgtttttttttctttctttctttgtatctcatg

SEQ ID NO: 43076 - DNA, 353 bp, Zea mays
  unsure (1)..(353): unsure at all n locations
  Clone ID: MRT4577_139294C.1
gacccacgcggccgancnngttgntgagcacnncncnggggagggccagcnngagnncaaggcngnacncngggggccaaagcgggcccccnncgaccccnnngacaccaggaagaagcagaacaacancaagcncnangngcgacgngncnncancanggacaacngngaggagcngancccagagnggcngagcggggggagggnanngnngacncngaggancnnccccncaacancncncgngagacncnccagcagaacaagaaccncaagggcanccgcaagaancnngncaagaagngcgnngagccgnnnnnngagaaagcggagaacaaggaggaccacaacaa

SEQ ID NO: 43077 - DNA, 325 bp, Zea mays
  Clone ID: MRT4577_139295C.1
aatgggaaaaaactaaagtcaggtgcagagggcaccatgacgaacaccagagcagagactcactcaacaaaccaggttgatggacaaggcaactagtaaccagaaaggcgcctgttatatacatcgaactaaccggacatggagggcacgtgaccacaacataaagaagcatgggttaagcacgtgggagagtatcctgcgggaactagctcataatccaagattaggagctgtaattcaaaactgaaacaaggtggagcttggaaatcagacccagagaatttgaagtgtgttggctaatgggaaggaaccacatacaggctgg

SEQ ID NO: 43078 - DNA, 453 bp, Zea mays
  Clone ID: MRT4577_139296C.1
gggaccatgcgggaggtccggcgtctgtcaagagatatctaaacgctcgtcatactcttgaatactatattatactgcttcctgttcatacatggggcttgtgcctaagcagtggcacttctggatctagatgcagcgagcgcatgttagcttatctgcctccagcacctgacagattagcgtcatgctggctgagcactagaccactcgcactcgttgcattcgcctgcaggacagagcgaggacttttgctgaacgcttagcgaagcaaggacgtactgtccatcaggacgattcaagccagcgacttgggttcttgtcttaggactcctgaactgaattttgcagctctggaggcaaaaaagccataataatgctgtgtaaattgagacgaaagatgacattctttgtatgaaatacagaatgtatcagctggacactgaatactctaat

SEQ ID NO: 43079 - DNA, 387 bp, Zea mays
  Clone ID: MRT4577_139297C.1
gggccatcaacattatggatgatatacaacgtgccgctatacctcctagccgaactacgtataataatgttataaatgcatgtggagctgctggtaactggaagaaagctttagaactttgtaagaagatgactgaaaatggtgtagggccagatttgatcacacacaacattgttttgtctgcttttaagaatggagctcagtactcaaaagccatagcttactttgaaattatgaaatcctctaaagttgcccctgatacatgcactatgaatattgtgatccattgccttgtaaagattgggctgtatggggaagctattgagttgtttaactcaatgagggaaagaagaacaacatgtcatccagatgtcgttacatatacta

SEQ ID NO: 43080 - DNA, 666 bp, Zea mays
  Clone ID: MRT4577_139298C.1
aattcggcacgaggattgggttggcagcacgcccctgcacacggtgacacgggccacggcgcggcgcggcgcggcacggggagcgagcgccgagcgagagcaagcaaccgctgtccgccgggccggccacggcgctgccccctgcttcgcgccttcgccggtgcgctcacgcctcacgcaggtgcatgcatcgacctacggtatcctagtctgggatcagaaaagaacacagcaacaacaaagaagaaaggcgcgagcgatggacggtgacgccggaccagagcaacacgggtgcgtgcactacaggaggggatgcaagataagggcgccgtgctgcggcgaggtatttggttgcaggcactgccacaacgaagccaaggactcgctggaggtcagcgtccacgaccgccacgtgcttccccgtcacgacatcaagctggttatctgctctctctgcaacaaagaacaggatgtgcagcaagactgtgcgaactgcggagcatgtctcggcaaatacttctgcgcgaaatgcaacctcttcgacgacgatgtgtcgaagaaccaatttcactgcgatgggtgcggcatatgcaggactggtggcgctgagaattctatcactgtggcagatgtggatgctgctacaccactccgctgaaggattct

SEQ ID NO: 43081 - DNA, 268 bp, Zea mays
  Clone ID: MRT4577_139299C.1
actcgacccactcgtccgaagcacacactctcgtattatatattttattttcgtccacacatttccctttatccgtcagtttttaaaactacaataatcccacaactctcacatccttctacaacttatcctcaactaacataccttccatcaattataactccaatatattcaacacccatctcttcaaccctatattcttcatcactcaatcacatcaagctacatacctttattacatctactttcaacaatctccatccctatc

SEQ ID NO: 43082 - DNA, 2016 bp, Zea mays
  Clone ID: MRT4577_13929C.1
ttcgacatcctaaacattaaatggtcagcgattaaacttattagacaagactctaatccaataagacttgctagctagttcatcaagcgatggccggagattaaggatcaacagccagcaacacatggagtaaaaaaataaggagcaaacttgccttgtggaaatcccaataagtccttgtggaaatcttcagtccagacccagaaatcccaatcatggacaacagtgcgtactactgctactgctgccttctagctcttcttccacctctatactttctcgtcaagttctggtggagaacttcctgtgcacgtcgtagccatggactccggctccctccaggcccatggcagctccccatcatcggcagcatccaccacctccgcggctccctcgtccaccgggccctgcgagacctgtcgctccgccacggcccactcatgttcctcaggctcggcgaggtgccggtggtcgtcgcgtccacgccggacgccgcgaaggagttcatgaagacccacgacgccaccttcgcgacgaggccaatgaccctgagcgccaaggtcttcgcgaaggacgggccggggatcgtggtggccccgtacggcggcgaccactggcggcagctccgcaagatctgcatcgtggagctcctcagcacccgccgcgtccggtcgttcgggcccgtgcgcgaggaggaggcggcgcggctggtccaggccgttgccggcgcctcgacgcggcgcgcgccggcaccggcgccgctcgtcgacctcggcaggctcgccgccgtgtacgtcgccgacgcgtcggtgcgcgccatcgtgggcaggcggttcggggagacggacgctctgctgcgcttcgtggacgagagcgtccgcctggccggcgggttcacgcccgtcgacctgttcccgtcgtcgctgctcgttcgcgtgctcaccttgcgccgggccgtgcgcaggctggagcacttccgcgagtccttgttcggcttcatggatggagtggtgcgtgagcacctggagaggaagcagtcatcacgtggtggaggaggagaagaagaagaagctgacatggtcgacgttctcctccggatccaacaggagggaaacctaaagttccctctcaccatgcgcataatcgaagcagtgatatttgatctcatcgcagggggtatcgagacagcgtcatcgacgctgcagtgggcgatggcggagctgatgcggaaccctgccgccatgtccaaggcgcaagccgaggtcaggggagtctacgcggggcagacgaaggtaaccgaggaccgactaggcgagctaccctacctgcagctggtgatcaaggagaccttgcggctgcacgtcccggggccgctgctgatcccgcgggaatgccaggagcactgccgcgtgctcggctacgacgtgcccaagggcgccatggtgctcgtgaacgcgtgggcgatcgcccggagcccggagtactgggaggagccggacgcgttcgatcccgacaggttttccggtgacgcggcgagggatttcaggggcaacgacttcgagttcataccgttcggcgctgggcgacggatctgccctgggatggcgtttgggctcgccaatatcgagctcgggctggccagcttgctgttccatttcgactggagcctgccggagggcatcgttccaagtgagggcttgttcggttattttcaatccatatggattgaaggggattgatacggattgtgagggattttgacttgctagggattgaaaccccctcaatccccctcaatccatatggattggggtagaatcgaacaagccctgagatggacatggctgagaccatgggaatcactgctaggagaaaggcagacctcctgctgtccgctacaccgcgtgtcgtcccacgccggagttaaattcatggttcccgtacaatttagaaccaatgaacttctcttgcttgcttctgaaaaaaactaataataattgtgttgactgtttggtt

SEQ ID NO: 43083 - DNA, 579 bp, Zea mays
  Clone ID: MRT4577_1392C.1
tcggcacgacgcaggtttgcctgcggctctgatggatctgtgagaaggtacgacttccactcaggttcgcaggatacggtggggctccatgaagatgcactagcctgcattgagttctcttcactgaccggccagattatgacaggcagccttgacaagaagctaaagctttgggattcaaaaacaagaaatgtaagcccgagcggcaccataaccttaaattcagatgtggcctcaatttctatatgcggcatttacatattagctgcagttgagagaaatgtttatctttatgacatgaggaatctaacaagaccagttgatgaaaaagactgtcctctggattatcaaattcgatgccttcatacttctctagagtggaatgcttatgttgctggctctgtggatggagttgttgcattgaagtatcttgatcggggaacagatagagatttgggatatgcatttcgttgtcatccaaattccagaaacggaaaatggaatctggtccctgtaaattgcatctcagttcatccctgcaacagaactttcgttacgggagatgataaaggatgcact

SEQ ID NO: 43084 - DNA, 354 bp, Zea mays
  Clone ID: MRT4577_139300C.1
gagaaagagggattaggctagagcggatcttgcccccgggggcggggcaaatccaggtacaacggccacacaccgatagacataacgctgacctagaggggggaaccgtttctaagaaaggcacggcgaaagcagtggcgtgaatacacaacaagaagtgcaatctagcctatagtccagatggccagggctcgatccgggaccataaagcgttctcatcacaggaagtgcggtccaaggtgttaagatacacacatgttgatcacataggacggtggcaggggactccttcttaatccgaggaaatttagttattcggacgagagggtggggatacagtacttcgtagcatgg

SEQ ID NO: 43085 - DNA, 1092 bp, Zea mays
  Clone ID: MRT4577_139301C.1
tgcaagataagggcgccgtgctgcggcgaggtatttggttgcaggcactgccacaacgaagccaaggactcgctggaggtcagcgtccacgaccgccacgtgcttccccgtcacgacatcaagctggttatctgctctctctgcaacaaagaacaggatgtgcagcaagactgtgcgaactgcggagcatgtctcggcaaatacttctgcgcgaaatgcaacctcttcgacgacgatgactggtggcgcagagaatttctatcactgtggcagatgtggatgctgctacgcgactccgctgaaggattctcaccgctgtgtggacggagctatgcatcacaactgcatcacaactgccctgtctgcatggagtatctattcgactcgatgaaagctatcagcgtgctccactgcggacacaccatccacctggaatgcctttacgagatgagagcgcaccagcagttttcatgcccggtgtgcctgaggtctgcctgcaacatgtccgacatctggcaaaagctggatcagcaggttgcagcgtccccgatgccagcgatctatcagaagaagatggtatggatcctttgcaacgactgtggcgtgacgtccaacgtgcagttccacatcttggcgcacaagtgccctggatgcagctcttacaacacccggcagacgaggggcgatccagccgcatgctctagagtatgagagcaaataaaactgctgtactgcactgcacataaactcgtggggttgtggggtcgatcgataggtagcttgcagggaggaaattaaagactaccattgcgcatggacacgattggtgccggcagttgagtacgtgtattaggcctgtcatatgtagatgtatcatatgctatgcattcccaaagaagaatttggcgcacggcagatgagaacatgtattaggcctgtcatatgtagatgtatcatatgctatgccttcacaaagaagaatttggcgcagcggacagggtatatatttttttgttgctatatacacataatttttgttgcgcggtgcttgtgccaatgatggagagttcgtacgttgtttttcttatattt

SEQ ID NO: 43086 - DNA, 272 bp, Zea mays
  Clone ID: MRT4577_139302C.1
cttccgagacctagaaacaggtttatgaaggcctaaaaggtctagccgacctgcaattaatgtggtttttggagttaacacaggggtagacttagaaggcgatgagattaatttgggtgaggacatcgatgcaaaaggtgatccaactacatatgaaacagctccaagaatcgcaaatagtgggtctagaagatcaagcgtgactccaagggaatatagaaagagacaagacatgtggccaagcgttacacagtgagatgcatgactacctg

SEQ ID NO: 43087 - DNA, 830 bp, Zea mays
  Clone ID: MRT4577_139303C.1
ttgggacctcgagccggcacggcggtgttccctgcttcgcgccttcgccggtgcactcacgcctcacgcaggtgcatgcatcgacctacggtatcctagtctgggatcagaaaagaacacagcaacaacaaagaagaaaggcgcgagcgatggacgctgacgccggaccagagcaacacgggtaaacagtgaagccgccattgcccaagctatgccatgcccatgcccatatagccccatgcatggtttaaatctctctcatcttggcaaccgagtgaccgaccacctctctctgcctgcgtggtcccgggacgccaggtgcgtgcactacaggagggggtgcaagataagggcgccgtgctgcggcgaggtatttggttgcaggcactgccacaacgaagccaaggactcgctggaggtcagcgtccacgaccgccacgtgcttccccgtcacgacatcaagctggttatctgctctctctgcaacaaagaacaggatgtaagttccctgacgaagcagggacagtgttcttcggccactgttggtgttacctgccacacaccacatgaaaaaaaaacccatctcgtctgtcgacaggtgcagcaagactgtgcgaactgcggagcatgtctcggcaaatacttctgcgcgaaatgcaacttcttcgacgacgatgtgtcgaagaccaatttcactgcgatgggtgcggcatatgcaggccttcgcgcgctggctatttctatcactaggtgcatgcatcgtgctgctacaccactacgctgaaagattctcaccgctgcgtggacggagctatgcatcacaactgccc

SEQ ID NO: 43088 - DNA, 995 bp, Zea mays
  unsure (1)..(995): unsure at all n locations
  Clone ID: MRT4577_139304C.1
gttcttcggccctgttggtgttaccctgcacacaccacatgaaaaaaaaacccatctcgtctgtcgacaggtgcagcaagactgtgcgaactgcggagcatgtctcggcaaatacttctgcgcgaaatgcaacttcttcgacgacgataagtgttccctcttctgttttctccggttttgttgtcgcgttccctggcatttcaggtgtcgaagaaccaatttcactgcgatgggtgcggcatatgcaggactggtggcgcagagaatttctatcactgtggcagatgtggatgctgctacaccactacgctgaaggattctcaccgctacgtggacggagctatgcatcacaactgccctgtctgcatggagtatctattcgactcgatgaaagctatcagcgtgctccactgcggacacaccatccacctggaatgcctttacgagatgagagcgccncagcagttttatgccccggtgtgcctgaggtctgcctgcaacatgtccgacatctggcaaaagctggatcagcaggttgcagcgtccccgatgcccagcgatcntatcagaagaagatggtnttggatcctttgcaacgactgtggcggtgacgtccaacgtgcagttccacatcttggcgcacaagtgccctggatgcagctcttacaacacccggcagacgagggggcgatccagccgcatgctttagagtttgagagcaaataaaactgcagtactgcactgcacataaactcgtggggttgtgcggtcgatcgataggtagcttgcatggaggaaattaaagactaccattgcgcatggacacgattggtgccggcagttgagtacgtgtattaggcctgtcatatgtagatgtatcatatgctatgccttcgcaaagaagaatttggcgcagcggacagggtatatatttttttgttgctatatatacacacatatttttgttgcgcggtgcttgtgccaatgagtggaga

SEQ ID NO: 43089 - DNA, 436 bp, Zea mays
  Clone ID: MRT4577_139305C.1
aatattttcaatccttttgcagttaatccaattaattttatgttgaatccggtagagagggcttctaagttagtagtacactctgtggctatttcactaaatttcttatgtgcttaagcttccgtcaaatccatggagtttttcttagtaagaccatattaaccttgtctatctatatcctctaagatcaacggtgttttcatacaagatttaccgatgtactgctaatgtcctatgccaatgaaatatgggaagcctgtagatatatggattttcattgctttgcagtcttttttgtgttttgtttctaatttttaaataggtcttgacctgccacctccaccttctaatatttaaataggtcatgacaatacacatgagtaagactataggatgatgacttggactactaatatttctgagatttatgtgagaa

SEQ ID NO: 43090 - DNA, 249 bp, Zea mays
  Clone ID: MRT4577_139306C.1
tccttcgcaaacatcatggcaccacctgcagagggggctccttaaggtctgggggggtcaattcaggctgccgcccatgtaatcgcctacgtatagaaaggcccgtatcacaagccagtgtattgatgatagagcctgaatacatatccagcacggcgttgggattatacaacatcatctgtctcacatgacaccggtgcatatccacaaagaggactacttgaaacctgcgtaagacctgtagggtca

SEQ ID NO: 43091 - DNA, 457 bp, Zea mays
  Clone ID: MRT4577_139307C.1
gggtaccggggccccccctcgagtttttttttttttttttttttttttttttttttttttttttttttttttttttatttttttttttctttcgtttcttttcttttgtctccaccatgagcaaccgttgctttttgattgggggcataacgacgacgacagactacaaaccaaacactggggttcttcaatggtgcgacaagcctggcgaaccaaaaacacaaggagagggtgtgtttttttttcacgcttttttattgtgcccctatcgggcacggcaagcatccttatgcactaaacggttgtccagctctgctaaacgaaaaaaggggctttgcgggtgtcctgacacctgttctcgttgaacaatccagctgcttctgagcatgctgggaaccgggctttaaagtatctcggcccctactggccaaaagggaaaagaccacctgggggaacc

SEQ ID NO: 43092 - DNA, 207 bp, Zea mays
  Clone ID: MRT4577_139308C.1
aaacatttctttgacattgatatccctaggctcagcatccgttcactgaaggcgggagcatactagagcatgctaaaatggatagcctcaacactgtccatacatacctaatgaattgcataatttcaataacatgggaccaccgtctgaattaaacagaacccagtcaaaacgaaccacatacagaaatagttgagagaatttatc

SEQ ID NO: 43093 - DNA, 231 bp, Zea mays
  Clone ID: MRT4577_139309C.1
cactagtgcagcgagatgcagtgacgtgggtttctcgtcgctgctgccacagctggacatcagcacacctacgtgtcacacttccacacctgcccctccactgggtctgcccaggtttcgccgccgtcactcgtgcacgggcctgtgagatattggaggcacaaaggaatgcaatggagatatgctgatatggaggggcttgcggttcctatgatatctttccgaaacaac

SEQ ID NO: 43094 - DNA, 367 bp, Zea mays
  Clone ID: MRT4577_13930C.1
gagcacacagaaacacaccagttttagccaccgagcaacgaccgaacaacaagggcgaccaagacaggagcccaccgggcgcgcagcgcccacagagggagcgcaacaaaggcgggcaggagaccacaaagcgcacgggctcctagtgccattataccacagttcctccgaccagtttctttaatgggcttcgaacaccttagtgtgcaagcctacaggctacaacaagcgcttgcggcgagcgtcttacaacatccaattaaccaattgcaacaacaatccttggcacattttaccatacaaaccatggcaacacaacagcatcaactagtcctaccagcactgaccaactagatgtggagaaccc

SEQ ID NO: 43095 - DNA, 512 bp, Zea mays
  unsure (1)..(512): unsure at all n locations
  Clone ID: MRT4577_139310C.1
atcaaaacttctcctgtcaggcatgtaaatatttcaaaaaaaaaaaaataaaaaaaaaaaaatgaaacattaatgtaacttgatctaggctgagggggccccaaagtttacaccttccctttgtatcttcccacaggaggctggtgggggctccctttggctcaggagagccctatcctgtcctggccgctctgttgcaccaggggcagggggaagccccgtttgaacatcctagtccgtggctgcgntgactgccttgcagtctctagaatacccggcctccttctnaattcttccacctctgacacggaggaccttgcttgaaccacacacggctggtcgcttgatctggccgaggagctgctcttccccggacgacgcatgggggggtgacccgttccacctggtgggggaacgcttatttgaggcggtttgagtcgccgtgtgttgaaatcctgctcacgcgtctgcttagccgcagctcttccaacccccagtcgggcgctcctgct

SEQ ID NO: 43096 - DNA, 640 bp, Zea mays
  Clone ID: MRT4577_139311C.1
aaacagtcccctttctcttctccacgatgtcttctgatttgatctggcaagtaattcgtaataataactcctttctcgttaaacgtgatggagttcaactttcagctgaaaagaataatttaactaataaacattcatttaaatattctggtttagctaatacaaagacagttggagttaacttatcaaaagataagaaaattactcttgctatcaaacgtaccaagaccaatgctgcacgtcatcctgccactggttacactgtgtatgctttgaacaagcatcaacaaaaccataccaacaaagctgctaagaccatccgtcaactcactactggttcatactatcgtcctgatttggccaacgcagctgttggacgttatcatgctctccatcgttcgttgaaacccgtcatcaacaagaaatctaagcgtaaaccacgtggatctaaagccaaataaatgatgacttgatcttgactttttctcttgccatcatcttcttgacatcgacaatcatgtgtcctcgtcttcgtttttcaccttcctctctttctattcattagtgttgggatcggatcggattgacgatgatgtagtggagatacacatgttcaaaccaacgtcgtacatctgtttgc

SEQ ID NO: 43097 - DNA, 516 bp, Zea mays
  Clone ID: MRT4577_139312C.1
cgtgtgctaggatttcccccgcgggctctctaactagcagagacggcgttatctgcctccgtccgtcggtaccagcccagcctaatgcgcaaggagggccctgatcagacgcgccggctggtcctaaggagcggttccgagggccggggcttgcgagacggctcttccagtcgctcacgcgcaggcgcggagttcgtgccgcgggggccgccgccgccggcgccggggttgtgctgccgcctccccgcaggtgatccgatgttcccgcgcctcccccgccgcggcgtgggggcttcttctccgcgcccagccccgggcggtcgagtactatgcgcctatcggtgaacgcagggtgtttgctgcccacgactcacacgcgccgcgtctggaagcggagatgccccctcccgccccccctcctaccccctcctccccctcccccgtgctagccccccccccgcccccgccccgaccgccgccccccccccccccacacccaacccctccctcctcccc

SEQ ID NO: 43098 - DNA, 254 bp, Zea mays
  Clone ID: MRT4577_139313C.1
aatggttcaggatttctttgaggatgttggactcactggttagcttacacctgggtggttccacgatagatgggcttctgaaaatgttcaacttgtatgtaaacttgcttataatggaaactggttgcatgtagtcctctgcaactggccgaatgtgattgatgtgcatcatttaagatctctgagaactgtcatgtatactacatcttggacatctgctgcattgttgtattatgcactatattccctatcga

SEQ ID NO: 43099 - DNA, 361 bp, Zea mays
  Clone ID: MRT4577_139314C.1
atttattgctcgatagtttatttttaactaaaacgtgataaataaaaaaatggatggagcagtcgttatagctctattttcatgtctatatttatatggatgattataaacctagacatatataaaacatatacattaattattgtattaattcagtaaaaaatacaagaaattttaatttaggacggatagagcactatttaattttaaataataagatattttgatcttctcaatttcctctgttactcttgcttccaaataattcctctgtatacgcactgtccctcgcatgcgttgcattacggcgggaaacaggaggcttggcgttgcgtcgcctacactgtgacacgaatgaaaa

SEQ ID NO: 43100 - DNA, 1568 bp, Zea mays
  Clone ID: MRT4577_139315C.1
ggactacaacctaaatctgatccagaacgtgctgataataggatgagtgttgcacgtcttgggttggaccttaacacagtagatagtcctgatgtagcagagcctaaccctttcttcccttacaagaacttggggcagtcaaaagtcagcgctccatcggaatgtggcagcactactggtgctatagaagaaagcgagtcacacagaaagtggagagaaatgaagcagaatggctttctttcttcatctcatgggaatgcggtggtgcctaggccacgtggtcgaccccccaaaaggaaaagggatgatgaattcaaaaagagcagttccacacagcatgtacaggctaacaagtctgtgaaggttgctgctcctagtggtctattatctgggctaaatcctggaatcattaaccatgtgagaaatagcaagcaagtttactccataataaaggctatggtacactctgagaggcttgagaatgagaaccactctagtcaaacaggtgaaagagggagagaagttaatgagagaattcaggatcagaaatatggtggtggtttcatgaagtgccatttgttgataaaagataataatgctgtgtttcaccaaacactgcctaacacatcgcagttccttgcacaggatggtgatagtcttaaactgcaactcccatccgcagtcactatgtcttcagataggaccttcagtacgtcagctgatgatcctgcatctaatcatgattacatgactgtactgtcagtaaaagcggctagcgttgcttctcaatggttggaattactgcatcaggacataaggggacgtcttgctgctttaaagcgcagcaggaagagagtcagaaatgctcttcacacggaactgccataccttaccgcgacagaattttcatctaatcaagagaacgaatcatccattgcaaatacttctgagattggatgtactgacaaagcggtttcagaagctcatgtggcacgatggaggtctctgtttgttcagatggacaaaacacttcaggaggaagggaaacagctggctcgtcacgcgcgttgaccgcatgcatgcatatgattggtgacctgcaccggccgagcgtagtctgcatgcgcgagagaacaagttgaagcaagtgcaagaaatgcaattgaattgtgataaaggcctcaaacacatgacctgtgaagctcctctgctaggacctatggctgaactatggaagttgaagaacccaaatatttccgagagcgagtgggcggtgcaagccgctgccgcatcgatctactcgacctgcaacatggtcatgagaacggagaacgtgccttgcttttgataccacacttgtactttagttttttgctttgctgatttttacctcaaaccaggtcttctttcttacctttaccctatgtgaatcgtgatcccttgtccattacagtagtggcgactggcgagtgatgtaacaagaacaaacttgtgatgtatgttatcccgagcctacaatttcacaggcacatgaaacagcacattctttttcaaaaaaaaaaaaaaaa

SEQ ID NO: 43101 - DNA, 333 bp, Zea mays
  Clone ID: MRT4577_139316C.1
ctctttttttctttttttttttttttggcaaactaaaccttagaccggcaatgcgaagacgatgaaaactgatagaaccgcaggatctgggggccgcttattttttagggggaagtctgcgctatgcaggtatacaataggccgatagcggaccaaccgcggggggaacactttacgcccaattaacctgccaggccggacagtcaaccggagaaacgcataccacagccgagggaggcaacaggcgcccaaattaccccctcctgacacggggaggtggtgacaatatgataaccttaccgaacgcgttagcgtctggtaattgaaacgaga

SEQ ID NO: 43102 - DNA, 555 bp, Zea mays
  Clone ID: MRT4577_139317C.1
acttctaaaatggagacccgcggtgtggtggtggccagacacgaccggacatgaccaccgagctgagttcctcagggagaagaagttccaccaggagggcgcccggagctggacaccgtagaagagaatgcaactgcagccggagctgtcgctctgcccagtgaggccgcccttggcaaccggctggtggtctgccagccaagagctcctccatcgagtctcatggaagcccccggaagaagacgaagaactataccgcggccatatgggactgggaggtgcatcatgcaccgcccgcatagtctggatctccagatcaaccaccccctgactctcgactgggagcagtgcctccacctcaatctgcggagatgtattacctgaacagggagactctggataagatctgggatcgaccccgggagcagaacgtggacctcgacatctccacagctccccgacaagggtgcgtcaggcaaacgcgctggcaccttggtctctgtagcaacatggaggtcgtgccgtgcgccaactggcacctcactagcatgctct

SEQ ID NO: 43103 - DNA, 233 bp, Zea mays
  Clone ID: MRT4577_139318C.1
cccacgcgtccgcccacgcgtccgggagatccggatggtccaacagaacagcgtgaagatggtcattgtttctcgtcattttcctgtctttgtcatcttccagcgcctcttcaatgcaaatgcccttccccttcgcggggcttcaagtcttgtacagctcttacgccgtcctgactactattatggtctccggcggtctgtacctctacgtcaattaccttacgcagtcttat

SEQ ID NO: 43104 - DNA, 1975 bp, Zea mays
  Clone ID: MRT4577_139319C.1
gcgcgtggcggctggcggtcgctggactgggagatccaagggccggagttctggaatctttgggtcaacctgaagcacatttgcacacatgtaccatggatgttcctcagttgactgctgaaggtgccacacaacttggagatagagtgtctttattacaccagacagggacacttcagtcagaaactccttgtctgaccttaggccgcgattctaatgcagtatcaatggagaagctgcatgctagcgattgcttgccctgtggtaaagagaatgtcgggacaggactacaacctaaatctgatccagaacgtgctgataataggatgagtgttgcacgtcttgggttggaccttaacacagtagatagtcctgatgtagcagagcctaaccctttcttcccttacaagaaattggggcagtcaaaagtcagcgatccatcggaatgtggcagcactactggtgctatagaagaaagcgagtcacacagaaagtggagagaaatgaagcagaatggctttctttcttcatctcatgggaatgcggtggtgcctaggccacgtggtcgaccccccaaaaggaaaagggatgatgaattcaaaaagagcagttccacacagcatgtacaggctaacaagtctgtgaaggttgctgctcctagtggtctattatctgggctaaatcctggaatcattaaccatgtgagaaatagcaagcaagtttactccataataaaggctatggtacactctgagaggcttgagaatgagaaccactctagtcaaacaggtgaaagagggagagaagttaatgagagaattcaggatcagaaatatggtggtggtttcatgaagtgccatttgttgataaaagataataatgctgtgtttcaccaaacactgcctaacacatcgcagttccttgcacaggatggtgatagtcttaaactgcaactcccatccgcagtcactatgtcttcagataggaccttcagtacgtcagctgatgatcctgcatctaatcatgattacatgactgtactgtcagtaaaagcggctagcgttgcttctcaatggttggaattactgcatcaggacataaggggacgtcttgctgctttaaagcgcagcaggaagagagtcagaaatgctcttcacacggaactgccatacctaaccgcgacagaattttcatctaatcaagagaacgaatcatccattgcaaatacttctgagattggatgtactgacaaagcggtttcagaagctcatgtggcacgatggaggtctctgtttgttcagatggacaaaacacttcaggaggaagggaaacagctggagaacaagttgaagcaagtgcaagaaatgcaattgaattgtgataaaggcctcaaacacatgacctgtgaagctcctctgctaggacctatggctgaactatggaagctgaagaacccaaatatttccgagagcgagtgggcggtgcaagccgctgccgcatcgatctactcgacctgcaacatggtcatgagaacggagaacgtgccttgcttttgataccacacttgtactttagttttttgctttgggcgtgttcggctggctacaagccgacactgttgcagctgtttggattgctgcagctgcaatccatagagagaaaaatactgtagaagccgcagccgcagccggattgcagccgcagcaagccgcagcgaacaagcttacctcaaaccaggtcttctttcttacctttaccctatgtgaatcgtgatcccttgtccattacagtagtggcgactggcgagtgatgtaacaagaacaaacttgtgatgtatgttatcccgagcctacaatttcacaggcacatgaaacagcacattctttttcatggagttgaggatattcatatcctaccgttttggttcggtgagatggtcgaaatagagattgccaccttgttaaatttttaactg

SEQ ID NO: 43105 - DNA, 195 bp, Zea mays
  Clone ID: MRT4577_13931C.1
gagctttctatgtcggcggccggccttccttttttttttttgttttataaccaagggagatttgacatttcatgaccctaaaagcagcacaaccgggagatctggatcagcctgccagggagaccgatccacaattgcagtgaggaggagctgaagaaacaacagtccacggacatgcgcgagtaagaagaccga

SEQ ID NO: 43106 - DNA, 1009 bp, Zea mays
  Clone ID: MRT4577_139320C.1
gccggccgtatcggggtcgtgccagcaggaaaaccaaggaccaagccaagccgccggccccatggccaagcacaaagcctcgcctccggccgcggtccgccgtcgcatcggcggcgccggggcgtccgccatccggtgggcgctgcgcgtcgcgaccagcatcgtagcctggacgctgctcctccacctcttcaccttcctcggcatcccccgcccgccgctgcccatcgcgcggccgtcctgcctgggcggccgcagcaactctaccgccgccgactccgtggtcgcggccggcgatgccgggcacctggcgctcccggctctgcctcccagacggttttacaagagtaatggctaccttctagtttcatgcaatggtggtctgaaccaaatgcgagcagcgatatgcgacatggtgactgtagcacgctacttgaacctcaccatggtgatacctgaacttgataagcaatccttctgggctgatcctagtgattttggggatatttttgatgtaaatcatttcatcgattcattgagaaatgaagtgaagattgtcaaagaactcccacagaagttcaaagaaaaggttcctctgtcaatgcaaccaatcagctggtctagtgagaaatactatttgaggcagatcttgcctctagtacgaaaacacaaggttgtacgttttagcaagacagattctcgccttgcaaacaatggcctgcctctgaagctccaaaaacttcgctgtcatgttaactacaacgcattgagatttgccccatctattgaggctctaggaaacaagatgatctcaactctcaggagaactggatcttttgttgtgcttcatctgagatatgagatggatatgcttgctttctctggttgtactcatggatgttctgatgaagaaacagaagagttgacaacaatgagatatgcatatccctggtggaaagaaaaggaaatagactctgagaagaaaaggcttgagggattgtgccccctt

SEQ ID NO: 43107 - DNA, 369 bp, Zea mays
  Clone ID: MRT4577_139321C.1
tacgtaagctcggaattcggctcgtggactgaagaaagaggcgatatggcactccaacgagtgggactaggagcgtgagaattacggtcccgaatccagcatccgccgggtctatgctaaccgtgatggaccgatggagaagggcagcgtgatgtgccgcacgcagtgcacccccagaaacagcaaggacattgggtccatcaaggaccgctgcagctagatgagcgggctgtaagaatgccagctctcggacactataatggatgcaatgccacaatgagaaacactgacagttatatgttccctatcgaacgtagctgtttgagtccgccatgacagagatggagacctgaagctttgttaacatac

SEQ ID NO: 43108 - DNA, 629 bp, Zea mays
  Clone ID: MRT4577_139322C.1
agcagtggtaacaacgcagagtacgcgggaagcagtgctaacaacgcagagtacgcggggggtgagataagtagaacacggctctcgaattgagatagaaaagaggggatttcaacaagcagacctaagataagcatcaaggcaagatctacagattacaaaggtaaggatgatatcaaacaaaagctcaacgaaggatggagttaaggcaagacaagacttgcaaagcaacaaagggaaaggaaacgaacaagagcgggatagggaaaacaacgctctcggattgaaatggaataagtgaggctttagaatgtgggtaaatgtcatggtaaatatgaagagatgtcaagggtcaaaggtgatataggcaaggatgtaaaggaagaggtaaatgtgcataaaaaccaggaatccaggtacaaccaagaatagagttaagtcttgcaagtggtaaagaatatgatatgaccacaggtaagataagtaagagaccacgcttgaactgagatgggagattggaggttttagataacaaacatagcgtaatcaccaaggtaagatcgagagatgagaagggtgaaaaaaaaaaaaaaaaaaaaaaaaaagtactctgcgttgttaccactgct

SEQ ID NO: 43109 - DNA, 253 bp, Zea mays
  Clone ID: MRT4577_139323C.1
tgaggctgcagtcgcagaaggggtccctgggcagctgcccccaggcctgctcctgctgggccaaagcctcctcctcttcttcttcctcacctccttctagctccacctagggcttccctaactcctccccttgcccctaccaatgcccctttaagtgctgcaggggtctggggttggcaactcctgaggcctgcatgggtgacttcacattttcctacctctccttctaatctcttctagagcacctgctatc

SEQ ID NO: 43110 - DNA, 312 bp, Zea mays
  Clone ID: MRT4577_139324C.1
ccggccgtaacagggcgccagcgtcaccatgacttgctaactcctacaattttttaactagctgggaaacgcgtgtcttgatgaacaggggacggaacagctgcaagcactgctcttaggagatgatcaacgatgtttcacctgctgatacatatctctaaagcaagttgtaaccatggagtctcgtctgccacattcagcaacaatgttttactacacgtgctatctatataaatgaggctcttcactgaactaatgttcgatgttataagtctacagctttgttgatctacctattaagtgaatgacttt

SEQ ID NO: 43111 - DNA, 334 bp, Zea mays
  Clone ID: MRT4577_139325C.1
cattgggtacctcgaggccggccggggaactctcatttagaagctcctccttctcattcccctccgcacgggctcgtctccgactcagagtccgcctctcgcaggacatatattcagagatagcacactatgaggtcaggctgtcgacacccgatgcttcctatactatgactcgataactgtggcttctttgtgagtgctaccaccatgaacatgtgactccagaagccgctcagactagattgtttcacctgagcgggaccaggtgactccctcctccatccttccgcttcttaatggcgccgatcctgctaaggaaccctgtgtagctgat

SEQ ID NO: 43112 - DNA, 189 bp, Zea mays
  Clone ID: MRT4577_139326C.1
gaccgcacgcttactccaaattttaaaaaactacattcatctaatttacattccagatctacatccttatcatgtgtatgtgttatcataagatcattcaccctgttaaactacatcataaccttccccaatattaacccttaaatccttttcctattcacaaacaaataactgtatacctacataatt

SEQ ID NO: 43113 - DNA, 587 bp, Zea mays
  Clone ID: MRT4577_139327C.1
gtcttttttcattcgttgttgctcatcaaaaaccagggggtactaaaacattagcccttaataattcccccggaatccaatctaataccgtcaaaatgaaggccgccaccgttctcgctgttacctttgccgctctggcccaggctcatacccgcgctgatatcccctcttgcgctctgccctgcctcgacgctgccgtcacggccaacaccaagtgctctaccaccgactacgcctgtatctgcaaggacttcagcgctgtccagacctctgccacctcttgcgtcatcgagaagtgcggtgctgatgttgccctgaacaaggtcctccccgccactcaggctctctgcaaggcccagtctggctctggctcctctgctgctgccagctccagcgccgctgccaccagcgctgccgctaccttttgtcctgccagctctgcccctgccagcttccgccctgccagctcttgtcccgccatctttgttgcccagacctctgttgctgctaccacctctgccgctggcaccaccttcgtcaccagcagcacttctgctggcacctgtgctccccccgttggcaaccga

SEQ ID NO: 43114 - DNA, 390 bp, Zea mays
  Clone ID: MRT4577_139328C.1
aaagaggcaggggggacccaaataaatcccccctttggggcatacatagttttaaacaaaatactaataaagaaaaaaagactccgggccaggagggtttttttttttatactaaggaacccccccaggagcccattaccccagggggggggggggtacaaaaattccaaaacggggggtaagggggaaaaaatcacaaatgggccctgaccccgactttaaaaaaaaaaccccccaccggtctttaaacccccttttccaggggttttggaaaaaaccaaaccttaccagggtccctccccaccctttttgggtgggggttttcttcaaaagggccccaaagggggaggaacattgggggggaggtccctaataaacaggggggaaaac

SEQ ID NO: 43115 - DNA, 404 bp, Zea mays
  unsure (1)..(404): unsure at all n locations
  Clone ID: MRT4577_139329C.1
ttttttttttttttttttttgagagaaaaaaagatatatcattcagagtctgcaggttctggttataataaaaagaattgatccacaaaccacttgcctcataatagccatgattactgcaaggcgcacgaagtgcgcctnctgatctagtagagcaaagcgaggtcgcggtcggacgaactttattgcgcggactgttttgcggtcaggacggctgtcgcgatgcacacgacgttgtcacaccacgaccccaccacgacgaggaacagaggcgcgcacagggaagttggtgcgcagggaacgaccggctcaacgttgtcatggtgcggtttagggaggattctagagtacgcggcgaacagggagcgagctgcgtcagggaaaatcgtgacgtacaggggagg

SEQ ID NO: 43116 - DNA, 1932 bp, Zea mays
  Clone ID: MRT4577_13932C.1
ggggtaccctcggagctggccgggtgtgtttgtcatgggtggtagcgcggtttccactagttctgtattcgtgtcctctggtctctcgcaggccaaacaaaagcgctgccgccgccggcaatgttccgccgcctcctcccccaccgtcgctacatctccacctcgcccgcctccaactccaccccgaccctctactctgacggaaccatcccattctctatcctctcgtggggccgtggcgcttccggacagctcggcggtggcaaggaggagcgccgcctctacccatcccccgtcgcccacctacttctccccgaatcagacccacgccttgctcccacccccggacgccttccctctgcagaggatacgtctggagtggaggttgggatctcttgtgggctcttccactcctcgctcctcgtcgaaggaggcgcctgggtgtggggcaagggcgacggaggccgcctcggcctcggtgacgagtcttccgccttcgtgccccactctaaccccaatctccgcgatctccgcctccttgcgcttggcggcatccactccgccgcgctgaccacttccggtgacgtcttcacctggggttatggtggatttggagctctgggtcaccatgtataccatagggagcttttgccaaggcaagtgaatggcccttgggaagggaagataacacacatttctactagtggagcgcatactgcagcaatcactgactcaggtgaactttacacttggggtcgtgatgaaggtgatggtaggctggggcttgggagtggaggtggtccaggtgaagctggctccctcagcgttccttccaaggtgaatgcactgcctgttccagttgctgctgtagcttgtggtggcttcttcacaatggctcttacttcagatggacagttatggagttggggagcaaattcaaacttcgaactgggtagaggaagcaatttcagtgattggaggccacagcttgtccctagtctgaaaagcacccgtgtaatccaagtagcatgtggtggatatcattctttagctttgactgatgaaggcgaagttctctcttgggggcatggtgggcatggtcaacttgggcatcccacccttcaaaatcatagagtcccacttgccatcaaagctttatcagatgagcgaattgtccatatagcctgtggaggatcaacctctgctgctatatcagagaaaggtgacttgtacatgtggggaaatgcaagagactgccagctaggcatccctggtctgccagaagttcagccactcccagtcaaggtgattttcctcagagacgatgatgaagggttgggcccttctcgtgtcatctccgttgcaataggagcctcccatgccatgtgcttggtctccacgcaacaaaccgagaagtagggcagtctgggtttctgctttgtgaaggcacttatgtttcggtattcatacgtctgagtcagttcgaagcggaccctgttctcttttgatttgatccagctgttcctgttggtggaaactggaatccctgctcggttaagctgaacacatctggaagaaagaataaaaaaactgccacacgctgatagaaagcaggaaaggccccctgtggctggctccgggtaggcatagctgtagtagattcgaatccttgaatttcatctgtggaagttcttatgagtgtagacattgttcttgctttttctgtagcactgtaatacgagggacgaaactgcgagaagcgcggatgtaagacatgcgcccttgtgcgttctcaccaaagatttgtagattctgtctgtagttgagatggctagaattttgtagcgctaattttattgtgactctgtcaggaggcctggcctgattttagttgctgttcaataaaggcaaccgttggtgttttattctttc

SEQ ID NO: 43117 - DNA, 200 bp, Zea mays
  Clone ID: MRT4577_139330C.1
tttacataaacgaaagagggaagaaaccaatttttccgacgaatccctggaccctccccactttcaactctcatccgcttgccgttgccgcgcatgtttatcgagacaatttgatcaggccgccacacccaacccctattcttgatttaatcaggggttatgtgggaatgcaggccgggacacccccttcttcttatctt

SEQ ID NO: 43118 - DNA, 456 bp, Zea mays
  Clone ID: MRT4577_139331C.1
atttatatccccacgcgcacgaggcagcttattttatatatgtacattacgcaccggcacctgaaggcgtacaacttatgcctataaaggctggtaatatatgttgagatattaatggccgtagctgcattctttttcaaacggcattcaggtctgaattaacacaccgcataccacccgcaacattaatgcgtgattaacgaagagtgaattgatggacttaacgtacattaattgcatagttcttagtgccagctttcctcctcatgtactggttgcaccaattactttatggttttcgtccaccaccagttgatatttgttcagcaaatgctgcaccaatgtgagcaccattagtacgtatgataccattaactatggaacgatctttaccatgtggccctaacaaattaaaaataatatgtggactctttgtagatatagaactgctcaatc

SEQ ID NO: 43119 - DNA, 609 bp, Zea mays
  Clone ID: MRT4577_139332C.1
ttttttttttttttttttttttttttttttttttttttttttttttttttttttttttttttttttttttttttttttttttttaaggagcaacccatatttaaaaggggcccaaaatcagaagaaaatatcaaccaaaaaaaatcccccctcacaaacacaaaaaaaaagcaaagtcctttttacagggggggggggaaaacacccaaccgaccccgggaaagggaaaaaaaaccccccctgccccaaggaaaccaaacccccccaaaaggggaaaaaaacccaaaagccccaaaaaaatttcactacaaaaaaaactacgggaaagccccccaaaaaaaaaaacaaggcggggggggcggggggggggaaaaacctgttaggaaccctgcaggcacaagcccccatttttttaaggggggacggggggaaaaaagggtttgggcccggcccccccggccgggggggcccccgaaagggaaacggcccccaaaacgggggaaacggggagggcctttgaccccaccccggcctttgtttgtttcccttccacgggttggggtgggccggccccaaaaagtttcaaaaaggctggaacccttgctggcc

SEQ ID NO: 43120 - DNA, 502 bp, Zea mays
  Clone ID: MRT4577_139333C.1
ccgaagcctgggtgcagcaggatgaactatgggggacgcggagccggaagatggagcgcatacggaagcgaagaatgcaggtgctgctattcataagggtgatgcggggacatcacgattaccgtatagaacttcacaaacgcttgcagggatggaccttgatgaagagagcggccaaatgcacatcacatggagactggtgatgacatggtcatatggccatgttgactactgtggtacgaatggggaggaggtaccaagcacatttggagcagcgcacttcgaaatggggcgaggcctagccatgttaaaagcgttagctgacgctgcgacgaaggggacaccaccgagggactctactatataggctcagatgatgagagcccaccggactgaactagatgctcgtgaactcaagatgatgttgatgccgattaatccttgtgtacgatactatttataagcaatggactctggagcttacaggaatgtactgtcaatg

SEQ ID NO: 43121 - DNA, 2051 bp, Zea mays
  unsure (1)..(2051): unsure at all n locations
  Clone ID: MRT4577_139334C.1
tgctggacaaagctagtttggaaacggatacttgtccttttacagagcaaataaaatctggaactatttcactacaggaggcacacatgaagactgaggtatcctgtacactaaacagcagtgtcattcctgaaggccataaaagctcactaagcttgccagttccttctggccactcactttcttccaattttgcgacaaggtctttaagtactgcaggagaatctgtgaaaaacacatatgacttggtagtatttaaagggagtagagaatcttcgcgggctggagactgtatctcttcgcctggtgtgcatcataacataccgccaataatgattgatcaaggaagcaacatgaatcctagtatggagagctcaaacaattcacataggctgatggcatctaacactaatgcaactcagttttactcttacaaggaccaaatgcatgtaacaccagagactagggcctcagtgatgacagaaaaagatagcagtcaagcttctgctgcatcaagtcagccctttgcgggaactgttttaagagcacaaagtgtatctcaggaagcttcacctagcgtctttacttcaaagcctctcatagattcttcacttgtgaaaaatacatatgttggtttaagttcaggcggtgcccatattggacatccaaattttggtaaccagcaaccaagtgacgaatgccttaaaagaaaatctgaatctctatctggttcagaagcaaggggtcattcagctgcattggtgcaacctgctctaggaaatcataatgggagtggaggtgcacacaagggccttcggatggctaacgttgtacatcgattcaagagcttagttgaatctttggaaattggtgttgtgctatctgggaggttgtggtcctcaagccaagcaatcttcccaaaagggttcaggagcagagtaaaatacttcagcatcgtggatccaacacaaatggcatactacatatctgaaatattagacgccggaccacagggacctctgtttatggtgactctggaaaactgtccaggcgaactttttatcaacgtctctcctgccaagtgctggagcatggtccgtgagaggctgaatatggaaatacggaggcaactcagtacgggaagagctaatcttcctgcactacagccaccgggatcagttgatggttttgaaatgttcgggttgctgtcaccggcaatagttcaggcaatcgaggcacgggatagagatcgcatctgcacagagtactggagatccaggcctcatgttgtcactgaagatcgtgcgacggcgccacctcaggctcagggtcctctgcatgcgctgaggggtctattccagcgagccaaccgcaatgagctgctagccctacggagtctactggtgagcaacatcagcccggacgacttctccaggcggcaggctacccaaatcctcgacgaggagatcgccaagcagtggcgctgacaggcgtaaatacaactctgtaatctcttgatggcatgacgggaccaagcagttttcgaccctgacgagagagcggctccttccgttgccccccgtgcccattctttgtattgttgtgtccatgctccatgccataagatcttgtccccatttggatgcgatcgaatgaccgacgacggctcatcaactgaccagcgtacataccgtctgtctggaaactcttgtggtgttgtaggtttagttatttttcttttaaacgaaatatttaaccttcttttttagtgaggctgaaacgcaggctcatgagacctgagttttttacatgaaaggttgtgtacatcagaaatgtgcagggcctgttgacactactagcagataggcgtgatttttgtgccgagttggtcagagtcgaacagtccatgtgcttcaggtactcatcctgcatggttgactgggagttggtacttgcaagctgctgttacagaccagtagtccaatgaaaaaaaaaaaaaaaaaaaaaaaaaaaaaaaaaaaaaattccagggcgaccgctccccnattccg

SEQ ID NO: 43122 - DNA, 316 bp, Zea mays
  Clone ID: MRT4577_139335C.1
cctgcaccccctcgcccaaacctgcttcgtcgtccggagaacctagcatcgagagccgctgcctgaccttcttttctctccgccgccgccgctttggtgcccaccttgccgccacctccattccgtcgggccgccaccgttctcgtaggtggaaggaagctggcagccaccacggtggcacggtgaagggacgcacgggacaagcgcgttaggctctacatttgggggcacatcttacggtggttgcggtggcggctgtgctgcaggtccaagtcgaaggaaaccagtatgagaccatgtcgctcgttcagatcga

SEQ ID NO: 43123 - DNA, 491 bp, Zea mays
  Clone ID: MRT4577_139336C.1
agccttgggaatcctttaaaccggccggcccttacgctttttgtttttttaatttgtaccattttttttgaaaaatgatttttcttttttctttttttttttttgttttttttattttttttttttttgggggaaaaaacgttcctttaggaaaaacattaaaagaggtttttggcggggtttaaaaaagggacccccttttacaatgggttccgaccactaatgggaatatttaaacttttgacaaaaaaaaaagccctcttggttttggggaaggggcacaaacgaaatttagcgggggacaaacccatttatgggaacaaaagggggtggaaaacagggttttaccaaaaacttgaaatagtgaaaggtaaaaaggctggttaaaaaaaaaagaatttgtccataaaagaatgcaaatatcaacactctgttggggtttttttaccgtgattacatcagaaaaacgggggaatttggtttttacacaa

SEQ ID NO: 43124 - DNA, 278 bp, Zea mays
  Clone ID: MRT4577_139337C.1
ttttatctttttttttttttttttttttttttttggtttgtttttaattgggactgctaggcaaaaataaatcagggattttttttatagaaattacaaaaaaagacctgctttcttttgtcaaaatgaaacgaaaatctacagccgcagcagttgtaataggtattcagggggggtgggtggtctagggagaggagttgaaaggaaccccttgacattttgaggctgggcaaaaatggttattgatccttggccgaccaagaaagccagaggatttt

SEQ ID NO: 43125 - DNA, 477 bp, Zea mays
  Clone ID: MRT4577_139338C.1
ggtcgacggtatcgataagcttgtgtacaagaaaactttgtgtattttgtgattttgtgaattagggattaaagtgtcgaaatgtgaaaatgtgagggctagtttgcaatatgccttaattgtgcgtatatggattggtttgaatattatagatcaagaaaagtggaattcgcttcaaggttacccaaaagcgacttacctcccaccttcaatatatcaatagaatctcacacctaaataagtctttgattgatgcccacgagtgcttgaaaatctctctcaagcatcgagaaggagaaaacagacatttcccaataagagaaaaggttcagcaatatagaaaaggttcagccaaaaagagcaatgtggggaaaacttgtctacaatgaaatacagtaaaagggatcaaacgaatattcagcaaagaaagaggaagaagagactaacgtgaaaactaaatggcaaaactgaaagaac

SEQ ID NO: 43126 - DNA, 254 bp, Zea mays
  Clone ID: MRT4577_139339C.1
atgcacgcctaccgaagctcggaattcggctcgtggtgtaattcattttgccgccttttttgtcatacccgacccacagcgatacctaggggggatcttgtctactctaggggggggagaaaaaccatcgatgaagaagcggctagtggcggggcttctatacttaatgcggcgaccggcccagaggggccaggtgagaggggccgtcaccgtccgactcgtgcgtcttgccgcaagtttggcagaagcccatc

SEQ ID NO: 43127 - DNA, 289 bp, Zea mays
  unsure (1)..(289): unsure at all n locations
  Clone ID: MRT4577_13933C.1
tcttaatcatctaaaccctaacnncnnaaccgtggcggtcgctctgtcctccgggccggacattgctaaaaccaatcccatgtcggcggcgggcgagaagaagaatagcaaaggaaagaagaaaggcaagaatggcccggccaaggtggccatgaaggctcgtggcgcggcggctgatgagcggaacaacccgttcgaggccatctggtcgcgccgcaagttcgacgtgctctgcaagaagcgcaagggccaggagcggcgcgtatcgcgctcacgttccgaggccatt

SEQ ID NO: 43128 - DNA, 525 bp, Zea mays
  Clone ID: MRT4577_139340C.1
atgaggcacctctatgccaattttatgaagaagcatagggggcctatttttactcagcacccgtacccagctgcaaggtcctacatagaggacagattcaagtggcacctacaacagatagcacagagtagtccggaggctataacatggctcgtcaaaaatcattctaggatttggtatagaagtggattctctgaggattgcaagtgtgactatctaactaacaataactctgagagctttaacaaacaaattaaggcactgaggagtttgttgcctcatgagttagttgatggcctcggagagttgatcatggagaaaatggcctatagaagaaagcgtaaggttgacagtgaggatgaaacaagcaccaagaagcacaagactatgaagaaaaggactccaaagaagaagagaaggactctgaagacgaagaaaaaaactcccaagaaaaaggctttaactgaagcaagtgcaccacctaccaaagtgattaagaagctcacagactaccttaaggattga

SEQ ID NO: 43129 - DNA, 286 bp, Zea mays
  unsure (1)..(286): unsure at all n locations
  Clone ID: MRT4577_139341C.1
cccgggncgacccagcgnccgggnagagggcngcaagggcggggcgcgcagcggcgggncggngacgcgggcgcccggcggggaggngcggccggagaacnggcngnggnngnacaagcangagcacgccaggggcnngcngcncccggngcccaagaacngaangaaacnanngcngcngnagcnnnagcnagcggagggggggcgggcngcaccagcngnngnancncccagcncncgaagacncgnngcancacccagggccgggcgagnggccagnanccag

SEQ ID NO: 43130 - DNA, 506 bp, Zea mays
  Clone ID: MRT4577_139342C.1
tatcttttaactggattggcaacaacagtactccgtacaacactgtgaccaaggaatcgggctttagggatccctatgtccagtaccaccacctcgcctccgccgccggccgccggggaccatccccgcgttctgctccgaggtttcctctcccgtgagacatgcaaggagctggagttcgtgcaccggagctgcggcgcagcggggtaccgcccctcggtgatatcgacatctctgccgcacctggcggccaccggctgcggccacctcctgctcccgttcgtgcccgtccgcgagcgcctccgcgacgctgtggagtccttcttcgattgccacttcgatctcttcatcgagttcaccgggcttatcagttggtgcaagggagcttctattggatggcacagtgatgacaacaagccttatcttaggcaaagggcattcacagcagtttgcttacttgacaatcatggagaggactataaggtgggattttgcagttcaggatg

SEQ ID NO: 43131 - DNA, 1325 bp, Zea mays
  Clone ID: MRT4577_139343C.1
cattgggcacctcgaggccggccgggaaggggcattcagtgattcagccgccagtcccgctcgtctctgccaagtcccgcgcgctcgagcatcgatcagccgctggcgccgcgacgagcgacgacgccgcgccagtcgcgcgcagatggccgccgtctcgctcctgcgagccgcggcgctcgggctggttgtcctcgcgtcggcgctgccgtcggctcggccgtggagcaaggagggtcacgtgctcacatgccaaatcgcgcagggtctgctggagcctgacgccgcgcacgccgtgcggaacctgctcccggacgacgccggcggcgacctgtcggcgctgtgcgtgtggccggaccaggtgaggcactggtacaggtacatgtggacgggcccgctccacttcatcgacacccctgacgaggcctgcagcttcgactactcgagggactgccacggccccgacggcgccaaggacatgtgcgtcgccggcgccatcgccaacttcacgtcccagctgctgcactacaggcacggcagcgccgacaggagatacaacctgactgaagcccttctgttcctgtcgcacttcatgggagatgttcatcagccaatgcacgtggggttcaccagcgaccaaggcggcaactccatagagctgcggtggttccggcacaaatccaacctccaccacgtgtgggacagggagatcatacagacggctctcgccgacttctacggcaaggacatggacgccttccgcaagcagctcgagcacaacctcaccaagggtacctggtccgacgatgtatcggcttggacagactgccaagacctctcgtcttgcccaaccaagtacgcgaccgagagcataggcctggcgtgcaaatgggcgtacagcggcgtccgcgaaggggagacactgtccgacgactactttgactcgaggctgccgatcgtgtcgcggcggatcgcgcagggcggggtgcggctggccatgttcctcaaccggatcttcggcgcgcacaaccgcgacgtgccgccgccgtcttcttgattgatggatggacccgatcccgatctgcctgtcgcgtcacagactcgaagtctaatctaatccatgtggttgtagtgtctttgcttctttttaagtaaataagtaattcataattggcagcagctcgtgtcgtgcagtccaagccatgcatggatggccctgtaacctgactcctgttgcgttagtctctgtctgtataccgatatacagttatacacacaaatatacattccagatttctcattagaaaaaaaaaaaaaaagcggcc

SEQ ID NO: 43132 - DNA, 437 bp, Zea mays
  Clone ID: MRT4577_139344C.1
gccggcctactttctcgatctgacggcgaagtgcgacaagcctctgccgctggtgggggcgatgctaccggcgactgcgatgagcgccgatgctacggtcaacctgtataatgacggggagacagtaatggatccgcaatcggtcaaccgcgacgcgatggtgtagacgaactacaccgggctggatgggcgtgacgacaccaagaccaatactaatgccgcgcagaccttccatacgaccaagtttgccccgctcgggtatatccacaacgctaagggcaattaccagtgctcaccgcaccgtaagcatacccgtgatactacaactcgacgtcagcaagctgaacgaactgccgaaggtcggcattgtctacaactatgacaacgactccgatgccccgaccaaggtgctgatcgacgaaggctaaggacgcgcg

SEQ ID NO: 43133 - DNA, 189 bp, Zea mays
  Clone ID: MRT4577_139345C.1
ggacctttgggctgatttatgtgcttgtttatgtgcttgggtcatccttctgctagccgccgttagtaattttcatgcattacatcgcttgggctgattatacattactccggttcggatattcgggtcgttctgtcttgtccatgtgtctgtggatgtgttgagctgttggttgaattagctggttgc

SEQ ID NO: 43134 - DNA, 248 bp, Zea mays
  Clone ID: MRT4577_139346C.1
tcttatccgccggtgatcggatcggatgctcgcagtacacgatctctgctttcttctcggcgtcctcgcagtttcgcgttgagccaagatagccctagcttaaaccctccgcctccgccggcatgctgcgcctcctccaaaccctcctgccgctccgagcgctacgcctcaacgcctgtcccggtttcgccagtggtctccggctcctcgtctagggcctcgtcggccgcgtcctcggactctgagtc

SEQ ID NO: 43135 - DNA, 360 bp, Zea mays
  Clone ID: MRT4577_139348C.1
atcaggacagaaagaacaggaacttaaccaacacaagacacatcaagctggagccgctgcaggcatggggcaccgctcgcactgccaccgggccccaccaccattaccacccgactcacactttattgagcccacgtaacttcgagcccgaaccggacacgttcacgcgacagacactgctagctacgtaccgggctacggtcggcacacacacacacactcacagtgagaccccagttaccgttgtgtactgaacagcaaaatcccgtgtcatactgccatgtacccgcgcgagagactaccccatcacgcgcgcacgtcgatccccttgggcctgggccctggccccccccatttatt

SEQ ID NO: 43136 - DNA, 116 bp, Zea mays
  Clone ID: MRT4577_139349C.1
tcgggacctatcctatgtccgatactgtaagctcagattccgtcccacccatcccaaggcctcgcttactccaggccagcccccgtcctcctaagcttgttctatttatcctctga

SEQ ID NO: 43137 - DNA, 277 bp, Zea mays
  unsure (1)..(277): unsure at all n locations
  Clone ID: MRT4577_13934C.1
cgagagtcnggcctggagactcccctgggaggcaacagcggggtctgcagacgcccttctctagccggagctgggactgttcagtcactgggagaagggatgtgggtctgaagagcttggttgcagaaacttcggggtctacaaacgcaggcgggagctgagccaaaagagcttgtttgctaggaggtgggagatgcagccaggaggaacagctgggcaatgcgggaggcagaggccaggcctcctcaagttggcctctcagacccacttgcagcct

SEQ ID NO: 43138 - DNA, 2634 bp, Zea mays
  Clone ID: MRT4577_139350C.1
cctcgaggccgcacccaccccactccccctctccgtggtttgtccgctcgcatccttccctcccttccgccctttcctcccacttgctcgccgaacccagagccccgcccacctcttttcggttttttctcgccggcggttgtgccaggatcgggctttgggctccgtgcatcgacgcgccgccgcctcctgatcgcaaagggtgtttcccccaggctttcgtgctccggaagtggcgagattcgccgagaaaggtcagatccggtggcctggttcgagcaacagtgtgttggcgtatcgatctgcattggatcgtcgggcgattcgtgtgacggagacgacgtcctctgtggtggctccggtttgctcctcagctctagatctggaaggactgggtgatctgctgcctcaagcagcttgaggtgcattggaaagtgaccatctttcccagacatcggcacaacgtaactggacatggaggctcttgtggttttcccggagcagcacagccaccaccatcaccgccaccctggtacccgcagcaagtcatcgggtccatacttttcatcaccgcctaactctcgtggcttccgtggaatgaactgccggtctttccactctggtcgttgcgtcggtgctattccattcccagcacctcctgctcgcacctactcatccccagagcccaagacacccaagcagcaaccacgccatggtggcaagcgaagccggccaatttccataagcctctccacatcccctccctcccattctgagctctgggcaggtccagcattctccaactctccaccacctagttcgcttcccatccccaaattctcgctccgccagaagcgcagcatctctctcgagctgccaccggttgaacgccctgatgatgtggtggtcaggctgcattctaaatcagcaccttcatccccagttgagggatatgggtatgacttcttcaatgacgatgcaatcgctagtgcgatagcaacggagaatctgaggaggattctccagctggatatcgcagatcattgaataatgggaggatggaagggtggttcctgtgtacataggttatctttcactgacagctttctacttgcattggtagtgtatagggtaatgatgatagatacttggtggttgtaagatatggtcaggatcatgggagaggtgtaggttgtaggtgaagcatcttcagaagcttagacggttgaaggtgatagtgccctgttaggtgttattaaggtggggtctgggtcgaggatggggttgcacggcagttggtagtattcacctatatgcttccttcatctcttaggtgtaggatttaaacctttttaaaaacagcatcatttgcatccacagtacctgttctgagctggcggtgggcactctgccatagcagtaacatacgtcctaaccccaaaccagatgtcaaatatttgtagggtaccatgcatcttacatacccttgcatacttatttccttctgtcctctagccaactggctctaactatcctcgcttcctggtgctctgcaaagaacaccattatctcctcagcagctcttctgttttttttggtaaggaagaagctgcgtggaagatggaagaaattctgctctatccgtcttgttcgaaactaactttcctatcccgcccctttgttgcatatctggcatataccatagtccatatccgtcgcatatctccaggcttttatgttcatctagcgctcctgcattgcatctagtgcccttagtcagttagcatgctcattcgttcccacttcaagttcatgaaccagtttgagggttctgattttcttaaaacgtcgaaagagagtctggattctggatcccttcgtgcaggcaaaccctgatgaggttgctctgtagtgacataacgcccaagctagctcgtgccggtgttacacgcttctgtagccctgcgcagttttagcactagcagtgaagcagcagtactgctggatctagattagtagtcatcggaaatgccgaggtttggtcagttatcttgtgctctggtgttaaatcagcagttgcattgtgtcgttgtttgtccgctcctatgttgatgttagagctactatgttgatgttgcacctgctgagcctgtcatggctgtcactccttgaggattattttggttattagttcgtcggcggagttgcggagtttcgtctctgcgtttgatgaaagtggtaatccgaactgtcaggacaaatttaatattttaaaataaatatgtataaaatttgatgttgatcttaaaaaaaaaaaaaaaaaggcccctagggccggtctgatactactcttaatcatgcataaagctcgggatggtggcattgtgggattcactataagatgctccaatacccgcatatattctactggtgctcgatgtgttcgtgcagatgtaacattcaactcatcaagcgtttcagaagtacttccctcatggaacatgctatcatgaggctgatatgaagactgcaagaagcaacgctatgtctgataactagcctccaggctttttggccacttcttcagacacttattgtatatcaaactgctgccaatctattataccgtgagtc

SEQ ID NO: 43139 - DNA, 909 bp, Zea mays
  unsure (1)..(909): unsure at all n locations
  Clone ID: MRT4577_139351C.1
actcaccccactccccctctccgtggtttgtccgctcgcatccttccctcccttccgccctttcctcccacttgctcgccgaacccagagccccgcccacctcttttcggttttttctcgccggcggttgtgccaggatcgggctttgggctccgtgcatcgacgcgccgccgcctcctgatcgcaaagggtgtttcccccaggctttcgtgctccggaagtggcgagattcgccgagaaaggtcagatccggtggcctggttcgagcaacaggttcgtcgggtttgaggcgtgtggtcgatggttgtttcggttatgcttgtgggattctttatcagaggtttccttgcgtgcagtgtgttggcgtatcgatctgcattggatcgtcgggcgattcgtgtgacggagacgacgtcctctgtggtggctccggtttgctcctcagctctagatctggaaggactgggtgatctgctgcctcaagcagcttgaggtgcattggaaagtgaccatctttcccagacatcggcacaacgtaactggacatggaggctcttgtggttttcccggagcagcacagccaccaccaccaccgccaccctggtacccgcagcaagtcatcgggtccatacttctcatcaccgcctaactctcgtggcttccgtggaatgaactgccggtctttccactctggtcgttgcgtcggtgctattctattcccagcacctcctgctcgcacctactcatccccagagcccaagacacccaagcagcaaccacgccatggtggcaagcgaagccggccaatttccataagcctctccacatcccctccctcccattctgagctctgggcaggtccagcattctccaactctccaccacctagntcgcttcccatccccaaat

SEQ ID NO: 43140 - DNA, 926 bp, Zea mays
  unsure (1)..(926): unsure at all n locations
  Clone ID: MRT4577_139352C.1
ggtaagaagaaactgcgtgaaagatgaaaaaattctgctctctcngtcttgttcgaaactaactttcctatcccgcccctttgttgcatatctggcatataccatagtccatatccgtcgcatatctccaggcttttatgttcatctagcgctcctgcattgcatctagtgcccttagtcagttagcatgctcattcgttcccacttcaagttcacgaaccagtttgagggttctgattttcttaaaagcgtcgaaagagagtctggattctggatcccttcgtgcaggcaaaccctgatgaggttgctctgtagtgacataacgcttaagctagctcgtgccggtgttacacgcttctgtagccctgcgcagttttagcactagcagtgaagcagcagtactgctggatctagattagtagtcatcggaaatgccgaggtttggtcagttatcttgtgctctggtgttaaatcagcagatgacattgtgtcgttgttacttcagtaacgtgatataacggtcctatgtcgtgaaactagctcatggtgttagaactagaaaccatgttgctcagagctactgtgttgatgttgcacctgctgagcctgtcatggctgtcactccttgaggattattttggttattagttcgtcggcggagttgcggagtttcgtctctgcgtttcagataagacccttgatgagtagctagagattgcagtagtcactactgcgttgacgcgtttgctcagctcagctcgtgtgtgctaaaacccgttcgatcgctgcagtcagactcagctcgtgtgtcactctattggcgtgtcatgtaagaggtcgtttggtttgagtgaggaatgaagtgattcatctttttgtcactcctcacttttttatttggtttatggaatagaatggattgatcc

SEQ ID NO: 43141 - DNA, 343 bp, Zea mays
  Clone ID: MRT4577_139353C.1
atgaaacacggttcttcgtttctttttttccctaattaggctttttttttgggtcaaaaacaacattaagaccacgtttttttttttttttaacttttcacacagggcccacaaacagacaaacttaaaccttttttttgcaacattttttccacaagaattcctttccctttttttgccagtttattaatttttgtgttacccccatttcattgcctttttttttgcaacaacttggtggcccccccaaaaaaatcttttttcgggccttatttaacaccgggggggagcctggcttttaagtcctttcttaagattttgccccacgggttcttggggattg

SEQ ID NO: 43142 - DNA, 285 bp, Zea mays
  Clone ID: MRT4577_139354C.1
ggaatacaaaagaacacatcttctggccctattattttatttaccaaaaaatcactgttttctttggtgctcttggatggagaattaatcattccagtacaattcatgagtagaaaggaaatgagttgcatatttataaaatagattcacttttcatccacatggactgctttatttttattgctattattttaatgctatggctattattgtaatcctaatgttcgagattccttgatatttgaccatagcactgtttgttctttatacaggaaagggagcatg

SEQ ID NO: 43143 - DNA, 341 bp, Zea mays
  Clone ID: MRT4577_139355C.1
ggaaaggtggttcccctggcgggtccgggcccggatttccggggtggaccaacccttccgatttttaatggaaggcggccgttctttttaaacaaacctaccttacgcacgcatgcatccaaataaatattttttggtgtgagctaactaaatttaattgactggcggtttacaaccaacggactggctaaacaatgcctgtacccacctaaattaattggctggaaatacatctttcttcagctggctgaataaataacaggaaggcacggaccgaccttcctaacaaatagttagcctgaatgaataatgaatggcaccctctatggacccattaatta

SEQ ID NO: 43144 - DNA, 457 bp, Zea mays
  Clone ID: MRT4577_139356C.1
atactcactttttttttttttaactcgggcagcgccccgccgtgggtaataaacaccaaggaagctaaccccacgccaaggaaaagccagcccgccccacttaaaacgggggcaaggaaccccctgcccccccgagttcaagaaaggcatacccttaccccatgggacccaagttaggcccccaatcatcaaaacaaaagaaccccgcggcggttagcatgcaaaaaaacgagggcttaaccaaagagaacttttttggcctgccaccccaggcagggatgacccctaggggggggaacccaggcgcggagagccggatttacacccgggcccaaaaatgcttggagaacgggaacccgggccacccaaagggtggggcagccgaacccgggcaaaattttttcttcacaaccccgaataacaccggcaggagggattccgcgcaccgggagttcta

SEQ ID NO: 43145 - DNA, 195 bp, Zea mays
  unsure (1)..(195): unsure at all n locations
  Clone ID: MRT4577_139357C.1
actcgacccccccgcccgctttccaagtgagattcaaaggtgggacgacgggggggncaacaccttgccggttgcattcctggccgccaccctgacataacaaaatcccccctcttcagatgttgttgacgtcgttcccagtcctccttatgcgttcctcccggtgatcaagatccatctgcgccaagatttcca

SEQ ID NO: 43146 - DNA, 454 bp, Zea mays
  Clone ID: MRT4577_139358C.1
caccccgtcacgcagagaaatctcctaaatcacgagcacattttttgcagcatgaatatgctttcttccccttttaaaacttaaagctttaattcacatggctcatcagctaatagcccaaaaccctttgacacaaagaagatggagaccatctgtatgatcgtatacatgccacctctagttaccagcgcccgttaccttggctggctcctcaaggatactacgtttaccccattccaaaaactggggtaatccagaacctgggggtgcttgccatttgcgttcactcccaacaccaatcacctatggtctgaaagacacatcaagccaaggctttaaagctctaaacttagacatgccattaagagaacttttcaatgatggaaaccgacttacactcaaccaattgaccgcatttaaatcacacccccccgaaaatccaaggtaatactct

SEQ ID NO: 43147 - DNA, 273 bp, Zea mays
  unsure (1)..(273): unsure at all n locations
  Clone ID: MRT4577_139359C.1
gagaaccaagaagagcaggcancgagggcaaggcnccacaaggaggacaaggaggnacagcgagagaagccagcngacccnngaanccaagcaacaggngagggacccnaacacagccaagnggacggcncngancaagggcccngcngaaacaccnnangaaggggggggggggcaacnngcanncgcaannccagagcaggagccccggcggcccccncaagggcgaggggggaccacaaacggccacccaaaggggcaggggcaagacag

SEQ ID NO: 43148 - DNA, 361 bp, Zea mays
  unsure (1)..(361): unsure at all n locations
  Clone ID: MRT4577_13935C.1
agagggaaagcagggcggccggcaggnaccgggccggaaggcccggggcgacccgcgcggccggaaggatttttgtgagttccaaaggaagcaacaaggcggcagaataggccgcatctaggtagataatcttggcatctcctagcttcctgagttgtctctgcagcttcttctgatgaattgaatcatcaatgggtacggggagagccagagggcggaagcagctcaccaatggcaggacccacgaggacaaggggagcagcggcgaggaggttgccgtgcctgcaaggaagaggaggggacggccccagaagcgtgtcgccgctgagaagatcattgaagcagagatgaagaacctgga

SEQ ID NO: 43149 - DNA, 685 bp, Zea mays
  unsure (1)..(685): unsure at all n locations
  Clone ID: MRT4577_139360C.1
ctattgcttcaacaaggcaatgaaaacaccacttctgaggacagcaggaggtggcagaaggagtgaaggagaagggaacagcagaagaaacgagcatgacaagtgctactcccaggctttggtagaactccacaactctttcttcccctcttcctttccctgggaattcctgggctggaattcccgggggaaatgcccccccgcataaaaccccccgggtttttttccctaaaggggtcctttctccacccccctggggaaaaccccggggggggaaaatttgggggggccccccccccccttttatttgggaaggggggggggttaaaaaaccccggggggggtccaaaantttaaaaaaccccgggggtaaaaacttgggggggaatcttccccccgaaaaaatttttttttccccccgggggttcttcttttttttttttttaaaaaaaaaaaaggtttttaaaaacaaccccccccccgggggggggggggggatcccccccccccccccgcgcggggggggggggggggaaaaaaaaaaaaaaatnnggccccccccccccccctcggggggggggggggcccctcttttttttttttttttcaaaaaagggggggggaaaaaaaaattttttttcccccccccccccccccccaaaccaaaaaaaaaaaaacgcggggg

SEQ ID NO: 43150 - DNA, 504 bp, Zea mays
  unsure (1)..(504): unsure at all n locations
  Clone ID: MRT4577_139361C.1
tctgtgctccaacagatgattgctgcaactgtggcgcatcaatgacatctggatcatgatgtacaagaaacgcgtctccctctgctcgctcgctgctctcgacgacttcctccagaataaagactggacacctatcaccttctctttgatgaagcaagtctcccagctatggctgcgagcgatagctgatatagcaaacttgccacctcccgtctcatgtatcacctgccaccaacctactcctcgtagagatacatcaacattccaaccctggatcactcgttccgcatgcccgttgatctctcgcatcaagcacgggggacctgcagcgagtagaagtgctctgttcaagatgttgcagcacgttgctgtagcctcgtgggctgcaccgacatatccctgtacaaggacactgccgctgctcatcacagcgatgatctgcatgtctagtcccctcagnggacgctgtcctcctccagcggcagacccagcctcaactggact

SEQ ID NO: 43151 - DNA, 392 bp, Zea mays
  Clone ID: MRT4577_139362C.1
cttgccttctttttttaaaaatcaacactgacccatgggactccgctgtattttaccacgaacagagacggcctctctttcttatggctatcaccggagcgaacatttaacgggggagataataatagacatcaaatccacccggcataacaacctactcctgcgcaacgcgagcgagacgcgacaaggatctggctctgctcaccgacggaggaggacactatggcggagccacacccgaaggacttgaaacgcgcatcgacaatcctgccgaacccctccgagacgcggatcagcagctccatgacatccccgaacagccggagcgccgactatccccagcaccacctgcgggtagaccttggccaaggaccccacataacgcggataag

SEQ ID NO: 43152 - DNA, 525 bp, Zea mays
  Clone ID: MRT4577_139363C.1
atgtccgagagaatgctctcgatgtttcagactattcaggaccgacatgatactctgcagcagcaacttctccaagaccgggctgagaacagggcattcatgactctcatgcttcagcacaccgatgttccgattcccccagttcagtctgcaccgcctccacctcttcaggctgctgttgtgccagccattcaggcaggaccccctcttcctacagttggtccttcttcctctccgctccggccggtcaccctggttttctcgtcgccggtcatcagctccgtcagtactcagccgccagtgccaccagctcctgctattaccactgctgttgtggtggtgtctgtgacttcttcagctccggcagctcctgtagcgcagcctccgtctgagtcggtaccagctccagcttctacggcagatcctggatccgagactgactttgacccccagctggtgttcgctctgctgcctcgaccgcgaccagatgcgcccccgccacctccttcctcttctggtgtgtag

SEQ ID NO: 43153 - DNA, 362 bp, Zea mays
  Clone ID: MRT4577_139364C.1
gggacactatgaacactttgattgatgaaccatttctttcttggttgcgggggcccttgcaacaaatacagaggggaacccttcccttgcaggggaacccctttttttagcaaaaatacagaattttaccttcccaactacaaaaaaaacctaacttactacagggacacatgcccatactggcccgatccaggaaaaacctcccgacgcaaaaaaaacgattttgttctgggcaccacccgaaagctcccccctggcggcgacaaacttctttttcagcaacaccacacggatgttgggcattacaccccccctagcttttgtgagcgcgcccagttagggggagaggtctttaccccccc

SEQ ID NO: 43154 - DNA, 871 bp, Zea mays
  Clone ID: MRT4577_139365C.1
cattgggcccctcgaggccggccgggatctcagctcgatcttcaagaaagaagaagcaaatagagcacacagtcgagtgtaaaccatccaaccaatcatggcttcgagttccaggagcaccgtgttttcacttcttctcctggtggcgctgctgctcagctgcagcggcatgagcagcgcggcgcggttgctggaagaggcgccgcccaaggaggagcacccacatcctgccgtgccggagctgccagaacctgagctgccgccgcaccctaccgacgtcgtgccgcctgagctgcccaaacccgagttgccaccgcacccggccgttgtccccgagctgccgaagcctgaggtgcctcatccggtgccggagcagccgaagcccgagctgacaccgcacccggcggccgtgccagagctcccgaaaccggaggtgccgcacccgacagccgtccctgagctcccgaaaccagaggtgccgcacccagtgccggagctgcccaagcccgaggtgccaccgcacccgacagccgtccctgagctcccgaaacctgaggtgccgcacccagtgccggagctgcccaagcccgagctgacaccgcacccggcggccgtgcccgagctgccgaagcctgaggtgccgcacccagtgccggagctgcccaagcccgaggtgccaccgcacccgacagccgtcccggagctcccgaaacctgaggtgccgcacccagtgccggagctgcccaagcccgaactgcctcctcacccggtcgtcccagagcttccaaagcctgaggtgcctcacccagtcgcgctagagctgccaaagcctgaactccctcctcacccgaccgtgccaaagctgccgcaa

SEQ ID NO: 43155 - DNA, 620 bp, Zea mays
  Clone ID: MRT4577_139366C.1
gtttgaagaagcaaatagagcacacagtcgagggtaaaccatccaaccaatcatggcttcgagttccaggagcaccgtgttttcacttcttctcctggtggcgctgctgctcagctgcagcggcatcagcagcgcggcgcggttgctggaagaggcgccgcccaaggaggagcacccacatcctgccgtgccggagctgccaaaacctgagctgccgccgcaccctaccgacgtcgtgccgcctgagctgcccaaacccgagttgccaccgcacccggccgttgtccccgagctgccgaagcctgaggtgcctcatccggtgccggagcagccgaagcccgagctgacaccgcacccggcgaccgtgccagagctcccgaaaccggaggtgccgcacccgacagccgtccctgagctcccgaaacctgaggtgccgcattcagtgccggagctgcccaagcccgagctaacaccgcacccgcggccgtgcccgagctgccgaagcctgaggtgccgcacccagtgccggagctggccagcccgaggtgccaccgcacccgacagcccgtcccgagcttccgaaccttgaggtgccgacccagtgccggagcttgccaagc

SEQ ID NO: 43156 - DNA, 365 bp, Zea mays
  Clone ID: MRT4577_139367C.1
aaggcgttaataacaatttttacccctaacaacccctccaattcaaagacagcaaaaacataaaaaaacctgaaaaaagcaaacgcaggggggacatatttttgtaaaaaaaaactgaacatatatagggcccaacatgggtaactggggtaacaccaaaacaccataaaacccccccaaaaagggaaaaaagtcggacccggggccccctccaagccataggaaaaaaccagggacgcttgaaccttgaccccccggacggggggggggaacccgaaattccctaccggtacctggaggcggaccagggggcccaaccgggaatcccagaacagctcggcgaaaccatccacattcccctatac

SEQ ID NO: 43157 - DNA, 538 bp, Zea mays
  Clone ID: MRT4577_139368C.1
aagcttggtccgatgcataaaagatgagacctgcgcttgaacgtttgtatggactcatctttgctggcgcaactgagcctgtgtgaatcatagcatttttgaacgccatgtggatgatacaatgcagatcagagtcaaacgtgggaacagagcgtaaacctataccatctgtgacagccggtggtggatctgcacggacgtggatttagactactgttcgatcatggaggattgatactgaccgaaggaacagagcccataggattactctctactactgtttgcaagcgaatgacacgcgtctagaatgaatgtcataggctgcagaagcgatcgtattactgtgactaatgagactaaaacactgcattagatgatttgtctattgctgaggacgcgtgagaggacaacccaacgaggaacttgcaaggaatctgaagaacaagcgtctcgctgcatattcacacgttaagagccctagtaaactagatatgctctgatctctgtggtgaggcttactgcaaaggtccaaatacta

SEQ ID NO: 43158 - DNA, 1192 bp, Zea mays
  Clone ID: MRT4577_139369C.1
gccgggccggccgggccgggcgatctcagctcgatcttcaagaaagaagaagcaaatagagcacacagtcgagtgtaaaccatccaaccaatcatggcttcgagttccaggagcaccgtgttttcacttcttctcctggtggcgctgctgctcagctgcagcggcatgagcagcgcggcgcggttgctggaagaggcgccgcccaaggaggagcacccacatcctgccgtgccggagctgccagaacctgagctgccgccgcaccctaccgacgtcgtgccgcctgagctgcccaaacccgagttaccaccgcacccggccgttgtccccgagctgccgaagcctgaggtgcctcatcaggtgccggagcagccgaagcccgagctgccaccgcacccgacagccgtccctgagctcccgaaacctgaggtgccgcacccagtgccggagctgcccaagcccgaggtgccaccgcacccgacagccgtccctgagctcccgaaacctgaggtgccgcatccagtgccggagctgcccaagcccgagctgacaccgcacccggcggccgtgcccgagctgccgaagtctgaggtgccgcacccagtgccggagctgcccaagcccgaggtgccaccgcagccgacagccgtcccggagctcccgaaacctgaggtgccgcacccagtgccggagctgcccaagcccgaactgcctcctcacccggccgtcccagagcttccaaagcctgaggtgcctcaccaagtcgcgccagagctgccaaagcctgaactccctcctcacccgaccgtgccaaagctgccgcacccagaggttccggaggtgccaaaccacgagctgccgcctctaccgaaagctgagctgccaccgaagccggagggccactacccggagccggaggcgaaaccatgagcggacgtacagtccgagactcggttatctgcacattttccctcatgcacacgtacgtgtctgttgtatagtagctatatatgatttgtgatgttgtgttcttccgtacgagtcatagagcttacatgtgatataagctagtagtacctatcaatttggatccatatgttatatgtatatctgaatgaataaagaattctagtgttaaaaaaaaaaaaaaaaaaaaaaaaggcccctagtggacggatatagagggccaaga

SEQ ID NO: 43159 - DNA, 371 bp, Zea mays
  Clone ID: MRT4577_13936C.1
gaaacacaccaagcgaaacgcacttttcacaacctaacaacaatggctaccaaggtgttattcctgcttgcgctgcttgcccttttagtgagcgcatcatatgccttcattatttcacagtgctcacttgcttctagtgccattattccacagttccttccatcagttacttcaatgggcttcgaacatccagtcgtgcaagcctacaggctacaactagcgcttgccgccagcgtattacaacaaccaattgcccaattgcaacaacaatacttggcacatctaaacctacaaaccatcgtaacgcaacagtaacaacagtttctgacatcactgagccacctagtcgtggtgaaccctgtcagctactt

SEQ ID NO: 43160 - DNA, 305 bp, Zea mays
  unsure (1)..(305): unsure at all n locations
  Clone ID: MRT4577_139370C.1
aaaaaaacgaatataaagaaaccataaccccaaagggaggcggtttttttcagggccgaatataaaaggtggggggggggggaaacactcagcaacccacttggaggggggggttccaaaacaaggggagcgcaaggagaggcaacccnaaacttgggggccctggggggagggccctgngggggngggggagcatcacccttnagggggcccggggaagccccgggagggggcctgcccccggggaggaggggcggtttagccttctccaaggtttccaccttgccagcccaggccctgggggg

SEQ ID NO: 43161 - DNA, 129 bp, Zea mays
  Clone ID: MRT4577_139371C.1
aaccgtattaccaaagggtttgatagatcaaaactgcaaatctttcatccgtttccgttcatactcccaaaggggaaagaaaaataacataccggacgagaccaatctagtagtgaagatgccaaacca

SEQ ID NO: 43162 - DNA, 653 bp, Zea mays
  Clone ID: MRT4577_139372C.1
caggctggcaaaaggaggatcttatggttcaagacaatactggcttgactccagcccaacttgctgctgataagaatcatcgacaagttgcattttttctagggaatgctagaagtatacatgaaaggggatgcgtcgggaacagttattttgtgaaactatcaaaaatcgggcttgctcctcttctttggtgtatcattatagccttaatggttgtatatatacattcaattatcttagaagactataacacaaagatgaccgtaatttttgggttatttgcatggttgggagttttccttgcaagtgtcggactggttatgttttatagatgcagcaggaaagatcctggttacatcaacaagaatataagagattcacaaaatcaaagagacgatgaacctttgttgaagatgggtttggacagtcctgaacttcttgatggtaattggtctcgcctatgtataacatgcaaaattgtcaggcctgtacgctcaaaacattgctctacatgcgaccgctgtgttgagcaattcgatcatcactgcccttgggtatcaaattgcattggaaagcggaacaaatgggacttctttatgttccttatcctagaagtttctgcaatgattattactggtgtaatggccatcata

SEQ ID NO: 43163 - DNA, 1124 bp, Zea mays
  unsure (1)..(1124): unsure at all n locations
  Clone ID: MRT4577_139373C.1
gtctccgtgtccgtctgtcattagcatatccttcagagacacccgcagcaaagcaaagcacagaaaagcagcggcattcgcagctgcagcgccatcccttgccttctccacaagcatcaccggacaccggccagccaagccttcccctttgatctccacgcgcggccttcgtccatcctctccgccggtcgaggtcggggcgcgatgggcggcagcggcgtcctcggcgtccaagaagaagaggccggcacaccgccagccatggttgtgccaccggtggtcgtcaaggggcagcgcagcaagaaggacaggacgcgggcgccgccgccgttcccatcgcgatcgccatcgccgtggccgcgagcagcagcggcagcggcagcgccaagcaacatcacccgcgggtccacgagtgctccatctgcggcgccgagttcgggtccgggcaggcgcttggcggccacatgcggcggcaccggccgctggtgccggcggcggcggcctctcgggacgacctgcacgcgccgaggaaggagaagagcctcctggagctggacctgaacttgccagctccctgcaacgaggccgatgctccggagctgacgtccccacgcttcgctttcgccgtcgccgagcagcctccggcgccgctgcccttcccgccggccacgccgtccgcgctggttgactgccattactagtaaatacaacacaccaatcagcccccctcttctctgcttggatcatcatcatacataattacgactgcatacatacatatacagtgacacacacacacatacactacacgccacttcgttccttgctttctagatattcttcttcttctttcttcttctgttctttgtattcttagatcgatcggtctattttgattacattattttgttcatgttcatcaaaagattggggatttggaacgggagatgtgaattatcgggtacagaaacagagacgcgtgtgagattttattanaagttctattgattcattcgntgatttagaatccgccttcctggtttttttcccttctttgacttaaatatgtttttcgttgaattaactagggtttgcttccgactgtcgaaattgcgggtattggg

SEQ ID NO: 43164 - DNA, 402 bp, Zea mays
  Clone ID: MRT4577_139374C.1
aaaggtcaagcggccagggaaacccaaacccccccagcaacccgggggggcccgcccaattccaacattaataaacacaaacaaacagggggaccaggaccccccgtttttatctggtaccgggggtaaacacaaacaacttttaaaatctaagggccaaattacagggaacccaaaatgggactagggggcatcgaccgaaccctttaaaaacttgacccaaaggctagttagcttgaccccatcatttgggcccccccccgcagggccgggtttgcgaaaaaccttacggcgacggcggggcccccgctgagcccaacgaggcacgggttcacgggcttctccaccacaaatggggcgaggatcggaacaagggactggagtactttccggacccggggg

SEQ ID NO: 43165 - DNA, 201 bp, Zea mays
  Clone ID: MRT4577_139375C.1
gcagcaccatcgtgtctgacggcgccgtgcatcctctgatgatgtatattaattacacgatgacatcttagtttcggaggtctggggcggtggcggcttccttttcggtttcttgggttggcggtggccggtggtcgtgcatggggatgttgatactagggcaaaacgtgttgcgttcttatgcataaacttggaacaaaa

SEQ ID NO: 43166 - DNA, 2148 bp, Zea mays
  Clone ID: MRT4577_139376C.1
cattgggtacctcgaggccggccgggcgtcatcgtcagaatttccttttttttttccttccccaacttctccctgcgtcggccgatgctgcggcgactgaccacagctttcgaccctctccagtggagggaacggggttagcgagcggcctccgctgcgacggcaacgggcgtgggagggccatggcggcccccgcgctcgccttccccatgttgctggctgcctcactgctctccgtcgccgctcctgcgctggctcgaagcccatcttgccctgatggttggcaaggcggccctgttcagaacagatgcttcatgtacatatcagcctccctttcttgggatagatccgaggctgtctgccataactacagcgggcatcttgctgcagtatcatcagtccaggagctaaacttcgtgaagtctctctgtggatcatcatccacaggatgctgggttggagggcatcactacagcactagtaccggtaacggttggaaatggtctgatgattcctctgtttggaatgagactgtcttccttggtgagccattgcctgccaactgcagtgatcctgcatgtaaagtagccaccagcaacgatttgtgtactttggtcaccaatggtcagccttcaactattactgaaaaaaggtgcagtgagtcccatggtctgatctgcaggatgaaccacgtggacagatgctaccatgatcattgtcacaaggagtatttcatatccattattgctgtgagtggtttcatcctggcaaccactctagccgttgtggtttggctgcttgtctacaggcgaagcaagaaaagaagaagatcgcgagaagtgttaagtgcctcagctgctgcattggtagcaccgcaatggaaagtattcaccagtgaagaacttaggtcgatcacaaagaacttcagcgagggtaaccggcttcccggcaatgcaaagacaggcggaacctatagtggaatcttaccggatggatccaaggtagcaatcaagagacttaagaggtcgagtctgcaaaggaaaaaggacttctactctgagatccggagagttgcaaagctatatcaccctaatttggttgctgtaaaaggatgttgctatgatcatggtgaccggtttattgtctatgagtttgtagcgaatggtcctttggatgtgtggctgcatcatattcccagaggagggcggagccttgattgggcaatgagaatgagagctgccacaactcttgctcagggaattgcgttcttgcacgacaaggtaaagccgcaggtggtgcaccgtgacatccgtgcaagcaacgtcctactcgacgaggatttcgggtcgcatctgatgggggtggggctttcgaagttcgtgccgtgggaggtgatgcacgagagaaccgtcaaggccgcgtcctacggctacctcgcccccgagttcatatacaggaacgagctgacgacgaagagcgacgtgtacagcttcggcgtgctcctcctggaaatcatcagcgggcgccgccccgcgcagtcggtcgagtccgtcgggtggcagaccatcttcgaatgggccactccgctggtgcagtcccaccgctacctggatctgctggacccgctcatccaggagtcgccggacgcgggggtcgtccagaaggtcgtcgaccttgtctactcctgcacccagcacgtcccttcggtgcgcccgaggatgtcgcacgtcgtgcatcagctgcagcagcttgagctcaagtctgcagcgtccgagcagcagctaaggagcgggacgagcaccagcgcgacgtctccaatgctgccgttggaggtccggactcctcgctgaaatgtgctgccagaaattgatagcctttttaagtactctctagctctgtaggtggtaccacattccttgtgggccaccgttatcttgatcagttgtagacttgtcatctgtaacctctaatctgctacatatgtcgtgggttttcaatgtgtgacctaaagaagctttaggcttatgctctcaagtctgaagaaacaactcatctgtatttcatagagtaataacagtagcttgtaatactatttcctatcaacacaactagcagttcgatttctatcatatttacatttggcggccc

SEQ ID NO: 43167 - DNA, 413 bp, Zea mays
  Clone ID: MRT4577_139377C.1
tgacccttaccaatgcaatcctgacgtgctttacttacccgcctaattttctttttattcccggctaaaaccattttcttttcacaaaagattacgtgccaacttccaagaggagagctcggaaaaggaaaagaaacgaaagaaaggaaaatcgaggtagaagaaggctatgtgatgtgaggggaaattacgtgagatataagccaaatccattgaattctatcgttagctggctgcttgagctgagttctttgattggcctccggggagcggtgactcttgagctccgccgcttaacctgccagtgtgcgagctctgcgtcttgctatccctgactattttcctgccttctgtctccatcttcctagtgctatactaatttctgaagacctcttggaggaattctctgcttc

SEQ ID NO: 43168 - DNA, 336 bp, Zea mays
  Clone ID: MRT4577_139378C.1
gggatgcacaaataggaaaccgttggacgatgcttgattgggaccactatggcagggtgactcatgtggactgtggacagatctgctgtctatctgaaggacacacatttaaaggatggcgtgcacgagctcatcaacaaaccttttgaaagacacaataagaaagattcttgtggaacatatagggaggctagcatcgctgacagacgaacacaacgacgtcgaacagctatcacggcatgacgtggaaacagtccgaaagtttagatcggtggcctataatttaaggaagaaaactaccaacctatcaattactgaatggatgtaactggttaa

SEQ ID NO: 43169 - DNA, 191 bp, Zea mays
  Clone ID: MRT4577_139379C.1
atggacgggacattctggagctcagcgccatcacgttccttatccaactcactggccttgtagctgagctcgagaatgccctgaaggagtggactggagggacgactgtcgcaaatctcttcagcaatgggaagcatagtggctgctgtgatgagactagggcgctgaagagtgatgggaagctggtgcct

SEQ ID NO: 43170 - DNA, 637 bp, Zea mays
  Clone ID: MRT4577_13937C.1
aacattatcacaccggatacgcttcgctccctctttccctccctcgctctcgggctcttcatcctcacctgcacgcgtgctgaacagaactcgcccacactcgacaatctggacctgagtgactgcaactactggatagtcgccaccgccgtctagattgtctgcaccgttataaacctcaagagcaaagcgaggacgaagaaaggcaccatcactgatccgaggcacctgccgaaatgcaactacgacagatccatcaccagactcgatcccgctcaagacagtagatatcaccctcgatcttccagtcattatacaggatacgaccaagcactacagccacgtccttgatgtgcgtgaacgccacacgccactacgaaaagctatccccgccaactagccaggactggctgcgctaaagcttatcatccacctccacatcgcaggtgatgcagcatggtatcgcgattgatgatcagtacacagttcttcatactcatctgtatctgactcctcagagtggcctgattgattggctacctcgaacccacagggaagcatactacctgctactacgtttgccgaccatgattttgagattgacaaggatgacgcctcactaccaggacgagcctct

SEQ ID NO: 43171 - DNA, 431 bp, Zea mays
  Clone ID: MRT4577_139380C.1
cggacgcgtgggcggacgcgtgggagatacaagaaactataccaacagttgttttttcagaagaaagactataccaattagatcgccaaaggtagttcttttgtgctcccgctgaaatctggatagatctcttgcccttgaactactttggaatcaaactgtaaaaatgaaaatatagtgattgagcccttgtttgtatcagagaagcaatatagctgactagctcatccattatcttactgctatggtctactgctaggcatcatgttggatttggggtatttggcagaactttgtctcatgtttgatggaagtagaccagggactaaattgattggggtcagctaaaccattctgtgaatgaaggtgcatcatctgcagctgactgtggaagtaatatgttgaccaaactgagcaacaacattcttatt

SEQ ID NO: 43172 - DNA, 960 bp, Zea mays
  unsure (1)..(960): unsure at all n locations
  Clone ID: MRT4577_139381C.1
aaaaaaannnnnaaaaaaaaaaaaaaaaaaaaaagaaaaaaaaaaaaaaaaaaaaaaaaaagcacgaggacgagatctcgcgcacaagagcacaaaagccggccgggagacagccgaataaactcctccttcctcgtctgcccttgatggagctccggccgtttcaaaaacccctatcccccgccccgcgccacgcggctgcgtctgcgcatcctcggcccttggcccgcgtcgccttgcgccggacgccgcgctgcttctgatttccgaccgctcctactgggggtcggccggattccgcatgtccttgtcgtgcaggagggtgcggtttcctggtgcggatgtgagggaagccgggaggagcagggaaggaatgcagaggtcgcggaaggcccttctgcggaggacggcggcggcgcaggtgcagagcgcagtggcggaggctgccggtaacgggaggaagaggcgtctgtacggcttctccgtctccctcgtcgtcaccttgtgggtcgccgtgctcctgctccactccctggtcgggcacggcgatggtcaacgagatggaggcggttctgctgtcgatattacttttgtcgagcctaccttgaatggtggtcctgttaattcggctgtacaggaagtgcatggagagaatttggcagtgccgagtgatacctgtgtcggatctgtcgaaaatgctgtgcttccagaggacacgctggtgcaagcagctcagttgtgctccaatgatgaggcacggagtgagaacacagaagctctaacaaaaacaatcaggttgagctttcaggggatcagtgtgggtatcttcctcagtcagattttgattctggagttcaaccaaggggaaaaggttggaaaattaaaaatttgccgaaaccccaagactatcacggggtgctcctcctgatctgatgaattcagacaagagcaattgctgaa

SEQ ID NO: 43173 - DNA, 716 bp, Zea mays
  Clone ID: MRT4577_139382C.1
atcttttccctctccccgtcttctcctgtcaagtcgtcgccgccgccgttcccgccgccaggcccaaccgcccccgtcgccggccggaatctctcctccgccgacagatccggccgtcccaggctgactcccgccggatcccgtcctcggcgcggccggtcgcgcggggtgagaggagctgcgacaccatggcttagtggagctaggcccgacgcccgagagaccatcccgagccaggagaagcaccaggacgaccgctcttcttccccgtcccgagcaagataaacatacaatcttaatggggcatgatcatatcactcatatagagaagctcacggcggatggttccgttgctgacaggaaatgttgccaggaacctggctgcgatgagatcgtcagtggaagggtaatgtactgcaatagtcacactagagggcattcatcccaacagcttggttacctccagagttcacagaaaacctcagatttatacatgccccctgttaaaggcagacagtgtactgaacccagtgccagtgcagagcaagatgtaagtatcaagtatgaggggaatgatcaagccaaactcaatgatagatctggggatactcagggaaacactgggcaactaatcttggggtggcctgacacactttgcaagcaccgacaactgcaaaaagcaggcccagagcaacgcattgtactgcaagctacat

SEQ ID NO: 43174 - DNA, 219 bp, Zea mays
  Clone ID: MRT4577_139383C.1
ccccccccccccggagggcgaaaggctacaaaatcccctgcttgtcctgttgcgccccgccgccgctgggttccgagggagggccagccgtatataggagataataagtgagaagagagcacagggagagggagtgagggaaaaggcgatagcgtacaaagcattccggtcggagaagcggaagttcgcgtttctttgctgatccaatgggtttatacc

SEQ ID NO: 43175 - DNA, 1223 bp, Zea mays
  Clone ID: MRT4577_139384C.1
gttccaacttctaaaatactacttactacaacatcaaacaagtagttcatcagttcaccaaagtagcgttgtagcaagttagctacataataccatgatccagacatccagtacataacaaaatgattattagtgcaatagtgtaagtgaactactactagtgcattctattcatcaaacacagagttatccgaatcagaagaatgagaacttgaggactgttgatccatgtcaacatgtgcatcatcttcttctgaatcagaggatgaagcaagctcatgttcatcattattgcattcattaatatcaatgagcttccttgtccttttctttcttttaggctgaatttctctcttcctttttcccgtttctattgctgtccttgatgatgctgcttgtggatttgtagcttcaacaaattcagtgttttgtgcttgttcttgttcaattgatgcaactctagtgatccactcattgccactatcttcgaggatatcaggaacctgcttctcaattgggtctcttgatttggtctcttttttttgcttcagcttggagttaaatttgacaaacacaaggtctctcatcctatcatggagaagtctgctccttatcttggagtcaaccttttcaaaatcactccaattcctttcacatgctgatgagctacatgttaagcctaaaacttttactgctagctttctaagatttggagaactatttccatggttcaaccaccatttagctggattaaaattttcattcctcctctgccttgtggcaatctcttttccaaaagatcccatcccatcctggtacatgttgagctcatccattatctcgaattagcaacaatatcattttgcatattttgggctactgaggcagatgcagtgcttgatacaccaacatctggaccttgctcttgggattggggcatattcatttcaattcttgatttcctgtgtcgctaacttggcaacttgctattgcttgtttcctccttgatccttccttgctcgattttgacagatgacaattaaccacccacagccgcacagcaagtagcagtagtactgaacacctctaccaggctgcctctcctcgcctcgcggtcacgaactggagtcctgtgcagccgtgcccagcaccagcatggagacgcgctccgccgccaccgtttctttaggtttcagggatgtggcttagtgccgacagcaacg

SEQ ID NO: 43176 - DNA, 341 bp, Zea mays
  Clone ID: MRT4577_139385C.1
gggaaagggaacttttttttttggggggggcccatcccttttccaaaaaactttttttttgggttccccctaataatcaatttaaaagggggccccccccatgttgtttttttgggaggggggtgttgggtttttcaaaacaagttggacaaagggcaacaattgttgtatttttaaaaggggtggggggttagccccaaactgtttgtaaaaagggaacaactgttgttgggtcaaaaaggaagccccacttggtgcagctagctccctaaaggggagaagtatttggtggtggaaaaaaacagcgggggtcaagggggcccattggttaaatggaaaaa

SEQ ID NO: 43177 - DNA, 837 bp, Zea mays
  Clone ID: MRT4577_139386C.1
aaaaaaaaaaaaaaaaaaaaaaaaaaattgaaaaaaaaacgaaaaaaaaaaaaaaaaaaaaaaaaaaaaaaaaaaaaaaaaaaaaaaaaaaaattgtgtagccgccactagtacgaagccctcagtcctccctcacacaccgaaccgagcgcaccatgtcgtcggcggctggaggagtggaggagacggtgcgggcgtcgcacatcctcatcaagcacgagggttcccgccgcaaggcctcctggaaggaccctgacggccgcatcatctccgccaccacgcgcggcgacgccgcagcgcgcctcctggacctccgcaaccagattctctccggccaggccaacttcgccgacctcgccgctcggcactccgactgctcgatttccgcgcgacgcggtggggacttaggtacctttgggaggaggcagatgcagaaacccttcgaggacgccacatatgccctcaaggttggtgagctcagcgacatcgtggacactgacagtggggttcacatcatcctgcggactgcctgaggaggggatcacactgtcctctcaggctttcagttagtgcttatggcgttctgttagaacctgtatttgtattcctgctgggagcctgagttccattccgtgcaaagataaatcatgtgtgacgacacgtttgcaacagcatttatgcttaaactgcattaatgatgatgcgttgagctcctgaatgcctagtttttctggcgacagtatatttgactgcttctgattataaaaaaaaacataaaaaagagtaccttagaataaaacattatcaaaaggcccatgctaattacatttgatatcg

SEQ ID NO: 43178 - DNA, 334 bp, Zea mays
  unsure (1)..(334): unsure at all n locations
  Clone ID: MRT4577_139387C.1
acccagcccgcgagcgtgaggccgttcgctttaatttcgtcggccgtcaacancncntgggtgatggatcctattccggacggggaccgccatcacaaccngcacgcctagcgcgactgcgagatcggccatgtcgtgcgtatcggtgagcggcacgcgaaagccgccggcgccttcgacgacgacgatgtccgcacgcgtcagcgcctcgcgatggcacgcgacgatcgtgtcgatgtcgagcgtcacgccttcctgcgcggcgactatgtgcggcgcggtcggcgctttcagcaagaacggcgtgcgcagttcgggcgggagcacgacgttc

SEQ ID NO: 43179 - DNA, 573 bp, Zea mays
  Clone ID: MRT4577_139388C.1
cccccctcggattttttttttttttttttttttttttttttcaaagcaaaaaattaacctcgttcttcctattcaccagcaaaaaacccatagtctgcgctgtttcgctggccaaccagcaattcttgactcgctgaccacacacaaaaatgaaccaccaaaactgtacaaaaagaaaactcggtcctgattctatcgctgcacgtccatgcgtagctagcaccctgctggccacgtacaaatggatacccagcaggtacgatgattttaaacgtataaatggatagaggttaatagtattaaaataatttattttacatctactcacgcagtctatgactctataaaaacaaccaactagggggatagcaaataacactaaacacacccaaaaggataccacgaacattgttcaccacatgtgttggacggatggttttaactgcaatcctgtaaaagtaataaaaccgataaagattagggttaaatgaacaggctgagtaccactgacacgacaaaaaactgttactcccgaaagaccaaccagatatgcatgatactagtacgcaatca

SEQ ID NO: 43180 - DNA, 356 bp, Zea mays
  Clone ID: MRT4577_139389C.1
attcggctcgagggatgatgcactgggagcttttttgcatcagtatagactgggcagctactgaggcggtgctgatggaatccggacgcatcacccagtgacttgttgggccgaggctcggggaacttaatgtgaaggggcggccaccaatgagagaggatgcctggcctcaatcggggcgggggacattaggcaccgtgcggacaagttgtgggagttctagaggtacacgggtcgttggattgggtgacaatcggatctacaccgttaggacaggggatggatacagaaaaggtggactcgtgaagagggattgcagggcccattcatattcaagtaagggcatggccattgtg

SEQ ID NO: 43181 - DNA, 802 bp, Zea mays
  unsure (1)..(802): unsure at all n locations
  Clone ID: MRT4577_13938C.1
attctctcttccaccccagttaatcctaggcaggcaaagctcgttttttcttgtgcgccggttgattaggctctctgtttgcggagtcttgctctccctctggtcggttttcgttgatccctcctgcattgatttgctccggctcagatccgattctctaggaagagagaccaaagtatcaagtggaacaacagaattttaggtactgccgtgccactcaacaagggaagagcaagagctccagtctctgtctcacttattatgatcctctatgaaccataccctgcaacagatatcattccaaacggggcataatcattgaagaccggttaaggggggcagtgagaagggatggcggtggagttggccaagcaattgcttgcggttattggaagctatacaccacctctctgggctaccctcatcgccggggtttttgttatcatatccgtctcgctgtccctgtacttgctgttcaatcatctgtcagcctacaaaaacccagaggaacagaagtttcttgtcggcgtcattctcatggtgccgtgctatgcagtcgagtcgtacatatcactggtaaatccatcaataagtgttgatatcgaaatcatgcgagatggctatgaggcatttgctatgtactgttttggtcgctatctagttgcttgcttangtggtgaagataggacaattganattttgaatagggaaagggtggttcaggttctgctgcaccacttttaggacaagcatctgaaacacgatatgtaaaccatccttttccnnatgactacatgcttaa

SEQ ID NO: 43182 - DNA, 829 bp, Zea mays
  unsure (1)..(829): unsure at all n locations
  Clone ID: MRT4577_139390C.1
cattgggtacctcgaggccggccggggattgattccctgctcttgcttggcggctgaggggctctgatcggcgcgtcgggttggagctgtcgaccttgggagatttcgtgtcgctctggaagggatcaaatgcggcgcctacttacttggtggactggctggagagctctagtgtcagccagtgttcctgctgtcgcctgcctcatctaggttctcgcagtctgtcgtcaggtccagctccggcagggagcggtatggcgcgttcatcgacccgttcggtcgtggcgccaagctgaggcaggacgggttgggcacgggccccggggtctctagctcggcaaggctgccgatccccaaggcgagaccggcagttgcccggtcggaacggaggctgaagcacgcgtcttcagagggccaattgaacagggtgaggaacggtgatcgctcgtcgcaaggatcaccggcgaagcagagccgggagggggtcggcctgagcttggacattccacagctgcatgatttggctgttcgaccatccaaggacaaggaggagagcccagacgctgcgctggatttctctttccactcggacgagcacagccagaggctccagcgagtgtgttccagcccggctcctttctttctgcaggatgcagcagcgacagcttgatggtggttccagagtgcgcagtgcatnctacgaaggtgtccaagccgccgccgccgaaaccgaagcgaagagccaagtcccctatccccaagcgcgtcatctcggacgtgttcagggaggcgaaagctgcccacaagaggntctccagcccgcagcggc

SEQ ID NO: 43183 - DNA, 1340 bp, Zea mays
  Clone ID: MRT4577_139391C.1
cgcactcacttctccatcggtcgccatccccgaaccacatcgattattgtggtgagcgattggactctcttgttctctttggtttgctttcgtggtgggcgagcaaggtgagcagctggcggtgggaaatcaccgggccttttttttatgcttttcccgtctccgggcccgccggggattgattcgctgctcttgcttggcggctgaggggctctgatcggcgcgtcgggttggagcagtcgaccttgggagatttcgtgtcgctctggaagggatcaaatgcggcgcctacttacttggtggtctggcactggctggagagctctagtgtcagccagtgttcctgctgtcgcctgcatcatctaggtcccctcccttcgttcagctgttcttgcgagttgttaatctaccgtatcgaggaggggaaggggggtccatttggccggaggttttgaggagatggacgacgaggactactcgtgggtgcggcgcaccaggttctcgcagtctgtcgtcaggtccagctccggcagggagcggtatggcgcgttcatcatcgacccgttcggtcgtggcgccaagctgaggcaggacgggttgggcacgggccccggggtctctagctcggcaaggctgccgatccccaaggcgagaccggcagttgcccggtcggaagggaagctgaagcacgcgtcttcagagggccaattgaacagggtgaggaacagtgatcgctcgtcgcaaggatcaccggcgaagcagagccgggagagggtcggcctgagcttggacattccacagctgcatgatgtggctgttcgaccatccaaggagagcccagacgctgcgctggatttctctttccactcggacgagcacagccagaggctccagcgagtgtgttccagcccggctcctttctttctgcaggatgcaacagcgacagctgatggtggttccagagtgcgcagtgcatctacgaaggtgtccaagccgccgccgaaaccgaagcgaagagccaagtcccctatccccaagcgcgtcatctcggacgtgttcaaggaggccaaagctgccaccaagaggttctccagcccgcagcggcagaggaagcccatgtccccgcggtcaccagacgacagccctccactcggcttcgcctcgctaagagcaccgagcaagctgaagatcaatagcagagcatcctcatggccacgaacaaaccttgacagtggaccggcaagagttgctgcgccggagatccttgagaggtggacggtcgatcgctcgagttggtcatcggcatagatttgattcggggcctatacccattgttcacg

SEQ ID NO: 43184 - DNA, 802 bp, Zea mays
  Clone ID: MRT4577_139392C.1
cattgggtacctcgaggcccggccggggattgattccctgctcttgcttggcggctgaggggctctgatcggcgcgtcgggttggagctgtcgaccttgggagatttcgtgtcgctctggaagggatcaaatgcggcgcctacttacttggtggactggctggagagctctagtgtcagccagtgttcctgctgtcgcctgcctcatctaggtcccctcccttcgttcagctgttcttgcgagttgttaatctaccgtatctaggttttgaggagatggatgacgaggactactcgtgggtgcggcgcaccaggttctcgcagtctgtcgtcaggtccagctccggcagggagcggtatggcgcgttcatcgacccgttcggtcgtggcgccaagctgaggcaggacgggttgggcacgggccccggggtctctagctcggcaaggctgccgatccccaaggcgagaccggcagttgcccggtcggaacggaggctgaagcacgcgtcttcagagggccaattgaacagggtgaggaacggtgatcgctcgtcgcaaggatcaccggcgaagcagagccgggagggggtcggcctgagcttggacattccacagctgcatgatttggctgttcgaccatccaaggacaaggaggagagcccagacgctgcgctggatttctctttccactcggacgagcacagccagaggctccagcgagtgtgttccagcccggctcctttctttctgcaggatgcagcagcgacagctgacggtggttccagagtgcgcagtgcattcta

SEQ ID NO: 43185 - DNA, 645 bp, Zea mays
  Clone ID: MRT4577_139393C.1
ctctgccgggactcactcgttagtttaagtgtgaggccgccgcgtgtggccgtgtgggcttcggtggcggcgcatgcgtggcgagcgctctaaacctgctgcttgttcccgctcgcggcggccggtgaccacaccactgaaaccaacagcccttggaacaaaagcggcgatgaggaagggcgccgcgcttggcgccgggccggttcccgactggcgctcgtcgccggatctgcgcctccccggggctactctggtccccgccccgctgcgccgcgccggattacggacctgtggcgggcggcgttgcttcggcggtaggggctggggttggggaccgtggcggcgcggtccgctgcgggttttggtcggggccgtggtcgggcaacgcgggatctgagccgccttttgatggacccttttcgatcgattgtctggatttggtatgctctctgattcttccttgccttgtcctcgccgccgccgccgtcgtcaccggtagcgcgccgccgtcacctgcacagtgttccgctagggttcctccctcgcagctggttgcctggttcgtgccgtgtgtgcctgggcgttgctctgttggctcttggttgtgcagcttctgctcacgtggtgggaatcgggaaaaaggaa

SEQ ID NO: 43186 - DNA, 158 bp, Zea mays
  Clone ID: MRT4577_139394C.1
gatgctattaaatgctaacaaccaaattatctgctgataaattggttgttagcatttaatagcatcaggtctcaacttaaaaggtaacaaccaatttatcagcagataatttgacttctgttgcactattttctgagcacataattgactgcctctgc

SEQ ID NO: 43187 - DNA, 560 bp, Zea mays
  Clone ID: MRT4577_139395C.1
ataaaaaaaaaaaaaaaaaaaaaaaaaaaaaaaaaaaaaaaaaaaaaaaaaaaaaaaaaaaaaaaaaaaaaaaaaaaaaaaaaaaaaaaaaaaaaaaaaaaaaaaatttttaaaaaaaaaaatttagtttgggggtttccaaatttatgcgggggagggggggccaatttcaaccttatttttgggggggtttaaaatttaccttttttaggattaaattttacctttttattgagggaaaattttataattaatgaaattggattaaaactgtctgtatttccaattaaaaacgggttgtaccaaatatacttttttccaaaacgaatttcttttaaaaaaggtggcttaaatttaaatttcaaaataaaattccttttttaatagaatttggcccccccttttaaaaagggaaaaacttttttgttggttaattttacccgcaaatttagccttttactttccctcgctccattaccttttatttcagttttttcggtcttcttttccaggattgccttccttttttccccttaagggttaaatttgcggtttttttt

SEQ ID NO: 43188 - DNA, 329 bp, Zea mays
  Clone ID: MRT4577_139396C.1
gcggccgcccttttttttttttttttttttttttttggttttttttggttttttttttttggaggacatatgtattttttttccttgaacacccacttaacaaaagtttagactcaaagatggaccaaatccaacacctttttatgggggccagtagcaggcttacaaaaaaagggccatcaaaaagaaaaataggtttggctatcattcatggggggccttatgggtttgtctatcattcatggggggccttctggattgaaaattctttgatgcataggggttcctttttggaggagattgaaggggggggtcaaccttcttttttt

SEQ ID NO: 43189 - DNA, 649 bp, Zea mays
  Clone ID: MRT4577_139397C.1
cacctgagagccctcatataagttcgtcgaaaataattggcgaaaagactggatctttatctgcagcgaggtgcttctggagaagaagggtaagcaggattcagacatccatcaggagatgggggtcaagaagccgcagccggcgccggagaagccaaagccggagccgcaggtgctagtgccgccggtcttcgacttccctcccttggccgcccgcaccaggatgttggtgccggcatatgagctcatgttcggaaagctcgcgcgacgcagcctctttgatgactacctccattctgggggcgtggatgcgcagattgtgttgaagcagctgggagattctcatgctgatctcactgccactatgtctacaaatgggggggaagctcactttcgatggcagagggatttgaaagatcccaatacgtttgtggactttcttgtgtcgacttcaaagcccacaatgcggctgtcttcaagcatttactatccgaagtatcgtattggcgcctttgggacattccctttgaatatggcaaacagggcatgcccagaagattatggtgtcatgggtttaagatatggttcagagaatctatcaattggggcctccttcgtcccatttccttcgcctggtgaggtaccctat

SEQ ID NO: 43190 - DNA, 426 bp, Zea mays
  unsure (1)..(426): unsure at all n locations
  Clone ID: MRT4577_139398C.1
aagcaacccactcctccngcctccatccaccacacttactcttactcctactacacatactaccctacggccaaagacacacctttctacaggaacatctcctatatcttcaccccctcccaccccatttacatatactcatacaacctcaccctcaggcacgtgcatcactactacaccttctcgctacccaacttcaactaaaacacgccattcgtcataatccatcctccactcttcaagaactccataagcaacctgatacaccaccccaacaggaacccatctaacacacactctctctacaacttaaactaccttaacaacagaaatgcttatcccattcctttcaaaaacccaccaaacaaaaaactcatttaacttatccacaagaacctgttcaccttatacacccatccaatacct

SEQ ID NO: 43191 - DNA, 743 bp, Zea mays
  Clone ID: MRT4577_139399C.1
gatttgaaggtacaaacatacggtatagtatgcattgtttaatagtttaatacagaaataaaagaatactgagaagagtacatcatttgatcaatccttatgaactttcagttatatgttttagtagtcacccatttaaaagaacctaaacgcctatggctgagttgattctatagctttgttttttttctaggattagctgcgacgaggctgttttttcttggaacagttacattatcttttggtgtggtactgcttgatttaatttgtgttttaacacttcaataggaggtgattcgtcagtacaagaaatttgtatcctccttttcttgacagaatctatgacataataacatctcaagcatgcatggcaatgaggcacaatcaggattgagaacggatgggctacaaagttctttgaagatgctgctagaggtagagcgcccacacttatgttcatgacttttgttgataatttcccagcttgtcgacaattaaaggctctcccattcttggatccactgaagcattttagaggtgctctattctactatcaaacgtttgagagcacctagagggggggtgaataggtgatcctgtaaaaacttgaaacttgatgccacaaaactgattaggagttagcacaataaagccaagtggctagagatgagttcttgcaaaacacaataaccacaaagagatcaacacagagatgacacagtggtttatcccgtggttcggcc

SEQ ID NO: 43192 - DNA, 216 bp, Zea mays
  Clone ID: MRT4577_13939C.1
cccttttattattccacagcccacacgacaaccggggggggatctataacacattccagaattcggaacccgacatccatacaagatggcatatcttagcaacactggcgcaaaaaacgtcactgactaacatagcctagcaacatcagactcacaagaatgcagcaacatcccacaccactcactcaagaaggggaggagctaccgatgagaatt

SEQ ID NO: 43193 - DNA, 325 bp, Zea mays
  Clone ID: MRT4577_1393C.1
cacttacggccgcaggcagcagcaccatgtaggtcggcagcaacggcggcggaggcgcgcgcggtgtccgtgtccccagtcccggcgccttcgctcctcaacggccggcgcggcggaccggggggcgtacgatggtcggtgaccatgctgacaacaatatagctcttcactggcgtctacctggtgcgctgggtcctggccaagttatgggactgctctgtgaagcacaaggtgctaacaatatatgcgacaaacgagggatgatacgagggccgctacttgagccacattcgctaccaacggtgctacaaactctaactaaaca

SEQ ID NO: 43194 - DNA, 782 bp, Zea mays
  unsure (1)..(782): unsure at all n locations
  Clone ID: MRT4577_139400C.1
cttcacctctgctcctcccgcgcttagctcttggtgcggatctcctggccggttcacaacttctagctcgtcaagctcgtccccatggcgcgccagttcggatttccccccctgccactcggccttgccccctgctcacccctgcaaccctgccgagccctaaccccagccagccgagctcaggcgcccaatccatggcgcacccagccgcgcccttgtccatctgctcggccgcgagcttccctgctcccgtggttatcgaagctccaggtgcgcacgtacgcactgaagcctttggggtccatgacgatatcgtggagagccgcagcgttgtcgctcgcgtgcctcgtcgccgtgcaacggcgcttgggtgggacggcgcgctgctccccgaactcgctctgcgctcggcttcttctccgtggagctcgcctctgcgcctgactcctgctcgtcgaatctccagccgcgccgtcgccttgctgctcgccagcgtcttctctgcccctgcgatcccatggcgatttcccctgcggcagcttcctcggcgcgcagcctccctcccagctcagccgcctgcttctctccactgctcgtcgcgcccacnaacagctcgccgtgccctcgccgctcccttcttcctcctctgtttgcccatctccatggtttgccgtcgaaggctcgaagcttctggccacgctcgttgtgctctggtccgggaggaggatttgctgcgcgcccaaatcttcttcctcccattcccagctcctcctgctcgcgac

SEQ ID NO: 43195 - DNA, 2927 bp, Zea mays
  Clone ID: MRT4577_139401C.1
tcgcgatctcggactagtccttggaatgtgaataagctcgctcacatagctggcgtatgaggtcaattgggagtttgtgtatctatacttgatatcgtgtatggtcatgctactatggaagttcaggaagcatttgtgaagatatgtgaacaagctaaggcttacttagaaatgaaaggagaactagtcagtggtcttaacttaatcaataataccaatttagaatatttctgctttgttcttcacagggaaaaatttcgtctgagaggtgattttctgttaaaaatgaacgaatgcgagactgcaaatcagtcttattattcggctctaactctttttaagcatttgcccaaaggatggattagctggggaaattactgtgatatggtttttaaagaaacaaaagatgaggtttggcttgagtatgcagtcagttgttttttccagggcatcaaatatggagtttcaaactcaaggagccatctagctcgaattctctaccttcttagctttgatggacaaaatgaacctgttggaagagctttggataaatatcttgagcagctgcctcactgggtttggctttcatggatacctcagttgttgttgtcgttacagagaagtgaagcccaacactgtaaattggttttgatgaagatagctcaagtttacccgcaggcattgtattattggcttcgtacatacttgatggaacgccgtgatgttgctactaaaactgaaataggaagaaacatgttggctcagcagcgcatgctagcaagctatgatggcaaacaatgcggccaataacttacctgacggaagtgcaagggcatctaatcatgcaggtagtaacatgacttctgacaaccagtctcatcaagcctcccaatcagttggtgctgcaggttctcatgatggtggtaatgtccaaggacaagatccggaacgatctacccctgaaggtggcacaaataccagccatgatcaaggtcaacagagttctacaggtgctgagggctcacaagttccgcttagacgtaatagcggacatgggtgggtaacttctgcagcaagtgcatttgatgctgcaaaagacataatggaagctcttagaagcaaacatactaatctagccaatgagcttgagcttttactgtcagaaattggatcacggtttgttactctgcctgaggaaagacttctagctgtggttaatgctctgcttcatcgctgctacaaatatccaactgcaaccactggcgaggttccacagtctctcaagaaggaactctctggtgtatgtagagcttgcttctcacaagatgctgttaacaagcatgttgattttgtgaaggagtacaagcaagattttgaacgtgatcttgacccagagagcgctactacttttcctgcaacccttgctgaacttacggagagattgaaacactggaagaacattcttcagagtaatgtagaggatcggttcccagcagtattaaaactggaggaagaaagtaaaacacttcgggattttcatgttgttgatattgaactcccagggcagtacttcacagatcaggaaatcgcaccggaccacactgttaagttggacagagttggacctgacattccaattgtccggaggcatggcagtagctttcgacggttgacactcattggttctgatggttcacagcgccattttattgttcagacatcactgactccgaatgctcggagtgatgaaaggatgctgcagctattccgtgtgctaaataaaatgtttgacaaacacaaagaatctaggcggcggcatctggctatccatactccaataattattcctgtttggtctcagctgactcgcctattacaattttcaaagagcagcttaatcaagccgtttcagggcagctctctcctgaagcaattgtggagctacgtctgcaagcatacaatgagattacaaaaaatattgttaatgataatattttctcccaatatatgcacaagattctgccaactggcaactacctgtggaccttcaagaaacaatttgcaatccaagtggctctctcctgcttcatgtcgtatatgctgcagattggcggcagggctcctaacaaaattctatttgctaaaaatactgggaagatcttccagactgacttccatccagcttatgatccaaatgggatgattgagttcaacgagcttgttccatttaggctgacacgcaacttgcaagctttcttctcgaattttggtgttgaaggtctcattgtgtctgccatgtgctctgctgcccagtcagtggtttctcctaaacaaagccagcacatttggcatcatttggctatgtttttccgagatgaactgttatcttggtcgtggaggcggcctctgggcattccatcagtccctgtcgctgctggaatgatcaacccatcagatttccaacagaaggtggtaaacaatgtggagcatgtcatcagtcgtatcaagtcaatatcgccacattgtctggctgaggaggaggagaatgcaaccgagccacctcagtcggtacaaagaggcgtcaccgagctggtggaagcggcattgtcgtccaggaacctgtgcatgatggatccgacgtggcacccatggttctgaaggcatccagcacctctgtagcctgaccaaactgacggcgtgtacagattttcatgtccggcaacgctggttgagactagaaaactcgttgcgttatgtagataaagccagggtgtcatcatgtgttcgctggtgtaatggagcagattagcttggtaattaatgagacattgcatttcttaacttaaaaaaaaaaagacggtttcggatcagtgagctctaaaaaaaaaaaaaaaaaaaaaaaaaaaaaaagggggggcggggtaccc

SEQ ID NO: 43196 - DNA, 398 bp, Zea mays
  unsure (1)..(398): unsure at all n locations
  Clone ID: MRT4577_139402C.1
ngtgntttttttttttttttttttttttttttgggggttttttttggtttttcccctttttttctccactttctgggccccaaagggtttaggtttttaagaattattgagatccataaaaacatggcgggcatagaccaaaaatattcgtattgggtctaaatctaaaaagaaaatttttttaatttaaatttaaagagaaaatttgatacaggcgttacccatttccgatctgattgattgcacccctagggggaaaatagggggaccctttggggccattctttctgtttttttttggagggatgcattgacatcggttttggaccacttggtagtaaaaacggtcatccggaaactgatgccaaaactttgttacgggtatcccaccccaaatt

SEQ ID NO: 43197 - DNA, 816 bp, Zea mays
  unsure (1)..(816): unsure at all n locations
  Clone ID: MRT4577_139403C.1
ggtaccctccgagctcggccggggttgttgatattgaacacccagggcagtacttcacagatcaggaaatcgcaccggaccacactgttaagttggacagagttggacctgactccgaatgctcggagtgatgaaaggatgctgcagctattccgtgtgctaaataaaatgtttgacaaacacaaagaatctaggcggcggcatctggctatccatactccaataattattcctgtttggtctcaggttcggatggttgaggatgatttaatgtatagcacttttcttgaggtgtatgaaattaattgtgcacggcataatagagaagctgactcgcctattacaattttcaaagagcagcttaatcaagccgtttcagggcagctctctcctgaagcaattgtggagctacgtctgcaagcatacaatgagattacaaaaaatattgttaatgataatattttctcccaatatatgcacaagattctgccaactggcaactacctgtggaccttcaagaaacaatttgcaatccaagtggctctctcctgcttcatgtcgtatatgctgcagattggcggcagggctcctaacaaaattctatttgctaaaaatactggggaagatcttccagactgacttccatcatttggctatgtttttccgagatgaactgttatctttggtcgtggaggcggcctctgggcattccatcagtccctgtcgctgctggaatgatcaacccatcagatttncacagnaggtgggaaacaatgtggagcatgtcatcagtcgtatcaagtcaatatcgccaca

SEQ ID NO: 43198 - DNA, 1600 bp, Zea mays
  Clone ID: MRT4577_139404C.1
gaacactggaagaacattcttcagagtaatgtagaggatcggttcccagcagtattaaaactggaggaagaagtaaaacacttcgggattttcatgttgttgatattgaactcccagggcggttctttacagatcaggaaatcgcaccggaccacactgttaagttggacagagttggacctgacattccaattgtccggaggcatggcagtagctttcgacggttgacactcattggttctgatggttcacagcgccattttattgttcagacatcactgactccgaatgctcggagtgatgaaaggatgctgcagctattccgtgtgctaaataaaatgtttgacaaacacaaagaatctaggcggcggcatctggctatccatactccaataattattcctgtttggtctcaggttcggatggttgaggatgatttaatgtatagcacttttcttgaggtgtatgaaattaattgtgcacggcataatagagaagctgactcgcctattacaattttcaaagagcagcttaatcaagccgtttcagggcagctctctcctgaagcaattgtggagctacgtctgcaagcatacaatgagattacaaaaaatattgttaatgataatattttctcccaatatatgcacaagattctgccaactggcaactacctgtggaccttcaagaaacaatttgcaatccaagtggctctctcctgcttcatgtcgtatatgctgcagattggcggcagggctcctaacaaaattctatttgctaaaaatactgggaagatcttccagactgacttccatccagcttatgatccaaatgggatgattgagttcaacgagcttgttccatttaggctgacacgcaacttgcaagctttcttctcgaattttggtgttgaaggtctcattgtgtctgccatgtgctctgctgcccagtcagtggtttttcctaaacaaagccagcacatttggcatcatttggctatgtttttccgagatgaactgttatcttggtcgtggaggcggcctctgggcattccatcagtccctgtcgctgctggaatgatcaacccatcagatttccaacagaaggtggtaaacaatgtggagcatgtcatcagtcgtatcaagtcaatatcgccacattgtctggctgaggaggaggagaatgcaaccgagccacctcagtcggtacaaagaggcgtcaccgagctggtggaagcggcattgtcgtccaggaacctgtgcatgatggatccgacgtggcacccatggttctgaaggcatccagcacctctgtagcgtgaccaaactgacggcgtgtacagattttcatgtccggcaacgctggttgagactagaaaactcgttgcgttatgtagataaagccagggtgtcatcatgtgttcgctggtgtaatggagcagattagcttggtaattaatgagacattgcatttcttaaaaaaaaaaaaaaaaaactcgagacctcgtgctatactctcgacggtagttggtcgacgtccttgccgaactaacctagcacttggcagaaccataaaagtggcctacaaaatcactgcttgg

SEQ ID NO: 43199 - DNA, 185 bp, Zea mays
  unsure (1)..(185): unsure at all n locations
  Clone ID: MRT4577_139405C.1
tcttctggcagcagggccgcaactgcccgctggccggcgacaacgacccgcgcgtcatcgtcgcgctcaccctggtcatgtacgccagctacttatatctgttcctccagatgtacctgaagaagcagcgctnggccgccaagcgtcgacaggagcgtcttctggccgcataggccgagcaggtc

SEQ ID NO: 43200 - DNA, 196 bp, Zea mays
  Clone ID: MRT4577_139406C.1
taaaaatactggtctgatgaccatccttgtgccaaaattggagtctccatttttgtctatgtcattaggagagattcctagaagcaaaatactggtcaaagggttatggacaatttaacactcctctggaaataaaggacatccatataatgtggcaaataatttataaagcatttcaccagggaaatgagatttg

SEQ ID NO: 43201 - DNA, 299 bp, Zea mays
  Clone ID: MRT4577_139407C.1
aaaggagagccacccaacgccctttaaattatggggggggggccaaaaaggacacaaggggggggggggaaatataccaaattaggaacaggggaacaacaagatagagagaggacccatgacgatggggacggatcgaccggggctaggagaaaaaaggagggtactaaaccatgcaaaggggaaagctgagcttaaattttgccgggggggcccgggtggggggggtcctgagggccctttttgatcgggaggagggccggggacccccaccccctgacgtaggccaaaagggagcc

SEQ ID NO: 43202 - DNA, 238 bp, Zea mays
  Clone ID: MRT4577_139408C.1
gaattcccaggcaggccggtcggcgaggagggcaggaagaccgaagaccgagccgtgcgggggctcgggacgggaaccggacatgaccccaaaatctcagatgcttcctgtccgcccgcccgtgcccgtcgacgcgttgttcttgccggccgagccccagctacggcctctccttctccatggggatcggatacgccacaagctgcgcgatggtgctgcggatcttatgatactgctt

SEQ ID NO: 43203 - DNA, 336 bp, Zea mays
  Clone ID: MRT4577_139409C.1
atgtttttgtttcatttatgcgtttgctttatatatttataaagttcgtacggttgcgcgggacggaagaaaagagccacaccaaaaatgactcgtgttccccaaggtttgtgtcccggggtcagtggaaggcctactcaatctggtggtgtcgctcgatctaaggggacagcacaccggccggggggtggagctaaaaacaccgaggggccggcgctgcaacgagccacggggtccaaggacggcgtgactagtggatattggtagggtgacagattggtttggcccgcgctccgggcggactttttgatgatttatagcctacgcttgctgatt

SEQ ID NO: 43204 - DNA, 400 bp, Zea mays
  Clone ID: MRT4577_13940C.1
gctggtacactgatcctgctcatacgctgatgacagtggccacggacgacagaacgggggggggaagccacgactgtatgtagcgagataccggactactgctagagcactgtcactaatgctaggctatctcaatggagtgacctacatgtgcggttgtaggtgcaatggtgagctactgcttcttgggtatgacagtatagcactaacagatagatgatgctgaattgccaaaggtcctgaagctctgtctagcgtatctggacatgacagttaatcttaatgaagagtgactagactgcagtaagatcatggagtcgaccagtatctttcatggtcagatgatgcctgaacttagtatataagctggatgcacagcgtatgttggagtatgcaaagt

SEQ ID NO: 43205 - DNA, 446 bp, Zea mays
  unsure (1)..(446): unsure at all n locations
  Clone ID: MRT4577_139410C.1
gctggcagcgcccaacataggcacaacccacgcgtgatcccacgcgtccggtactcgtagactgtaataattaaacaaagcttgctcatggttaaactgcgtgttgattagtctttcaactacatagctctaaagtttttgatacaccgagtgatttgccaggaaaaaaatgagcagattgttgtaagcaaaaaaaaaaaaaaaaaaaaaaaaaaaaaaaaaaaaaaaaaaaaaaaaaaaaaaaaaaaaaaaaaaaaaaaacaaaaaaaaaacaaacttacaaaatatggctaaaaaaggggggcctgcttgacgataaattcatttcctttcattgttccgcttctcttttttttaccttttaagggggggncaaaaccccaccttaaccccatttaaacaccttccccttcatccccctttcctcatctctaataatccccaac

SEQ ID NO: 43206 - DNA, 418 bp, Zea mays
  Clone ID: MRT4577_139411C.1
cgcgtgcgctctggtgttccgacggagggtggcagactactaatggcgactgccgcggggagcgcgccacctctggccgtgaatatctccatctgccttgtcatctggtctggcaccggcactgtcgacagggaccatgacaccgagcggatccaaggaagtgctggtgatgtgctagaagactatcccccatgggaggctaatggtggatctatacgatgctgccgaactagtacaacacgaggagggcggcataagactctatgtgtaacagccacatgttggccgcggagatcttcatgcgccggttcctactgaggaacgcgagccagactctcaatccagcaatagcctattggttctatactcccgcctacaccaagtgtggtctcacaccgtggggacatcccttgcccgt

SEQ ID NO: 43207 - DNA, 576 bp, Zea mays
  unsure (1)..(576): unsure at all n locations
  Clone ID: MRT4577_139412C.1
ccggnngtcgacccaacgcgtccgcgccagccttggcgcgctccgtggtaacggggcggcgcaaccagtcagtccgtgccgtcgcgcggtgtgaagccgtcggtcgaacgagtacgccgggcgtgatgccggatcctatccgcgggcctggccgtgcgcgcggtcatggactttgacggtgccgttgaccatcaggattagctgtgggaatggtatagtctggagtatggtctgcaaaatgatttgtgagctgcttcgtgtactaaattgcgggctgatagtcacccaacaatatgggtgatgattgtggcatgtctgctgagcaaactccaattaactattgatcagacttctgatttctgttctgtgatataggagatgtgatcgaagaggggtttgaaaattggaaggaaactttgcaagccatgtgcaaactcttgtcgcagttttgtgcaaagaatggtgctatgactcgttatgtgactgaagaggggcttttggaaagggttcatgagatggctttttgatgaccgaactgtgtactgacctctgacctgactgatgaactgctagaag

SEQ ID NO: 43208 - DNA, 1841 bp, Zea mays
  Clone ID: MRT4577_139413C.1
ataaggaaagccggcacgcctgcacggtaccggcccgaggcagcaatgcacaccacggcaacagcattcactgccaagagagtgagcgagcgagcagaggcagcgcagcaatggcggcggcaatagtactctccggccaggtgcggccgcttccctcgtcgctgcccctgtccctgctgctgctcctcctcctgtgctgctccggcacctcgtggggatggagcacgtcccggggaggagccgccagggagtgcggcttcgatggcaagctggaggccctggagccgcgccacaaggtgcagtctgaggccggctccgtccagtacttcagccggttcaacgaagccgaccgggagctcacctgcgccggcatcttcgccgtccgcgtcgtcgtcgacgccatgggcctcctgctccctcgatactccaacgtccattcgcttgtctacatcgtccaagggagagggatcattgggttctcgtttccgggatgccaagaggagacccagcagcagcagtatggatacggatatggatatggacaccatcaccatcagcatgaccaccacaagatccaccgattcgagcagggcgacgtggtggccatgccggccggcgcccagcactggctgtacaacgacggcgacgcgccgcttgtggcggtctacgtcttcgacgagaacaacaacatcaaccagctcgagccttccatgaggaaattcttgctggctgggggcttcagcaaggggcagccccacttcgccgagaacatcttcaaagggatcgacgcccggttcctgagcgaagccctgggcgtcagcatgcacgtcgccgagaagctgcagagccggcgtgaccagcgaggcgagatcgtccgcgtggagccggagcacggctttcaccagctgaatccgtcgccgtcgtcgtcgtcgttttcgttcccatcgtcacaagtccagtaccaaacgtgccagcgcgacgtcgacaggcacaacgtctgcgccatggaggtgaggcacagcgtcgaacggctggaccaggccgacgtctacagccctggggctgggaggatcacacgcctcaccagccacaagttccccgtcctcaacctcgtacagatgagcgcggtgcgggtagacctgtaccaggacgccatcatgtcgccgttctggaacttcaacgcccacagcgccatgtacgggcatcaggggcagtgcaagggtccaggtcgccagcgacaacgggaccacggtgttcgacgacgtgctccgtgcggggcagctgctcatcgtaccccagggctacctcgtcgccaccaaggcgcagggagaaggcttccagtacatcgccttcgagacgaaccctgacaccatggtcagccacgtcgccgggaagaactccgtcctgagcgacttgccggccgccgtcatcgccagctcgtatgccatctccatggaggaagctgcagagctcaagaacggtaggaagcatgagctggctgtgcttactcctgctggcagtggcagctaccaacaaggtcaagctggcagcgcccaacagtaggcacaacctcagagtgatctgcctgaataagtactcgtagactgtaataattaaacaaagcttgctcatggttaaactgcgtgttgattagtctttcaactacatagctctaaagtttttgatacaccgagtgatttgccaggaaaaaaatgagcagattgttgtaagcaaaacatgtttgttatggctaaactgcatgtctacctggatttgtattttttttcaaaaaaaaaaaaaaaaaaaaaaaaaaaaaaaaaaaaaaaaaaaaaaaaaaaaaa

SEQ ID NO: 43209 - DNA, 230 bp, Zea mays
  Clone ID: MRT4577_139414C.1
gcctcaaagatatccaatcccacggccgattcctacagagattgtaattctacacatggaggtgcaaaggaatacaatgctgtgcaagatatctgacaagctcctcgtccgctgggtgggatctttttccatgacgatcttcaacgagaaaatacacgtgaatactgacttcctcttggaaatcatgaacactctgtcaatgctcatgtatcgcgagctctacatactga

SEQ ID NO: 43210 - DNA, 826 bp, Zea mays
  Clone ID: MRT4577_139415C.1
taccggtaccggccttcccgggctgttacgaggcatttgccatgtattgtttcgagagattttgatagcatgcttaggtgagtatttgaatatatgttgtaattctgcacaagtgaaatatctttagttaaccaatagttggaagtaaggcacaccaatatttccattctcagcagcagaataaagagaaatttcgctcttaagcagaaggttcttatttgtgttcttatctgtggtatggaccaggagcagcagctggtctagcatgctgtacagtttggtgtgtcatgtgtgcccataggcagagcttaatgtagatcaagggttcctactatagaaagttctttaggaaatactccattccagattgtaagatattttggcttttctcgaagcattgcctttcctatgtatatacactgtatatataagtgtttagcaaaagttatgtatccagaaaagccaaacatcttataatttggaatggaaggagtactagttttcatcacttgagtaatacaaaaaataatacagatatatgtatatgtatctgagtttgacccccttaatctttttcaagctctggcattagtgatgatgtagaatcctatttcatgatgctatgacctctatagcatgtgatgtttcatttttactggcagtcaccgttgactatgatgcaattctgattttttggttactctatttcttagttcttacactaggtatgtgcccgtgcattgccacgaggcgggggagcacggggagcggcgcctaggctacaaatataattcctgtttatttggaaacactaaggtatgtgtgg

SEQ ID NO: 43211 - DNA, 347 bp, Zea mays
  Clone ID: MRT4577_139416C.1
ggtggcggttacccgcgcctgcacctggcttcaagcctccgatccgcccaaggcatcataaatgatgaatatgggggcacattgtatgatggattccttggagtgctaaatgctactccggggttgtcccaaatcatttatagcttggcaggagtagcaacaggcatctattcttcactgtcaggaattcagtggaatggaagatatgacatatgccagaaccgagaaaatgtttggaaagtgagaaggtgctttgtattgggtgttaaaggactactatgtctgctattaaacatgtagaagaacacatttcagcataatctagtctacataagaatgttgacagc

SEQ ID NO: 43212 - DNA, 462 bp, Zea mays
  Clone ID: MRT4577_139417C.1
ggggagcttaaacctgcctcaccaacattttcacatgggggggaaacccctaagggtcccaagggccaactgggcataaaattggcatacaaaccttaccattcactcaaaaaatggccctaggccaacccactttaggaacttgccctaccccccgggagcacgagccccaccaaaacccgccctagtttttaccccctttattgaccccaagcccctggatgaaaacccaacccccccttttggggcttttgaagggggaccccccttcccttttgttgaaaaactcgttgtacccggaaaccccaaaaatttcggggaccatggaccaaacaagggaccccgaaaccgcggggggccccccccaggccacccccaaaaggagccccatgaccacccccaaaaattccctgggccccccctggggccccccgggggggggcgggaaaatcgggcggggga

SEQ ID NO: 43213 - DNA, 563 bp, Zea mays
  Clone ID: MRT4577_139418C.1
cacccagcgacatactaggtttactctccccgtccgcgcctacacacatttggacaccggcggcgctgatgcacactgtctgcgactggcccacgctgcgaactctgcgaacgacacaggcaccttacagaatgttcctgccttgaacgaaggttactgccttccatatccaggatgacgtgttagtgtgcaacacccttgggatgatctgacagataggatgctggtgcatgcaactatattcaactgaccgattgagatagcaacgggaacaaaggctcaatatgagcttgagacgacaactggactgatgaacgcgtaccgaggactggattccttgtccgtgtacagtatgagctatcgatccattgctcagacgatttgcgactacagagagccattatgagcactggatatgcggctgccacacagcgctgcgaggctgtcagctacaagaggcagccattgggtcctatgcccggattgatggtcgagagcaccatcattgagaccgtaactcccatcccatatgatgcgggccatgatctcaagggtggatacta

SEQ ID NO: 43214 - DNA, 352 bp, Zea mays
  Clone ID: MRT4577_139419C.1
aacacacctacgaacgcactagcaggacctacacaaggctaccagacattatccctccttgcgcttctggccctttttgcgagtgcaacaaatgcgttcattacttccacaatggctcaccttgcctccgagctgccattatctccacagttcctccctgcagttacttcaatgggcttagaacacccagctgtgcaagcctataggctacaacaagcgctggcggcgagcgccttagaacaaccaattgcccaattacaacaacaatccttggcacagtgtaaccatacaaaccatgggaacgcaggagcaacaagcactgagccacctaggcgggggggaaccctatgga

SEQ ID NO: 43215 - DNA, 384 bp, Zea mays
  unsure (1)..(384): unsure at all n locations
  Clone ID: MRT4577_13941C.1
cggacaaccccacgcagncacncccgggccgttttcgccggcgcncacgcgagggggcgagcaggcgncgcaaataacacaccaaggggcgcgaccaaggnggccacaaagaagacaaagaaanccacggacaacaacaagaacaagcngcagggggaaangaaaaggggcaaggacacacngaggctacanagaaccggacncaaggactttgggggggggggtaanaacaaanncatagagaatcaatcgattaacanactgtccacgcccactaaggaagtactagaaattgagtaactatggctaatgctgagacaaggcgtcactgttcaccacattacatgaaaacaatggatgaccttgagaacggtgctagaagga

SEQ ID NO: 43216 - DNA, 810 bp, Zea mays
  unsure (1)..(810): unsure at all n locations
  Clone ID: MRT4577_139420C.1
ctgactcatcacccacacagcctacacaacacaaacacaagcacagatcggtcgagattcaaggcaaccgggagcaatggcgggcgagaaggggctggtgctgctggacttctgggtgagcccgttcgggcagcgcgtgcgcatcgcgctggccgagaagggcctgccctacgagtacgcggaggaggacctgatggccggcaagagcgaccgcctcctccgcgccaacccggtgcataagaagatcccggtgctcctccacgacggccgtgccgtcaacgagtccctcatcatcctccagtacctggaggaggccttcccggacgcgcccgctctgctcccctccgacccctacgcgcgcgcgcaggcccgcttctgggccgactacgtcgacaagaaggtctacgactgcggctcccgcctctggaagctcaagggcgagccgcaggcgcaggcgcgcgccgagatgctggacatcctcaagaccctcgacggcgcgctcggggacaagcccttcttcggcggtgagaaattcgggttcgtcgacgccgccttcgcgcccttcaccgcctggttccacagctacgagaggtacggcgagttcagcctgccggaggtggcgcccaagatcgccgcgtgggccaagcgctgcggcgagcgggagagcgtcgccaagagcctctactcgccggacaaggtctacgacttcatcggcctgctcaagaagaagtacggcatcgagtagccgcgcggacggacgggcggncatgcatgcgccatcccgccggncggncataaatcagggagcgt

SEQ ID NO: 43217 - DNA, 422 bp, Zea mays
  Clone ID: MRT4577_139421C.1
ggccggccgggaaaaaaaaaaaaaaaaaaaacaacaaaacaactaacttctttcttcaccaaaagaacctacttagatcaaaatggctcccatcaaggtcggcatcaacggtttcggtcgtatcggccgtatcgtcttccgcaacgccgtcgagcaccccgacatcgaggttgttgctgtcaacgaccctttcattgagcctcactacgccgtctacatgctcaagtacgactcttcccacggtatcttcaagggtgaggtcggcaaccagggcaacgacctcgtcgtcaacggcaagaccatcaagttctactctgagcgtgaccccgccaacatcaagtggtccgagaccggcgccgactacgtcgttgagtccaccggtgtcttcaccaccattgacaaggccaaggcccatctccagg

SEQ ID NO: 43218 - DNA, 948 bp, Zea mays
  Clone ID: MRT4577_139422C.1
tgggcagcagcagcagcatgttcccacaggcagatgcgcatccagcccacgagcctctcgccggccgggtggccatcgtgacaggaggcgccgggggcatcggctcggcggtggccgcgcacctggcgtccctgggcgcccgcgtcgtggtcggcttcatcggcgacccggcccccgcggaccagctcgtggcggccctcaacaactcctcgccggcaggcaacagcgacccgcgcgccgtggcggtggcagcggacgtgtcggacccggcgcaggtggcgcggctgttcgacgcggcggaggcggcgttcgggccggagctgcacgtgctggtggccgcggcgggggtgcaggacgcgacgtacccgcggatcgcggacacgtcgcccgagcagtgggacctcgcgttcggcgtgaacacgcgcggcacgttcctgtgctgccgggaggcggcgcggcggctggcgcgcggcggcgcgggccgcatcgtcaccctctcgtcctccaacgtggggtcgctgcggcccgggtacggcgcgtacgtggccagcaaggcggccgtggaggccatgacaaaggtgctggccaaggagctcggagggatggggatcacggccaacgccgtggcgccgggccccgtggccacgcccatgttctacgcgggcaaatcggaggagcgcgtggccgccgccgcgcgcgagtgccccatggggaggctcgccgagccagcggacgtggcgcccgtggtggggttcctgtgcaccgacgccgccggctggatcaacgggcaggtcatccgagtcaacggcggctacgtgtgagtgtactgtgatgagagggaggaggcatagctagctagcttagcttggagtgtcagcgtgtcaccaaccgacaattacacgtgctccttcccttaataataataataataataataataataataat

SEQ ID NO: 43219 - DNA, 2242 bp, Zea mays
  unsure (1)..(2242): unsure at all n locations
  Clone ID: MRT4577_139423C.1
gggtacctcgaggccggccgggttctctgcagcatcagaattggctgcagcttcccggttacaattggttgagaagaatgaacttggtcatcgagcaagtgacatgttcagcaatactgaagatcatgattctacgttatctgtttcttctcattctgttccaaagctgaagaaaaccaatgaatcttttgtcctaggcactcctcgaagacatgggctaaatgagtctactaaggtcctagatacattatgtcatgcctttactttggatagccaacctagtcgtgaatgcaactctcatgtggatttaaatggtgttggaagaaagagaactgctgaggaaaatggttatgctgtgcaagagtgtcctgaaaaaaccactaagacagcaagaagccctagaaaatctagaaaagagattccttgtgtatctcagccttctatgattgaagaaaaacagaatggtgctcatgataantggaaagtccgtgngatattgattggagcaaggtagtatgtactataactaatgccacggagcaagttttgccagcatcaataagcaagtataatctacaacagcttgacatgctaagcgataggttggatgagattcatatggctagaaaatataaaaggctttctactgctgtgaggatcaaagctttctgtggtgataagcaaaagagattagaggaggcaaggtttctccatgacaagcttttctatgaaaaggcgaagctacaaataaataatatgaagctagttaaactccaaaaaaaggctcaactatgtcaagatggaattcaagagtgctgctttctgaaatccaagattttgggcgctggacacatggaggattcttcacttcctgcagctactacagtcagtgctggtgatagacaggaagaacttgatatcatttctgaaaagaggcttgaactcaaaattattcaacggaaggtggagaaattaaggagttcccttgaatgttttcacaatattgaaggtggcattggtagtgatagtgttgtgaggtatgctgaagagcagttgatgatgagaaatcagcatcgcatcatccactggcaagcagggctctgcaagttgaatgacatagttaaaaggggcaacaagtgtgatatcatcctcaactatcacaatttgttgttccaaaggatcatcttaaacatcagtgatacatctagcatatttgtgaacaattcactgaatggaaaccaaattggaaagacatttccaaatttggatgcatctttggcattcaattttgttttcgaagccgaggagaaccaaagagttagtgatttacagtccttgcagaagaagacaatggaaacaagcttgctgcttggaaatcttattgatgttttagaagaaatcaaattatctaagttggagttagtaaatcttacctccgctgcttttgttttggagtcccagacacgtaaacttggcctccacctgtctttcatgagtttcaagagtggcaagaagattgctttcatcatcgacatgacagacttgaaccgctcggtctacccttctgaaccatctgagctcattaaggtttttgaagcacatactacgctagcacagccaagcatagacgagaccatggcttctataaggaacctgcaatctggtcgcacagcaatactaagattgtgccggatggtatcccggctgattcatggttacaatgatgacctgatcactggagtgcaagctgtaggaagtaaacatcatccggatatgtaggtagtaggcattaacagtgttggttttgtttttgtttttgcatgtaggcttaagatgtttgaatgcataaagcagtccttttcaggtggacgtgcaagcgattttggttactgcaaatccttgtaactgcccgtttattacagcaacaatgcataactggtagcttggtgcgttagagtgatggattacagtcttgcagatatgtcggcactgttgtaaaaaaaaaaaaaaaaaaaaaaaaaaaaaaaaaaaaaaaaaaaaaaaaaaaaaaaaaaaaaaaaaaaaaagcccgttttttaagaatccaaaatttccaaacccgtgcatccccggttttataactctaaaaaaggggcgccccttttggtttccctggttgttgttctcccgcttcctccctgtttactcttttgggggcccccccttattggcctttcggcccctccttttttcccgtgttggg

SEQ ID NO: 43220 - DNA, 285 bp, Zea mays
  unsure (1)..(285): unsure at all n locations
  Clone ID: MRT4577_139424C.1
aagtctacccacgcagacggggcaatcaaaaggacaaggaaccggaaatgtggtgattggtacctccaggagaagcacgagacagaaaggagcataaacactaccatgcttgaagaaagggttgtccggcttcgaaagaagcaacagaagggactctagggttttttatacggggggggtggacctttnacaatttcatgacaaagaaaaaaaagaaaggctgtggattttgcaggaccaagatttttaatttttccaggacgaaaatgtcccaactagcaaaga

SEQ ID NO: 43221 - DNA, 1041 bp, Zea mays
  Clone ID: MRT4577_139425C.1
caaattcggcaccgccggccgggccgggtaaaccttgaagcctcctcgtcctctctctgactctctctcaccctctccctccctcggggtcgcggttgcttcctcgcggcggattcgtatcttccgcggcagcagggagggtacggtactcctccggccggcgggaggagaagaggagcttcgagatgggggcgtccctcgcttccgcgggcttggtgaactacccgcttgtcgcggcgctcctcgcgttcgctctcgcgcagtcctccaagttcttcaccacctggtacaaagaaggtcggtgggatgccagacaacttatagcttctggcgggatgccatcatcccactcagctacagtgacagcactttcagtggctgtgggaatccaagaaggctttcgtagtgcaacatttgcaactgcactagtctttgcatgtgtggttatgcatgatgcttttggagttcggttacatgccggaaagcaggcagaggtgctgaatcaaattgtctatgagctgccagaggaacacccattatcagagacaaagccactgcgtgaaatccttggacatactgttcctcaggtcgtggccggttgcatccttggaatcctcatggctgtcgttatgcttttggctctcgggaggtcttagtcaagtgttgttcaccctatatctcactggtgatggctacaaagcataaaaacatgatctccccatggttctggctgtccaagtgttcgatagtacaaagttctaaccgaatttagatctggactgtaggtttcaggttgtagctcgagttggttgctgtaaatctgaaagggtcacttttaattccaaccacggtgtaatggaagctttgttatacaatcagcagcggtaagatcattttgcggatcagtatggtcgataccatgccgtcgcatttgctttatactcctttaattgaaaactgcgagtcattttggctcttccagacaaattgttattaataaataaataaaagcaatgtatttgaatatacattatatctaga

SEQ ID NO: 43222 - DNA, 427 bp, Zea mays
  Clone ID: MRT4577_139426C.1
cccacgcgttcgcccacgcgtccggtgcaggacggcgacccgaccaagaccatcaaggtgcccgagggcttcgactacgagctctacaaccgcaacgacatcaaccgcatccctggggcccaaggcctgctgcatctccttcaaagactccggctgccgctgcttcggctacatggtcttcaaaaagaattacatctacaccatcgaccacgactgcttcattgccaaggacccattctggccacgatatcaacggctatagagcaccacataaagaacctccttagccccatcccacccgagcttcttcaacaccccgtacaaccccttcccggagggcgcctcacttattatcttggctccccctccccccccccggaagggtgcccacaccccctccctcccacagccccgagggtgatccccc

SEQ ID NO: 43223 - DNA, 125 bp, Zea mays
  Clone ID: MRT4577_139427C.1
attgaaagttgatgcacttatagagacccttgagaacgatgaacagacggttggggctgaacttgtaaggaacccttgagctatccagttagattgcttgcaagaaatgcagacgttaatggcag

SEQ ID NO: 43224 - DNA, 965 bp, Zea mays
  unsure (1)..(965): unsure at all n locations
  Clone ID: MRT4577_139428C.1
ccctcgaggctggccgggaagtaaacccaagcctcctcgtcctctgtcagactaccactctctccctcgcggactcgcggttgattcctcgcggcggattcgcatcttccgcgtcagggacagggagagtactccgtcggacggttggaggagaacagggagaggagctctgagatggagacggccgcctcggcagcgcgcctggtgaactacccgctcgtcgcggcgcttctcgcgttcgccgtcgcgcagtcctccaagttcttcaccacctggtacaaagatggccggtgggatgccagacagtttatagcttctggagggatgccatcatcccactcagctacagtgacagcactcgcagtggctgtggcgatacaagaaggctttcatagtgcaacctttgcaactgcactagtctttgcatgcgtggttatgcatgatgcttttggagttcggttacatgccggaaagcaggcagaggtgctgaatcaaattgtctatgagctaccagaagaacacccattatcagagacaaagccattgcgtgaaatccttggacatactgttcctcaggttgtggccggttgcatccttggaattctcatggctgtcgttatgcacctggctctcgggagttcttagtcaactgttgttcatggatgtcatgacagatgatcacctaatgtctcgctggtgatggctataaagcatgaaggcatgatctccgcatggatctggttgtccaagtgtttggtagtacgaagttctaaccgatttagttctggacagtaggatataggttgtgtagcttgaatcggttactgtaaatctgaaaggttttgctttcaactccaactccaaccacggtgtaatggaagctttgttatacaatcaacagcagtaaattcattctgaggtaacgatcggtatagttgataaanaanaaaaaaaaannnaaannn

SEQ ID NO: 43225 - DNA, 421 bp, Zea mays
  Clone ID: MRT4577_139429C.1
cccacgcgtccgcccacgcgtccgcccacgcgtccgacctggtacaaagaaggtcggtgggatgccagacaacttatagcttctggcgggatgccatcatcccactcagctacagtgacagcactttcagtggctgtgggaatccaagaaggctttcgtagtgcaacatttgcaactgcactagtctttgcatgtgtggttatgcatgatgcttttggagttcggttacatgccggaaagcaggcagaggtgctgaatcaaattgtctatgagctgccagaggaacacccattatcagagacaaagccactgcgtgaaatccttggacatactgttcctcaggttgtggccggttgcatccctggaatacctatggctgtcgttatgcttttgtcttttgggaggtcttagtcaagtgttg

SEQ ID NO: 43226 - DNA, 552 bp, Zea mays
  Clone ID: MRT4577_13942C.1
gcgatcaatgtacacattgcccgtccgcgccaccacatccagcatcgtcgccagcctygckdyyyyygcgcygtcytyytyctccggctccggctccbgccgccccaggcccaggctcatccggaacgcycccstcttcgccgcccccsccaccgtygtgggcatggaccccacygtygagcgctttaagagckggttctwkaagttcaagaccgaggtctatkacaagaagccggagctgttygagcytytyaagtbcggccagagccccaggkacatggtgtkcgcctbcbcccactcccgcgtgtkcccctcggtgacactgggccttcagcccggcgaggcattyaccgtccgcaacawcgcctccatggtcccaccctacgacaagatcaagtacgcyggcaccgggtccgccatcsagtacgccgtgtgcbcccycaaggggsagggcatcgttgtcatcggycacaacygccgccgtggcatcagggcgcycctctccctcaaggacggcgcgccccacaacttccacttcgtggaggacttggt

SEQ ID NO: 43227 - DNA, 535 bp, Zea mays
  Clone ID: MRT4577_139430C.1
tgcatttgggtgctcatctccccagccgagattttccctgcgcccatctccctgctgtgcagctctagctccggcgtccctagtcccagccatggaactcccctagaagctgctcggccgaccactcctactccagccatggtcgcgcctcccgtgctccggctcgccggtgagccagttttccccatctccccaagctcgtcgccatggctgaagctccctggcgtccgacctggaagctggagctcctcctagagtttgtcgatgccttccctatctccagccctcactagtgcgcggtcctctgctcctgcgcgcccctgcttttctccctcgcagtgcatctccatggccgcggtgtccctccctgctcgccgtgtccctgttgcgagctcttccctggcgctggatttctctccctgcgcgcgctccctccctgctcgctcatccctcagcccgtttctctctgctctctcccatggcgtgaagtctcccttggccgccctccctggagttcgccctccttgcgcgccat

SEQ ID NO: 43228 - DNA, 1582 bp, Zea mays
  Clone ID: MRT4577_139431C.1
cacttgcaggttttaccagtagcaggacaggagcacccgttgccgccccccgcgtatcgcacggtcttcccacccaacccaaggaataggatcccaagctctcgatcggcgtccaccatgggtgcctcttggatcacgacatgctccccgtggtccgcgttcgcgacgctggccgccctcacgaccagcgctctggtgctcggctacgtgtccagctccttgctcggccaacaggccgcgtacgagtacgacgacgcgtacagcccggacgccgagccgtccgggccggcggcgccgcctaggcggggggccggatacccgccggtgttcgcgtactacatcacgggcgggcgcggggactgcctccggatgacgcggctgctcaaggccgcgtaccaccccaggaaccggtacctgctgcacctggacgccggggccggcgcctacgagcgcgcgaggctggccaggtacgtccggtcggagcaggtcttcctcgagtacgccaacgtgcacgtcgtcggcaagggggacgcgctcgacggccgcggcccgtccgccgtcgccgcggtgctacgcggcgcggccgtcctgctgagggtcggcgcggagtgggactggctcgtcacgctgagcgccgcggactacccgctcgtgacgcaggacgacctgctctacgccttctcctccgtgccgagggacctcagcttcatcgatcacaggcccgattctgaaacccatcacgtggttgttctcgaccagaatcttctgcagagcacgaacgccgagatctccatcgcgtcggggcaccgggagaagcccgacgcgttcgacctcttccgaggttctccctggccgatactgagccgggcgttcacggagcactgcgtggccgcgccggacaacctgccccggacgctgctcatgtacttcagcaactcgctcgaggccaaggagttctacttccagacggtcatggccaactccccacgcttcaggaacagcactgtcaaccacagcctccgggtcaacgtgccgccgccgccgccgccgcagagcgcgggccagcaggcgcggtacgacgcactggtcggcggcggcgcggccttcgccgggcggttcggagacgacgaggcgctgctgcagaggatagacgaggaggtgctgcggcgcccgctggacggcatcacgccgggcgagtggtgcgcggtgggtggcggcgaggacggcgcgggcgagtgctcggtcgggggcgacatcgatgctgtcaggcagggcgcggcggggaggaagctggcaagcttgatggccggcctcgtgggtactgcgccgtgcggtggatgcaacagctagctaggttaggcgcgccggcagccgatggaggagaatcgaaatctcatacatttgcttgcttattgtggacaagccggctggcagttagattaattctttgtgtttccacatcaatgcccttgtgctattttgtacctaacgaatgaacgattcaacggctgcctacaaaaacaagaagccgtctcgcaccgcgatcaccagcaatacaaatcttgcaccacgattttggctg

SEQ ID NO: 43229 - DNA, 1283 bp, Zea mays
  Clone ID: MRT4577_139432C.1
gccggccgggttcgggaagcaagcaattgtcaaccgactctatcttagctctctttgcaagccagtaggtcaccactcaaaagcttgtgaagctggtgagatgggcaaggaggtggatgtgtccactctggaggccggcggcgttcgtgaccgtgactacgcggaccctccgccggcaccgctgatcgacatcgacgagctcgggaagtggtccctgtaccgcgccgtgatcgccgagttcgtggccacgctgctgttcctgtacatcacggtggccacggtgatcgggtacaagcaccagacggacgcgtcggcgtcggggcccgacgcggcgtgcggcggcgtgggcatcctgggcatcgcgtgggcgttcggcggcatgatcttcatcctcgtctactgcaccgccggcatctcgggcggccacatcaacccggccgtcacgttcggcctcttcctggcgcgcaaggtctccctggtgcgcgcgctgctgtacatggccgcgcagagcctcggcgccgtctgcggcgtcgcgctcgtcaagggcttccagagcgggttctacgtgcgctacggcggcggcgccaatgaggtcagcgccgggtactccaccggcacggggcttgccgccgagatcatcggcaccttcgtgctcgtctacaccgtcttctccgccaccgaccccaagcgcaacgctcgcgactcccacgttccggtgctggcgccgcttccgatcgggttcgctgtgttcatggtgcacctggcgacgatcccgatcactggcactggtatcaacccggcgaggagcctcggcgccgccgtcgtgtacaacaacagcaaagcctggagcgaccagtggatcttctgggtgggcccgttcatcggagcggcgatcgcagcgctataccaccagatcgtcctccgcgccagcgccagggggtacggctccttccggagcaacgcctaggaccatctcgtcggcgggctattcagctcttcctcctccgcagtttaaggtgaacggaggagagcgcgagggggtacggctccttccggagcaacgcctaggctcacctcgcctttgccccccgtccatccacagcagcagtagctttcattcaggtcaagtgttgcagctgccggcaacggtagctagcgcaggcgtttgtgagtttgtgtgcggtgtggaaagcaagtgtgatttggtcagcgtctgtgtgtcctgttgggttgcagtcaatctaacttaataaagatggacgaatgcaagtgattattacggg

SEQ ID NO: 43230 - DNA, 1038 bp, Zea mays
  Clone ID: MRT4577_139433C.1
ccctcgaggcctgccggggatcttcatcctcgtctactgcaccgccggcatctcgggcggccacatcaacccggccgtcacgttcggcctcttcctggcgcgcaaggtctccctggtgcgcgctctgctgtacatggccgcgcagagcctcggtgctatctgcggcgtcgcgctcgtcaagggcttccagagcgggttctacgcgcgctacggcggcggcgccaatgaggtcagcgccgggtactccaccggcacggggctcgccgccgagatcatcggtaccttcgtgctcgtctacaccgtcttctccgccaccgaccccaagcgcaacgctcgcgactcccacgttccgaacttgtgctgtgcattgcctctcgtgttgcattattgatgaaccaaggaaatgctcatcaggtgctggcgccgcttccgatcgggttcgctgtgttcatggtgcacctggcgacgatcccgatcactggcaccggtatcaacccggcgaggagcctcggcgccgccgtcgtgtacaacaacagcaaagcctggagcgaccaggtatttacacacattgtccacgattgcagcactcactcatttgttggttgctaatttgctgttgctgcatgcagtggatcttctgggtgggcccgttcatcggagcggcgatcgcagcgctataccaccagatcgtcctccgcgccagcgccagggggtacggctccttccggagcaacgcctaggaccatctcgtcggcgggctattcagctcttcctcctccgcagtttaaggtgaacggagaaggagagcgcaagggggtacggagcaacgtctaggctcacctcgcctttgcccccgcccattcacagcagcagtagctttcattcaggtcaagtgttgcagctgccggcaacggtagctagcgcaggcgtttgtgagtttgtgtgccgtgtggaaagcaagtgtgacttggtcagcgtctgtgtgtcctggtgggttgcagtcaatctaacttattaaagatggacgaatgccagtga

SEQ ID NO: 43231 - DNA, 1356 bp, Zea mays
  Clone ID: MRT4577_139434C.1
gccggccgggccgggacagcaacgcaagcaagcaattgtcaaccgactctatcttagctctctttgcaagccagtaggtcaccactcaccactcaaaagcttgtgaagcaggtgagatgggcaaggaggtggatgtgtccactctggaggccggcggcgtccgtgaccgtgactacgcggaccctccgccggcaccgctgatcgacatcgacgagctcggcaagtggtccctgtaccgcgccgtgatcgccgagttcgtggccacgctgctgttcctgtacatcacggtggccacggtgatcgggtacaagcaccagacggacgcgtcggcgtcggggcccgacgcggcgtgcggcggcgtgggcatcctgggcatcgcgtgggcgttcggcggcatgatcttcatcctcgtctactgcaccgccggcatctcgggcggccacatcaacccggccgtcacgttcggcctcttcctggcgcgcaaggtctccctggtgcgcgctctgctgtacatggccgcgcagagcctcggcgccatctgcggcgtcgcgctcgtcaagggcttccagagcgggttctacgcgcgctacggcggcggcgccaatgaggtcagcgccgggtactccaccggcacggggctcgccgccgagatcatcggcaccttcgtgctcgtctacaccgtcttctccgccaccgaccccaagcgcaacgctcgcgactcccacgttccggtgctggcgccgcttccgatcgggttcgctgtgttcatggtgcacctggcgacgatcccgatcactggcactggtatcaacccggcgaggagcctcggcgccgccgtcgtgtacaacaacagcaaagcctggagcgaccagtggatcttctgggtgggcccgttcatcggcgcggcgatcgcagcgctataccaccagatcgtcctccgcgccagcgccagggggtacggctccttccggagcaacgcctaggaccatctcgtcggcgggctattcagctcttcctcctccgcagtttaaggtgaacggagaaggagagcgcgagggggtacggagcaacgtctaggctcacctcgcctttgcccccgcccatccacagcagcagtagctttcattcaggtcaagagtgttgcagctgccggcaacggtagctagcgcaggcgtttgtgagtttgtgtgcggtgtggaaagcaagtgtgacttggtcagcgtctgtgtgtcctgttgggttgcagtcaatctaacttaataaagatggacgaatgcaagtgattattaaaaaaaaaaaaaaaaaaaaaaaaaaaaaaaaaaaaaaaaaaaaaaaaaaaaaaaaaaaaaaactcga

SEQ ID NO: 43232 - DNA, 214 bp, Zea mays
  Clone ID: MRT4577_139435C.1
atcaaaggactggcatcatatagtgaaacaacagctcgaaccacaaaaaattgtaatgttcaaatggagtatgtcctagcattgcggaactgaaataatttctctgcgatacccataaagattgggttcgacttttttatctatcatgcaagttctgatggtatggtaataatctctattatgacttcataaatgtataagagcttgcctgtac

SEQ ID NO: 43233 - DNA, 474 bp, Zea mays
  unsure (1)..(474): unsure at all n locations
  Clone ID: MRT4577_139436C.1
caacaacagcnggcnggcanccaacccacnggcnngnggcaaacgnagcnngcanaccaacaacaacaacagngngcaacagnnngcggccagcgcnncagncaacnagccagggnngaacccnnagcgccnnaccnacaacagcaacaacgggggggcaacgagcccgcncgcgaggggcaaggcaccnacanaccggcaacaacagnnngnggcaacaacagnngcngcaacaaangggaccagcncnaacncagcnagcgggggcaaacccggcngccnacnngcaacaacnacnnccanncaaccaacggacggggncgaacgggggggcgnaccnacaacagcgacaacagnnacnnaanccacnagcgggggcgaacccagnggncgcngccnnccnacagcagcaacaagggcngccanacaaccagnncncnnnngangaacccngccnngncgnggcagcaaccc

SEQ ID NO: 43234 - DNA, 440 bp, Zea mays
  unsure (1)..(440): unsure at all n locations
  Clone ID: MRT4577_139437C.1
cccacgcgtccgggcctggccacaattgcaagcgccgtccgttgccccctggggtgtcggatacggtccccagggcaccggatccagcggcccaggctggcaccgctgccgccgtcatggatgtggaggaagaagcaagatgaaggagctctcccgctatctccttgcctaagccctaagcatgggcattggccgtcgctgctgccgcccaagcagacgaccccgctgagccccacgcagatgacgcgagagcacgacccgtcgcccccctaccgcctgcaccacataaacacgaggaagagccccgtcgtcatcccggctagctgcatggccatgccgacggcctncaacagcagcatgccagcatggtgggagcaaactcagggctcaaggccgtgtatttatgctacgcataaaaaggtttgctatgtttcattttg

SEQ ID NO: 43235 - DNA, 368 bp, Zea mays
  Clone ID: MRT4577_139438C.1
agagttggtagacactctcaaattataatatccacccccgattttaatataataggacatataaccaattatttgcttataagaaaaatcttaactcaaaactctttataacttaatatttaaaaactttgagaaatcattacatttaacatttcctcagacaaatataaactctaaaataagggctaaacaattatatatggtggtgtgtgttcactacccacgagtccctgattcaagtcactcagatctggcgacttcaacacgatgaaaagatacgacttgtgtcacatataactggatcccccaccttgaccatccttcctttcacattttttgacaaagattccttccagactcgattttcc

SEQ ID NO: 43236 - DNA, 1575 bp, Zea mays
  Clone ID: MRT4577_139439C.1
gcagaagacgcaagactcgcggataacggaggactccgcgatggcgatgatcgagcgggagaaggctcgggcgaaggcggccatggaggcggcggaggcgtcgcagcggatcgcggagatggaggtccagaagcggatcagcgcggagaagaagctgctcaaggaggccgaggagcgcaagaaccgcggcggcagcggcatgtcccacgaggcccggtaccggcgctacagcatcgaggagatcgagcaggcgacggacaacttcaacgacgcgcgcaaggtgggcgagggcgggtacggccccgtgtacaagggcttcctcgaccacacgcaggtggccatcaaggtgctccggcccgacgcggcgcagggccggtcgcagttccagcaggaggtggaggtgctgagctgcatccggcaccccaacatggtgctcctcctcggcgcgtgcccggagtacggctgcctcgtgtacgagtacatggccagcggcagcctggacgactgcctgttccgcgctccggcggcgccggcgggcccgtcatcgcgtgggcccagcggttccggatcgcggcggagatcgcgacggcgctgctgttcctgcaccaaacgaagccggagccgctggtgcaccgggacctgaagccggggaacatcctgctggaccgcaactacgtgagcaagatcagcgacgtcgggctggcacgcctggtgccgccgtcggtggcggacaacgtgacgcagtaccggctgacggcgaccgcggggaccttctgctacatcgacccggagtaccagcagacgggcatgctcggcgtcaagtccgacgtctactccttcggcgtcatgctgctgcagatcatcacggcgaagccgcccatggggctgtcgcaccacgtcggccgcgccctggagcgcggcgagctgcaggacatgctggaccccgccgtgcccgactggcccctggaggaggcgcagtgcctcgccgaaatggcgctccggtgctgcgagctgcgccgcaaggaccggccggacctcggcgccgtcgtgctcccggagctcaaccggctgcgcgcgctcggcgaggacaacatgcagtactgcggcgccatcatcagggggggcggcggcggcggcggcggcatgcacagctcgtcgccgttccacagcaacatctcacggtcacacgccgagatgatgatcgattcccagtacccaagatcagtgttcagctcaagagcgggcgattcgcccatgccgccgagaaggtcgaacgcttgacgggcatgaaatggacttttatttccagcatcggtgacggggtggtggtgatgtcttgtgcaggtgcataagctgcctagcatgagggggagctagagcaggtgttgtttctagcatgagtttggtgcagaattttattacacgaggtacgagctatgtattagtaaatacagaaccgtatggctctgccattgccgtgtacctgttcttgtaacctgtggagcttcctctgttgtgtaatggatttttttcagttttgtgaaacagaactgttggattaggggcacctcgtgc

SEQ ID NO: 43237 - DNA, 350 bp, Zea mays
  unsure (1)..(350): unsure at all n locations
  Clone ID: MRT4577_13943C.1
catattcttaccaacgcacccaaaaaaaaacgaggcaaaaaacaaattgtccggggcatcccccaaaaannaaaaaaaaaggagagagaacacacacacacaaaccccaatcccctgcggcggcgatagacccgtcatcgccggcctccggcggcaactccctcccgtccgtccaccccgacgggcagaaacggcgcgtgaactacttctacaacccagatgtggacaactactactacggacagggccatccgatgaaaccgcaccgcgtgcggatgacacactacactctggcacgctacaacctcctcaaccagatgcaagtgtaccgacccaacccgccccgcaac

SEQ ID NO: 43238 - DNA, 466 bp, Zea mays
  Clone ID: MRT4577_139440C.1
ggggcgggaaccagggagtataaaaaaaggttataaaaaaaggtaaaaaggaaaaaccaaaccggcctttgggagggggaaacaaaacaaacacgagggggaaacaaaaaacaaaaaaagggaaaagccggaagctttgcttttcttcaagaggtcaaaagaaccaaacaactagatcccggggagggggcccaaaaccaagggggggacctcgaaaggaaacccccccctttaccccctccaaccaaaaaagaagttggcccccccggggggggggaaagggccccaaaaaaagaccccttcctgttggcccacggggtctggaaaagaaaacacctcacccgccccttattccgtccaaaaccgaaaaacccttggtttgtaacccgaaaaccgggccaacctggggctctaaggaagtcctgaaaaaaacccaaacacctttatggaagggaaagagcccccc

SEQ ID NO: 43239 - DNA, 428 bp, Zea mays
  Clone ID: MRT4577_139441C.1
tgatgtacagtgcgcacatgatgtgcactgggtacaaatggctactgcatgagctgcaagatcgttacgatctggtgctcggacatgcatgtgccggtgctgctgctggttaccagtatagctcattggggcagcaaacctcgacttctggtggctcaatactctctgactatactgctgctctattacctgcccagtgcacttatgagatactatgtcgtgcaccaccatgaagatgacggaggtgctcgcgcgctctggatgctgcagatgcagctgcaacaggcacagggtgaagcgaaaaacgattcgcagatcagggtcatatagaaccgaaacaagcagtactagtgtctcgtggcctgcattatgtatgccagcaagtgatcttgtcagatgcgtactgaacttctcatgtcattaccagg

SEQ ID NO: 43240 - DNA, 289 bp, Zea mays
  unsure (1)..(289): unsure at all n locations
  Clone ID: MRT4577_139442C.1
ccctgggttgctcggatcagggcggacacaactctggggttgatgggatgggacgttgtgttgtaaccatgccnnctctccaaaaacagaagaagatgcccctctccatcttcatccccaacactcatgtagaacgcgggggcagactgttccttgcggatagggnaccctgtatgactgctacaagggtggaattcgcgtccttaaggcaccccaagggaagcttcataaacaactactcctgggagggttcaacttgctccaccagcacccgaccccctttacacct

SEQ ID NO: 43241 - DNA, 745 bp, Zea mays
  Clone ID: MRT4577_139443C.1
ctcgaggccggccgggatccagacaggcgggcatcatccaacacactcagagtccagagttccctcccaccaaccccacggcgtaagcggcgccatgaactggaagaaatctcctcccgctgtctccgacggcgcccccgacgacgccgacgacggtcgcctccgcgagctcgggtacaagcaggagctcaagcgccacctctcgtacgacaccgcctcccccccatcgtatcgtatcatatcatgtcgccagctcgagctttgctcttccactgcatctttcgcgcagggtgctgtccaacttctccatctccttcaccgtcatctccgtgctgacgggggtcacgacgctctacaacaccggcctggccttcggcgggcccgccaccatgacgctcggctggttcgtcgcgggcgccttcaccatggccgtcggcctctccatggccgagatctgctccgcctacccgacctccggcgggctctactactggagcgcgcgcctctccggcagacgctgggcgcccttcgcctcctggatcacaggatggttcaacattgtggcacaggcaagcagagcgtccctttcctgaagctccttcattccctccctatcaatcaatcttcagtaccctcaggcagccactcgatccaacccccacctagctccctttcccatctttgcagtgggtaggcaccgccaggatcgacttctccctggcacagctgatccaggtgatcgtcc

SEQ ID NO: 43242 - DNA, 346 bp, Zea mays
  unsure (1)..(346): unsure at all n locations
  Clone ID: MRT4577_139444C.1
gggacacagaacaaggctgaaaccatacctcaagctgtacaatgataattcangaaccgtangagggtgcggggctaaaacaaatggcttcgggaacgcgagcaaaaactcaaaccatgcccagacttagaaagaacgtggctacccgggtggtctgggaagtgatatttatttttagggtacacaatccacacccattcatgataggcagggggaaacaacccctttactagggctcggacacggggcggatcaagtcgacaacgcggttgatgaaaccccactcgccgaaataccacgagacgagcttgacaaactcgcccctcaaagcgagcccggtcttggc

SEQ ID NO: 43243 - DNA, 442 bp, Zea mays
  unsure (1)..(442): unsure at all n locations
  Clone ID: MRT4577_139445C.1
attcggctcgagaacaaacagcttttcagataatcagatctgttgtctgttgatgataaccaaattggtaaatttgctcagctgtttcgttcgatcgtatcttcctttccatcatcgtaggcatacgtactgtggatggcatgattagcgccatcagtggcatcatggaggacgtcgtcaggatcgggagcttcgacttggacgccgtcagcggcgcgtacccgacgacgctgcccagcccgaggatggtcgccgcaggacgagagctccagctcatccactcgccacgccagccgtcgtcggggttcagggagagccttaacccgatctacaccgaccacgacaccacgacgacgaccacgacgacggcaaccacggattcgtaccggtggccgtcgcngcaaaccacgctgcgacngcggcagcggcagcggcacgggcc

SEQ ID NO: 43244 - DNA, 640 bp, Zea mays
  Clone ID: MRT4577_139446C.1
ctctcccctcactgcgccgcctgcccccgccgcacacctacagcgcgccccttcccccccgtggatctcgcccatacgccagcggatctcgcactccttccttcgacggcgcggtggcgaggaggtcagcgacggcggcgtcgagtcgaggtcgggcacgaaggcgcggaggccgtgggagcggtcgtggcctacgcacgcacgacgccgctcccccagttcaaaccgaggtcagcgacgacgcacgcacgcaccaccccttcccccttcgtcttccattcccagctggaggtgcgatagccatgtctggacctccgtcgccgccatagaagtgccttgtcattgatgaagccgatcgcatacttgagcaaaactttgaggcagactgttcttttttctgctacacagactctagatgttgaaaaaattgctaaactgtcatttgagaaaaatgaagtaaaaaaagcctgattatgttggagttgatgatgataagtcaaaggctactgttgaaggcctgcagcagggttattgtgtcatttctagcgataaaaggttcttggttctgtatgctttcctaagaaagagaagataatggtgttcttctcatcatgtaattcagtaaagttccacgttgaac

SEQ ID NO: 43245 - DNA, 668 bp, Zea mays
  Clone ID: MRT4577_139447C.1
aaagatgtttcagctcccatattctttcccctacctctgcagcatctaccgcctccgttcacctgcgctctgcttctctcctctcttgccatgccgattatcaatatcgatatcctctgctctttaactatcgaaaggatccaggccagggacaccctgcgcaatcaggatgtgcagctccacgacggccacgacccctacatcaccaggtgttacttgacctacctggtcgaggactacacacgtgcatcgacgatggaaagactgccaagtcaccctcaaggactcccacagtcttctcctctgccagaatccagtatcctgctgttgaatcacgtaacctgagcagataccctgcacggaagatcgagatgaccatgtcgtgcagtccacacgtcgacttcactgaccaggacaacgatgatgtctctcctgattgctggtgccaagaacgtcgctatctctgcccgacatgaacatgctcccttgcctgctgctcccgacaatgagcacaagtacacctcccatggttgcattgtgttgaatgctactatgcaccatgaattgccttgccgcccttgctcaggatgctgatgaatactctggcgtcagtgaaggcttgatgacgactgttcatgccgtcactgccacccacatgtactgctgat

SEQ ID NO: 43246 - DNA, 411 bp, Zea mays
  Clone ID: MRT4577_139448C.1
attcggctcgagcctaaccctacctttcttcatccgccaccgaccgccccaatggcgaagccgatgaagtacgacgatgaggaggagatctcgtcctccgccgaggaggaggaccagtccgacgccgccgggttcgtatctggcgaggaaggggatgacgaccacgaggatgctgtggcgccgcccgcggaggaagctgagggcgaggggcaccaggaggaggaggtcgacgaggaagagatcgaagccgtcactaccggcgctggagctgaggacgaggaggacgccggtgccgttaccggcgctgaaggcgacgaccagtcccagtccacctaggaccacgagcccgtcgcgagggacaaggacgatgacgaccagactgatgcagtggctgggaagccagagaaagca

SEQ ID NO: 43247 - DNA, 377 bp, Zea mays
  unsure (1)..(377): unsure at all n locations
  Clone ID: MRT4577_139449C.1
aaaaaaaactaaatacaaaaaaaacaaaagatgacatacaaacaaaagtgggtggtgatccttgagttgccgggttagcaacccatcgttggaggtgccatctttttttttttttttgcctagtactagttgggggggcggtgataaccaccgggggggcggagaaacccgggggggacccaaagagaaacanctggatgaaaataaattttttttttttttttttgttggtgtagaggacccaagnggacggacgcgnccaagggacggccaagcgggggggnagggggaccgcgcccggaggcgcggcacgaggcccgacggcggggggcgtgacaaaaccgtggcgctgcccacttgaaacgcctttagcacca

SEQ ID NO: 43248 - DNA, 334 bp, Zea mays
  Clone ID: MRT4577_13944C.1
aagctcggaattcggctcgaggcacaccccacagctcagtgtgagcagaagccccgagggccgacacctctgcgactcacagatgcccccgacccggaggcagacgctacaaaggaggagagggagacggcgcacaagcggggtgacactgctgacgacaatacagaagcccgtgaacaggccagccagaaccgacccacaagggctaaaggcctacaaaccggccacgacagagacataagctcgcgcacaggggaagaacaagaatctggagcttcatagaggaggcggcatgcaggacggaccccagactacaggcaaactcgctttacca

SEQ ID NO: 43249 - DNA, 2009 bp, Zea mays
  Clone ID: MRT4577_139450C.1
aaaccctacccgactccgccgccgctcccgctccgccccagcgcatcgcccgccgccacagcgtaccgcgacctcatctatcaccttcagctttcatcatggcggacgtcgatgtcgaaccggaggttgccgccggagctcccaagaagaggacgttccgcaagtacagctaccgcggcgtcgacctagatgcgcttctcgacatgtccactgacgacctcgcccagctcttccccgcgcgcgccaggagaaggttccagaggggtctgaagaggaagcccatggcgctcatcaagaaactgcgcaaggcgaaaaaggatgctcctgctggtgagaagcctgagccagtcaagacacatctccgtaacatgatcattgtccctgagatgattggaagcattgttggtgtctacaacggcaagaccttcaaccaggttgagatcaagcctgagatgatcggccactaccttgctgagttctccatctcctacaagccggtcaagcacggcaggcccggtatcggtgccacccactcctcgcggtttattcctctgaaatgagctggtactcggctctttagtatcccaagacattttgtgttgttccattccagctcaagaattcaaagctaagcattgcacaattatgctgttttgttggaagtatccgactccgccgagggggaatctccgtggtctggtctgagacaacctcaggcttcccacccacggtttcccacactcgccgtcccccgcttcccaccacccatttcatccccccagcaaatccaaccccacccctctcactctcgtctcctgttcgccagagccacctcgctccagaagctttcctcccctagatctccctcccgtgcccggtcgcgctgccgacccggccatggcgaccaaggggaagctcggggagctagtgtgggagcaccgggtgcaggcggccgcagcggtggctttcgtggccgcggccgccgtctcgatctccgccgtcgggcccaggctcggcgccgtggtgtcattcttctggccgctgctcgtctccacgggcctcttcctggtggcggtcgccgtgctgctccggatctcgccgccgcccgcgggcgacgacgacgagtccggcaaggagctcatcgacttcgtcgccgggtgccgcccggagcacctcgtcccggatgcggcgccgccggcggccgtagcccccgtggaggctccgcccgagctgcagatctaacgggctgccggaggaggaggctgacagcagcgtagctgtgctgctgctgcgtggcatggcgtgctccgtccccgggtgaacttcctccagtggcacgggtgggggcaaccgttgcgggcccacctgtaagtgtcaggccggcgcgccgccgtggctcggtagcctaggacttctccatgtcttgctctgctccggtgtaagataccgtggattttaataatgaatcatggcataaaataaaaggctgtgcctcgccggagcgatctgtgtctttcgctgtcgttgtcaggttggctgtggcttgtgacgctaatctcaagtaaagtgggggtttatactgacatgacatggcgccgacgaacagatgatgagaggtcgtaaggcttgacgatccagggttttgcagtttgcattgctgctccacgacgacgcgcagctggagatcaatccgacagttgcaatcctccccggttacagatcttcagagctccgcagtcagcatcactgatgaccacgagctgcagatctaacgggctgacggaggaggaggctgacagcagcctagctgtgctgtgtgctgctgcgtggcatggcgtgctccgtccccgggtgaacttcctccagtggcacgggtgggggcaaccgttgcgggcccacctgtaagtgtcaggccggcgcgccgccgtggctcggtagcctaggacttctccatgtcttgctctgctccggtgtaagataccgtggattttaataatgaatcatggcat

SEQ ID NO: 43250 - DNA, 334 bp, Zea mays
  Clone ID: MRT4577_139451C.1
ctcgttctagaaaaactaacgtaataaatcagtggtgtcaagtcaactgttgacctgtgaccgaatgaaaagagtttttcatcaaaaaaaaaaaaaaaaaaaaaaaaaaaaaaaaaaaaaaaaaaaaaaaaataaaaaaataataaaaaaaaattaaaaaaaaaaaataaataaataaaaattgtaaattaaaatataaaaataaaaggcctggaagttctataagggaatttcaacgcgcaatataaatcttttccatccccagagggttttcaatttttcctaatgtgggggttttttaagtctttgctataaaattaaataaatatggttt

SEQ ID NO: 43251 - DNA, 202 bp, Zea mays
  Clone ID: MRT4577_139452C.1
ggctcataagaaagccgggtttcaccgagaatgccgaccccacccacggggaaggacaggggatggcccaaacgggaaagaaagaaaatgtgagcatacaaagccgaaagtattgcaacaagaaaaacgaatactcgggcccgaagacaataaaagaggcgacgtaaaaataaaaaaagaaggccggggggagccaaacaaa

SEQ ID NO: 43252 - DNA, 251 bp, Zea mays
  Clone ID: MRT4577_139453C.1
atcaaacattcttataagcttgagaatgttcatttcaatatcacataaatggggtctggggacattatctggttgtgaatgtgactacatgatttacaggtccagaaccattaaatcttacaaggtcacaacgataatatagactcttgactatatcaatagccaatgaagcctttatacaaacactagatgtatcatataagaatattacaatatacttatacttagaactactccttttgtacaaatta

SEQ ID NO: 43253 - DNA, 736 bp, Zea mays
  Clone ID: MRT4577_139454C.1
ggtaccctcgaggctctggccgggtttgggtatgtaaccttctgatgtttacacctacttacataagaacagaatgatagatttgatattatgttatagatgacctaaaatacatactggttttacttaattaagaaccaaattctttgttgtttcacagtaaataatgatgaacactcctactcatacacttattttctgtgaacatgaaagcattgtctaaacagtccttttctgtatccactgaacttacaatatgttgttatgctcaatatttttttcaagatgatgccctttttcatagttaaatgtttaaattcagaaacacatgaattttacaagcattctgagttgcacgtggcccttttcctgagctctttaagaactacaacatcaacaagagctggcagaactaagatgactgttcctgtcgctccttcatttgtgtgtgctaaccgtgctgacaagaggaaggagttctacacaaaattagaggagaaacataaagctttggaagcagagaaggacgaggctgaggccaggaaaaaggaagagcaagacgttgctttaaaacaactaaggaagtcattggtgattagagcgaaacccatgccaagcttctatcaagaagggcccccaccaaaggctgaactgaagaaggtgcctcctacccgtgccaaatcgccaaagtttacaagctcaaggagaaagagctgcagtgatacaccattgacac

SEQ ID NO: 43254 - DNA, 940 bp, Zea mays
  Clone ID: MRT4577_139455C.1
cattgggtacctcgaggccgggccgggctaaaccctacccgactccgccgccgctcccgctccgccccagcgcatcgcccgccgccacagcgtaccgcgacctcatctatcacgcttcagctttcaatcatggcggacgtcgatgtcgaaccggaggttgccgccggagctcccaagaagaggacgttccgcaagtacagctaccgcggcgtcgacctagatgcgcttctcgacatgtccactgacgacctcgtccagctcttccccgcgcgcgccaggagaaggttccagaggggtctgaagaggaagcccatggcgctcatcaagaaactgcgcaaggcgaaaaaggatgctcctgctggtgagaagcctgagccagtcaagacacatctccgtaacatgatcattgtccctgagatgattggaagcattgttggtgtctacaacggcaagaccttcaaccaggttgagatcaagcctgagatgatcggccactaccttgctgagttctccatctcctacaagccggtcaagcacggcaggcccggtatcggtgccacccactcctcgcggtttattcctctgaaatgagctggtactcggctctttagtatcccaagacattttgtgttgttccattccagctcaagaattcaaagctaagcattgcacaattatgctgttttgttggaagtatttgagttaatcatatctaagctgagttgctacgttcttgtttttccccttgattttgggtttattcctgaaagtttgaagaatatccttacaattttggggtgccgcgtgtggcttgattgaaatgtgacggtgccaatttattgggtggccccgttatcatgaaaaagctgctccgagctaatatcgtcgggattttattaaaaaaaaaaaaaaaaaaaaaaaaaaaaaaaaaaaaaaaaaa

SEQ ID NO: 43255 - DNA, 764 bp, Zea mays
  Clone ID: MRT4577_139456C.1
aaaaaaactcgccgagctctcgtatttccctgtccccaatacgtattcccctccttcccctttcgctttaccttccgacagccggccgtgggcagcggagagatccagtgaaccagctagcgctcccctcgatctcgttctgttcccgtcgctgcaggctgcagccgtccgtcggcgtgaaggaggggcacggtaagcgagttggcttcaagattttgcccgctgcttgtctcatcagagcggtggcgccgctcccgtccgggatgtcggccctctcctactgcaagacagcctccgcctccttgttcgttttcgcgtcaaagatcgaggcttggagttgcctgtgatggggacggtgatggtggagctcgggcggggataattgaggtgttgacagtggagatggcggcggcggcggctgggcgtcagccgcggcgagcgagaagggtgtcccccatccagcggctcttccaggcgtgtggcgtcgtctccggaacccctgcaccgttcccgtgcctgccgaggacgaggccagaagaggttcaatgaagtgaacaaattactccttacttggtttgcatgcaaagtcatatgattgggttgatattcatctaggtgacagtggcgcttcattactgcagcgatcaactactgggttgcttgtcagcagggaaaaacaaccaattcaacaagaagggcgggaacaacgaaaagagatcaagaggaatatgagtcagatttcttacttttgatccttcagatcc

SEQ ID NO: 43256 - DNA, 834 bp, Zea mays
  Clone ID: MRT4577_139457C.1
cccatgcgtccgcccacgcgccagataaaaaatttgcatttgggtggagcccaagtcttccacagcctcttccacggttcaaaagtaatcgaacccaagaaaaaagccttataacatgatttagaagagaactgtccagaggaagaatgaattctgagttgcatgtggcccttttcctgagctctgtaaagaactacaacatcaacaagagctggcagaactaagatgactgttcccgtcgctccttcatttgtgtgtgctaaccgtgctgacaagaggaaggaggtgtatatagttttcttgcattatttctagatggttgcttaattcattctgattattcacaactagcaagcagccaagcacttttgttccaaaaagggtttggtagtgacagtgttgttattacccagttctacacaaaattagaggagaaacataaagctttggaagcagagaaggacgaggctgaggccaggaaaaaggatgagcaagacgttgctttaaaacaactaaggaagtcattggtgattagagcgaaacccatgccaagcttctatcaagaagggcccccaccaaaggctgaactgaagaaggtgcctcctacccgtgccaaatcgccaaagtttacaagttcaagggagaaggagctgcagtgatacaccattgacacctggcggggaaaataccaacgcaacatctacccggccacatcgtcacagcatcgggagtcctagagacgctaacagagtacaacaatgctcgccaaagagcggtgtggcaacccaaaacagatttgtcaaggctgagctgaaggccctctgaagagcatgg

SEQ ID NO: 43257 - DNA, 1372 bp, Zea mays
  Clone ID: MRT4577_139458C.1
ttgacccggtcttcggaatcggtggatctcgacgatggtgacaaggaggaggccacgaagcgtcgtcgagcagagcgcgacaagcaaatctagtcagccacgagcgtggatttgaatctgacccccaagtttttgtatggatcctattccccaatttgtacatcttcaatttccttactttaattttccataacacaaacgatgtttgcatgcacgattcggacaatcttgacttgttcgtccacggctggagtttacgcttcgcaatgtgtaaaacacgtgataaactgtgtacaactcgagaactagataattcattttggattgtaatatgtgtacctcatgctatagtttctggttaaatctgacatgaatctgtttggaattgaacaacgatgaacagagaaagcgacgaatacaaagaaaggccctacccgagtccgccgccgctccgcctcagcgcatcgccctccgccacagcgtaccgcgacctcatcgatcaccttcaactttcaatcatggcggacgtcgatgtcgaaccggaggttgccgccggcgctcccaagaagaggacgttccgcaagtacagctaccgcggcgtcgacctagatgcgcttctcgacatgtccacggacgacctcgtccagctcttccccgcgcgcgccaggagaaggttccagaggggtctgaagaggaagcccatggcactcatcaagaagctgcgcaaggcgaaaaaggatgctcctgctggtgagaagccagagccagtcaagacacatctccgtaacatgatcattgtccctgagatgattgggagcattgttggggtctacaacggcaagacattcaaccaggttgagatcaagcctgagatgatcggccactaccttgctgagttctccatctcctataagccggtcaagcatggcaggcccggtatcggtgccacccactcctcgcggtttattcctctgaaatgagctgttacccgtctctgtagtctcccaagagtccgttggcaatgtccattcagcttttctacttgttttgaacaagttaaatgccccaagacattttgtgttgttccattccagctcaagaattcaaagctaagcattgcacaattatgctgttttgttggaagtatttgagttaatcatacctaagctgagttgcaacgttcttgtttttttccttgattttggattgtttattcctgaaagtttaaagaacatccttacaattttgtggtgccgcgtgtggctttgaaatatgacggtgccaatttattgggtggccccgttaacattgtatcttgaccagatgtagccttgtggcaagcacttgacactaaaaaaaaaaaaaaaaaaaa

SEQ ID NO: 43258 - DNA, 327 bp, Zea mays
  unsure (1)..(327): unsure at all n locations
  Clone ID: MRT4577_13945C.1
gccgactaccaaccgcatgcgccatgcagccggggcggacctcgccgccgcacgaatgcccctcgccgccgcacgagctgacgccacaggaggagcccgcgaccctgcccctgcccggcgcggaggcccagccccagggccaggctgacgacggcgacgcggtcaaagcggcggcgggagcccgggaggaccggaacgacaggagcggcgccaccgcatccgcccgggggaggaagaggcggaagcacgganctacctaatccaaactcgcccgtgacgcggggggtcagcttcctccgggccagctacacgagccccacggccacc

SEQ ID NO: 43259 - DNA, 2842 bp, Zea mays
  Clone ID: MRT4577_139460C.1
cctcgaggccggccgggtccgccaattcggcacgagggagagaagagagtccactgtccaccccaccccaccagaaaaacgcattccgcagacgcgcggcgagggagtaggaggggacggcgggtgccgaggcccgcaggcacggggaagctacctgcttgcgtagccgggcgggctcgcgctgtgctgtcgctccatgtcggtcgccggcgagagcggcggggatccggcggcggcacgccgccggtgggatctctccaacaagggccccgacagcactccaatgttgaaagaggctgtggaaatgtctacagatgaagaatcggatggcgttgttatatgccatccgaatggtaacactgatggatgtgacgaagccattagtggcagtcatgatgatgatagcccagaaggccaggaaactagttccatcaaggaccctgatgtagaaggtgacacacaggaagacaagtgtgtaaatcaagattcactgaagttgattgatcaagagacgtctgctccccccaagtccccagcgaagtccgcgactgcgagttctggaccagagaagcctaaacgtgttgtcacccaaccattgtctctttctactcaacgaaggtcatctggagtaaatggtggtgtgaccaatccatcacccaataaggataaatctggtgataaaagtagcatctctccagcaagcatgacaaagaagtgtacgccgttggcacgagggctgtttcataggctcatagctatgcacctaatattgtaactttggtatataaccttctgatgtttcacacctacttacataagaacagaatgatagatttgaatattcatgtttcttagatgaccttaaaatcacatactggttttacttaattaagaaccaaattttttgttatttcacagtaaataatgatgaacactcctactcatacacttattttctgtgaacatgaaagcattgtctaaacagtccttttctgtatccactgaacttacaatattttgttatgctcaatattttttcaagatgatgccctttttcatagttatgtttaaattcagaaacacatgaattttacaagcattctgagttgcatgtggcccttttcctgagctatgtaaagaactacaacatcaacaagagctggcagaactaagatgactgttcccgtcgctccttcatttgtgtgtgctaaccgtgctgacaagaggaaggaggtgtatatagttttcttgcattatttctagatggttgcttaattcattctgattattcacaactagcaagcagccaagcacttttgttccaaaaaaggttaggtagtgacagtgttgttattacccagttctacacaaaattagaggagaaacataaagctttggaagcagagaaggacgaggctgaggccaggaaaaaggtaggaagaacttacttctgaattctgatatctctcttggaagcaaccaactgtaggtaaggtcacttgagttttctatattcttcttttgatcgattttgtaaatgtacctttgaaaataatagcaataagggcagtattcaaattgagttgtttctgggaccactcaactactaagtgagctttatctcaccatttataaaatttatggaaaattcaaggttcttgctcaacacatgatacttcattctgttttacttacacaccagtcttatttcttccttttccttgttcttttccaatttccctttatatgtaactgttgaggtttcaaatgcttttcagtcaagcaattggaatacaggatctattaaatttcacatattttatcattatagtttcatcacatgtacacatgttttataatcttcctgtccgctgttgtaatcattttctgtctttcaatctgaaatatcgatgattttctaaaatgaaatccaagctgtacgcaagcaatgtcagcacatagacttggttgttgtgattatctaatcaatgatgtgttcatttaggtacggctgattgaatgacatctactatcatatgcatatttaatgtcgtgttaagttaaatattgttatttgatgccattggccatcatattctttttcatactaattctacaatagtctgattgactgtgtctacctgtgcttttcctttagtaagtgcttgtgattgtttctttttcttcgagtcctgtctatatggaaagcactattacttatctgtcattaactaatcttataatgttcattatttgggtaggatgagcaagacgttgctttaaaacaactaaggaagtcattggtgattagagcgaaacccatgccaagcttctatcaagaagggcccccaccaaaggctgaactgaagaaggtgcctcctacccgtgccaaatcgccaaagtttacaagttcaaggagaaggagctgcagtgatacaccattgacacctggcggggaaaataccaacgcaacatctacccggccacatcgtcacagcatcgggagtcctagagacgctaacagagtacaacaatgctcgccaaagagcggtgtggcaaccaaaacaagatctgtcaaggctgagctgaaggccctctgaagagcatggagcagccgagtgatgtgtttctctgtacaaaccgaattgtctaaccgtttccatttccatgcatttttgcttctattttatacccaacatctccagcaaaagaaggctgtagggccaatgacgttgtttagcgccgctggaccttatccattttcttacattcgccttgtactctgtttggttatcaatgtttacttgctatttaagttttgtttgatcgtcaactttttctc

SEQ ID NO: 43260 - DNA, 891 bp, Zea mays
  Clone ID: MRT4577_139461C.1
gccgccgctccgcctcagcgcatcgcccgccgcgacctcatcgatcaccttcagctttcaatcatggtgagttccccgccaaaactgtatccacctccaagatccacggcgtccttctgactcgcacatgtactaatttgttttgcgcaggcggacgtcgatgtcgaaccggaggttgccgccggagctcccaagaagaggacgttccgcaagtacagctaccgcggcgtcgacctagatgcgcttctcgacatgtccacggacgaccttgtccagcttttccccgcgcgcgccaggagaaggttccagaggggtctgaagaggaagcccatggcgctcatcaagaagctgcgcaaggcgaaaaaggatgctcctgctggtgagaagcccgagccagtcaagacacatctccgtaacatgatcattgtccctgagatgattggaagcattgttggggtctacaacggcaagaccttcaaccaggttgagatcaagcctgagatgatcggccactaccttgctgagttttccatctcctacaagccggtcaagcacggcaggcccggtatcggtgccacccactcctctcgttttattcctctgaaatgagctgttacccggctttgtagtctcccaagagttcggtggcgatgttcattcagcttttctacttgttttgaacaagttaaatgcccaagacattttgttctgttccattccagctcaagaattcaaagctaagcattgcacacttatgctgttttgttggaagtatttgagttaatcatatctaagctgagttgctacgttgttttaacccttgatttgggttgtttattcctgaaagtttgaagaatatccttagaaaaaaaaaaaaaaaaaaggccccta

SEQ ID NO: 43261 - DNA, 855 bp, Zea mays
  Clone ID: MRT4577_139462C.1
cattgggaccctcgaggccggccgggctaaaccctacccgactccgccgccgcccgccgctccgcctcagcgcatagcccgccgcgacctcatcgatcaccttcaactttcaatcatggcggacgtcgatgtcgaaccggaggttgccgccggagctcccaagaagaggacgttccgcaagtacagctaccgcggcgtcgacctagatgcgcttctcgacatgtccacggacgacctcgtccagctcttccccgcgcgcgccaggagaaggttccagaggggtctgaagaggaagcccatggcgctcatcaagaagctgcgcaaggcgaaaaaagatgctcctgctggtgagaaaccagagccagtcaagacacatctccgtaacatgatcattgtccctgagatgattggaagcattgttggtgtctacaacggcaagaccttcaaccaggttgagatcaagcctgagatgatcggccactaccttgctgagttctccatctcctataagccggtcaagcatggcaggcccggtatcggtgccacccactcctcgcggtttattcctctgaaatgagctgttacccggctctgtagtctcccaagagtcagttggcaatgttcgttcagcttttctacttgttttgaacaagttaaatgcccaagatattttgttttgttccattccagctcaagaattcaaagctaagcattgcacaattatgctgttttgttggaagtttttgagttaatcatatctaagctgagttgctattttgggttgtttattcctgaaagtttgaagaatatacttacaattttggggtgccgcctgccgcgtgtggcttgattgaa

SEQ ID NO: 43262 - DNA, 306 bp, Zea mays
  Clone ID: MRT4577_139463C.1
ggcgagaagaatgttttcatctttgaccttggtggtggcacgtttgatgtgtccctcctcaccatcgaggacgacatcttctaggtgaaggccaccgcgggtgatactcacacctggagttatgactacatctatcgaatggtgaactccggtgaccctccatccacgcccatttctgccatagacatcagcgatcgagggccttcccatgacccaactgaccacggcgtgcgagggcacgagaggccaaactcttttattctccagaccaacttgtgtgcacctggatcccctgcgcaggaagat

SEQ ID NO: 43263 - DNA, 428 bp, Zea mays
  Clone ID: MRT4577_139464C.1
atgaaattatcttccgttcaccagtgaggcatgcttatatatttgagcaacttcatcaggagaaatcaagcactccagcattatcctccacttgcagtagtatccagcaggggcagtgctcacatttcaaagatattcagggtcatttatcatctaaagggcacaaagtcccaaccatttactttggaagaggtcggtcttcattgttgcctagtggttcatcagcagatccactcctgcttaatttatgtaaaacgatggagggccagagccagcatagctccgaagataatatatcatctggtcggtttcagctaataaaggaggatttgataaatgcaacggttgacgcgagtgacatttttgagtcatttgatagttgcccatattatctaagtgatcataccaaatgtgccctcatgtcatca

SEQ ID NO: 43264 - DNA, 1014 bp, Zea mays
  Clone ID: MRT4577_139465C.1
gggctctaatccctactcgactccgccgccgctccgcctcagcgcatcgccctccgccacagcgtaccgcgacctcatcgatcaccttcaactttcaatcatggcggacgtcgatgtcgaaccggaggttgccgccggcgctcccaagaagaggacgttccgcaagtacagctaccgcggcgtcgacctagatgcgcttctcgacatgtccacggacgacctcgtccagctcttccccgcgcgcgccaggagaaggttccagaggggtctgaagaggaagcccatggcgctcatcaagaagctgcgcaaggcgaaaaaggatgctcctgctggtgagaaaccagagccagtcaagacacatctccgtaacatgatcattgtccctgagatgattggaagcattgttggggtctacaacggcaagacattcaaccaggttgagatcaagcctgagatgatcggccactaccttgctgagttctccatctcctataagccggtcaagcatggcaggcccggtatcggtgccacccactcctcgcggtttattcctctgaaatgagctgttacccggctctgtagtctcccaagagtccgttggcaatgttcattcggcgtttctacttgttttgaacaagttaaatgaccaagacattttgttttgttccattccagctcaagaattcaaagctaagcattgcacaattatgctgttttgttggaagtatttgagttaatcatatctaagctggtttgtttattcctgaaagtttgaagaatatccttacaattttggggtgccgcgtgtggcttgattgaaatattacggtgccaaattattgggtggccctgttaacatggtatattgaccagatgtagccttgtttgcaagcacttgacactgacccttagttgcctctcctggtaatttgtatcaccaacatttcatgtttcgtttggttttgagcaatgaaaaagctgcttcgagctaaaaaaaaaaaaaaaaaaaaaaga

SEQ ID NO: 43265 - DNA, 389 bp, Zea mays
  Clone ID: MRT4577_139466C.1
tcggcgcgacgtgctggcggacgatgcggcgctgcgcgcggcggagtcggcgcgcaggatccagctgcattggagcctggtggaggtgctggagtcggagcgcctggtgctgctgggcgagaacgcgcgcctggggttccgcgcgacggcggccgaggacgaggccgcggcggcggcggccgacctgtgctacgcgcgccgtcgcgccgtcgagatggcccgcctcgtcctcaggctccgcgaggaccaccgcgcctgcgtgctgtggcgcatggccgagacgctgcaggcgcgggtgtacgcgctggagctccgcaaccgcgagtgctgcgaggccacggcggcgtgggaggccgaggtccagcggctcagcgccgagaaccgacgcc

SEQ ID NO: 43266 - DNA, 2589 bp, Zea mays
  Clone ID: MRT4577_139467C.1
gttttattggtggcagcaggctgttgaggaagcacatcagcaagttaggtctgccaaaatgtctgcagtggtagtaagaacttacgcgtactttggttgatttgcgtggaattactacagtgccatttggtgcccaacaacccgagattgtcacctcaaaaggacggagcagaatgacatccttggaggaaaacccatgtatcacgcgcgctgtagcgccagcatatgcagatttagcaaactctgatgctcttcaaatggctacggttgctgggctttcttcatccctccacgtattcaatgatggaagctcatcatattcaaccccgaagcagtcaaggtcaaggaggccaaaccattctggcgagcaacttcctttcaaccccgcaacgagtggcaatggtttttgatgccaccctacacgatggccacccagattggttatggaaccaaccattgcagcaagcacaccttactctgctccaagtttgttggcacccgtagatatatgttatttctagttaaattctttgcagcgttgcgcccatgaaccctggcagggagcgagttcggcccggtcttgggcccgcaggaccaggagcttccccgccagtgacgcccggcctcccgtccatgttgatcagctggagtagttactgaccccatccggggggtacggcctgctgctgaggcagagagaccaggatcttctggtagtgggtggaaggaaaaaatgaagatatatcgacaattgaactctctggtggagcaaggatccattacattttccagtctatctttgtcaaaagtttagaggaggttgatccttgtgaggatgttacagatgaagatatccgcatggctattcaaaatgcaactggtcctagaagtgctctgtttgtacctgaagttccatttgaagtccttgtacgtaggcagatcagcagattgcttgatccaagtcttcagtgtgcacagttcatatatgatgaacttgtaaagatgagccatcgctgccttgcaatggagttgcagcagtttcctatactccgcagaagcatggatgaagtcattgggaagtttttgcgggatggacttaagccaagcagaaaatatgatatcacacattattgagatggaggaagattacataaacacgtcacacccaaattttattggtggcagcaaggctgttgagcaagcacagcagcaagttaggtctgccaaaatgtctgcagcggtagtaagaaaggacggagtggattcacaggcttctgagaaaactcaaaaatcacgcgcgatcttgggtagaagtggtgtaaatggagtagttactgaccacatccagggggtacggcctgctgctgaggcagagagaccaggatcttctggtagtggaagcacatctttctggaatcaaatatttacttccaacgaggatcgaacacatgctcctgcaagagataacacaacaaacaaatcttatgctgtgcctgcacccaatctggaacattcattctccacgatacagttaagagagccaccagtcgtcctgaagccttcagaacaccagtctgagcaggaggcgcttgaaatagcgatcacaaagttgctattgaagtcatattacaatattgtcaggaaaaatgtggaggacttcataccaaaagcagttatgcatttcttggttaatcatacaaaaagggcgctgcataattaccttataacaaaactttatagagatgatcttttggaagacttgctcaaagaacctgatgagataaccataaagaggaagcagatacgtgaaaatctcaaggtccttcaacaagcttacaaaactttggacgagataccacttgacgcagaggcagtagagaggggtggatactccctggattctgatgcgattggtctgccaagggcccatgggctttcttcatccctccacggattcaacgatggaagctcaccatattcaaccccgaagcagtcaaggtcaaggaggtcaaaccattctggcgagcagcttcctttcaaccccaatatgagtggcaatggtttttgatgccaccctcctacgttacaagacggccaaccagattggttatggaaccagccaaatgtgcagcaagcacaccttattcaatatatatttgcccagtcatttcgtcatgatatgatatcaagtgatgggtatagttttgttcggacccagggaaagcaatggaaaaaaaaatctactaggtgtgtagcagtacccagcgtctgagtgactgttacggatttgccttgcaaaatagacatggctggtatggcggcggcaaaaaaaaatgtggcataaaattgatctcgttttcttaatgttttcatttgatttgataaaaaaaaaaaaaaaaaaaaaaaaaaaaaaaaaaaaaaaaaaaaaaaaaaaaaaaaaaaataaaaaaaacaaaaataaaaaaacgctagcattccaaaaaaaaaaaagctttttatatttaactaaaacaccattttactgcccggtgtttgacaaaaaaattgacttgtaaaaaccttgaaaaataccaaagtaaatcccctttt

SEQ ID NO: 43267 - DNA, 1462 bp, Zea mays
  Clone ID: MRT4577_139468C.1
cccacgcgtccgcagcaaggctgttgagcaagcacagcagcaagttaggtctgccaaaatgtcagcagcggtggtaagaatgaacctcaacaagcgtacaaaacgttggatgagaccactcgacgttgcggcagggccaaccagatcagattggttatgggaccagccaaatgtgcagcaagcacgccatgatggagtttattcacacccttatgaataaactcataaaagttgaatgatcttgagcacaggggcggtgaagggaaacgtggttgaacatttccagggggtactttcgtatagtatatatctttgcccagtatcttcttcatgatatgatatcaagtgatgggtatagttttgtatgcagtgagtgtttgacgcacacccttgttgatcagccaccagtcgttctgaagccttcataacaccagtctgagcaggaggcgcttgaaatagcgatcacaaagttgctattgaagtcatattacaatattgtcaggaaaaatgtggaggacttaataccaaaagcagttatgcatttcttggtatgtgattcatatccgattgtctttcggttaatcatacaaaaagggcgctgcataattaccttataacaaaactttatagagatgatcttttggaagacttgctcaaagaacctgatgagataaccataaagaggaagcagatacgtgaaaatctcaaggtccttcaacaagcttacaaaactttggacgagataccacttgacgcagaggcagtagagaggggtggatactccctggattctgatgcgattggtctgccaagggcccatgggctttcttcatccctccacggattcaatgatggaagctcatcatattcaaccccgaagcagtcaaggtcaaggaggtcaaaccattctggcgagcagcttcctttcaaccccaatatgagtggcaatggtttttgatgccaccctcctacgttacaagacggccaaccagattggttatggaaccaaccaaatgtgcagcaagcacaccttattcaagtttgttggcaccaatagatatatgttatttctagttaaattctttgtagcgttgcgccgatgaagcctagcatggtgcgagttttgttgtttcgccttttgtacagtatatatctttgcccagtcatttcgtcatgaaatgatatcaagtgataggtatagtttttcttcggacccagggaaagcaatggaaaaagtatctactaggtgcagtacccagcgtctgagtgacttgccacggatttgccttgcaaaatagacatggttggtattgtggtggcaataaaatgtggcatgaaattgtttccgtttcgttaatgttttcatttattcgttttcttaatgttttcatttgatttgataaaaaaacaaaaaaaaaaaaaaaaaaaaaaaaaaaaaaaaaaaaaaaaaaaaaaactcgag

SEQ ID NO: 43268 - DNA, 725 bp, Zea mays
  Clone ID: MRT4577_139469C.1
cttcaaaaccaaagcctgatgaaatagcagcatcagaaatggcagctgcagatgggccgctgaattgggcactagttgaaggccgacctccatctgctgctgaatgtcatcactgtggtattaatgcaacagctacaccaatgatgcgtcggggacctgatggaccaagaacactatgcaacgcttgtggcctcatgtgggcaaataagggtctcctgagggacctatccaaatctcctgtacctcttcactctatacaacaatcagctccaattctaaatggtggtcagaacggaagtgccatgtctgcgcttggctctgagctagagaatgctgcagcagccatgggcaatggccacgagccataaggtagtggtgtttagccatgtgctaaagccacgagcatcatcgcgcaatgatctctgcagtaggcggtcagttggagcctgcttagatatatggaatcctgcgcctgtaggttttaagagctgcgacagtgttttgtcccgtgtagtcatgtttgcagccgtcgcagctatagcaagtttgtttcttgtcttgagtcgtgactgttaagaactgatgaagttcattacttacgtgcgtgtagttatacttagatatgagatgttctagccatgcagcaacgttttctatcaatgccagcaattagggagcgagcgtttggcacaaaaaaaaaaaaaaaaaaaaaaaaaactcgaggg

SEQ ID NO: 43269 - DNA, 618 bp, Zea mays
  Clone ID: MRT4577_13946C.1
gtggcctccgcatcgccccaacgttgacccctccgtcctccccctctactcccagcgcagcgccgccgcgcctacgctatcccacccgatggatgtgttgtcgcctctgcagcacgccccgtcgctaccgaccccgcccagccatgcatttggagttcacaatatggagacatggtttatccaccggacgacgaggatggtgcgtggatggcgagggaggacctccactggacctactctgcacctcttcctgtctaccgaggctgagcacatggagccaacaactacaaaatcataaggaggggagctgtttgagcggatgcccaccaggaacaatgtttcctagatcacgatgtttgggccacttttggaagaggtcagggatgacatgttttcaagcttggaggacatcaccaacgcaccatatgcagatctgctctctattaattcaatgaggaaaggaaaggggtcatagaaattagtcttggcagatggaggggaacgtctcaatgactgagagacatgccagtgaggagcagtttagtcggttcttgctttatgaagtggatgcaattagaaagacgtacgagcgggccaacatctcgcggtggctcgcct

SEQ ID NO: 43270 - DNA, 1519 bp, Zea mays
  Clone ID: MRT4577_139470C.1
ccatgctagaacttgtgatgctagaacaggaggaattggaattatgactacttgcaggttcttgtttaatgggtaggcctactgtttatctttgggacgcttcaagcaagttgtattacttgtatgaaaattttgatcctcttagtctgctactacttcacatttaagtccggcattttattgtggggaaaatagtttttgtcacatagtttgcgagttaattcagtccaaacctattatgcacaagtatgaaatatatgtagtaatattgaattgcaggatggagtggattcacaggtttctgagaaaactcaaaaatcacgcccgatattgggtagaagtggtgtaaatggagtagttactgaccacatccaggttttctcatcaccatcttttagtaattggatgtccatttggtggattttttgtgcactcgtatcatgactttacccttcctaattcgccaccagacattgtttaccagggggtacggcctgctgctgaggcagagagaccaggatcttctgatgcagtgagtgtttgacgcacacccttgttgatcagccaccagtcgtcctgaagccttcagaacaccagtctgagcaggaggcgcttgaaatagcgatcacaaagttgctattgaagtcatattacaatattggcaggaaaaatgtggaggacttcataccaaaagcagttatgcatttcttggttaatcatacaaaaagggcgctgcataattaccttataacaaaactttatagagatgatcttttggaagacttgctcaaagaacctgatgagataaccataaagaggaagcagatacgtgaaaatctcaaggtccttcaacaagcttacaaaactttggacgagataccacttgacgcagaggcagtagagaggggtggatactccctggattctgatgcgattggtctgccaagggcccatgggctttcttcatccctccacggattcaacgatggaagctcaccatattcaaccccgaagcagtcaaggtcaaggaggtcaaaccattctggcgagcagcttcctttcaaccccaatatgagtggcaatggtttttgatgccaccctcctacgttacaagacggccaaccagattggttatggaaccagccaaatgtgcagcaagcacaccttattcaagtttgttggcaccaatagatatatgttatttctagttaaattctttgtagcgctgcgccgatgaagcctaacatggtgcgagttttgttgtttcgccttttgtacagtatatatctttgcccagtcatttcgtcatgatatgatatcaagtgatgggtatagttttgttcggacccagaggaaagcaatgggaaaaaaaaatctactaggtgtgtagcagtacccagcgtctgagtgactgttacggatttgccttgcaaaatagacatggctggtatggcggcggcaaaaacaaaatgtggcataaaattgatctcgttttcttaatgttttcatttgatttgac

SEQ ID NO: 43271 - DNA, 953 bp, Zea mays
  Clone ID: MRT4577_139471C.1
tggaattcggcacgaggtcctatactccgcagaagcatggatgaagtcattgggaagtttttgcgggatggacttaagccagcagaaagtatgatatcacacattattgagatggaggaagattacataaacacatcgcacccaagttttattggtggcagcaaggctgttgaggaagcacagcagcaagttaggtctgccaaaacgtctgcagtggtagtaagaaaggatggagtggattcacaggtttctgagaaaactcaaaaatcacgcccgatattgggtagaagtggtgtaaatggagtagttactgaccacatccagggggtacggcctgctgctgaggcagagagaccaggatcttctggtagtggaagcacatctttctggaatcaaatatttacttccaatgaggatcgaacacatgctcctgcaagagataacacagcaaacaaatcttatgctatgcctgcccctaatctggatcattcattctccactatacagttaagagagccaccagtcgtcctgaagccttcagaacaccagtctgagcaggaggcacttgaaatagcaattacaaagttgctatttgagtcatattacaatattgtcaggaaaaatgtggaggacttcataccaaaagcaattatgcatttcttggttaatcatacaaaaagggcgctgcataattaccttataacaaaactttatagagatgatcttttggaagacttgctcaaagaacctgatgagataaccataaagaggaagcagatacgtgaaaatctcaaggtccttcaacaagcttacaaaactttggacgagataccacttgacgcagaggcagtagagaggggtggatactccctggattctgatgcgattggtctgccagggcccatgggctttcttcatcccttcacgattcaacgatggaagctcaccatatt

SEQ ID NO: 43272 - DNA, 1253 bp, Zea mays
  unsure (1)..(1253): unsure at all n locations
  Clone ID: MRT4577_139472C.1
cattgggtacctcgaggccggccgggtcaacccatattggtcaccggtatctagtctgtgtaaaccaaagccaacccagtcaaaaccgctggctgcaggctggtttcccaaacatgcctaaaccatggatgaacagctctaatgaccatacaccaaattaatgagtaacataaaaaatgcctttacatgttatgaagcatgctcatattgaatatttggccctgtccctgtttgggtttttgctgctaaggttaatatctgaaagcttcatcttagttatgctcacattggagtacatgttgtggttaggggcgtggcggctgtagcatactcaaaacatggacagagtgtgtacatggcaggagttgatggcatggtctgtaggattcatgcctctgatggggctgttgtcaaatcttcttcaaaggcaatatctgcattagctgtgtcatcagtagcaactgtcactgctctagaccgagccaatgctgaagatgctgtccttcctcttccaaagctccatacgcaagaaaagaaaaggaaacatggtgtaagaaaacccacgcgtccggtggcgatgttgagcctgagattcatagtgacctcaccactacaagatctattcataaaagagttcctgtgcaaagaattgaagatgacagcacatgcatcgaggatatgatgagggagtgtggcatcattgaaactagagtagatgagagcatgaagggccatgctggtataccctttaacattttgtctggtctctttggtgatggcagcataaaattcgatgccaatttacccagtaagaagattcgaggtcatctaagatcattaaaacctggagatgcttgcaaacttcttgataaattagtatctgcatggaaaacgagatctggtagcacggaacttgtattgcgttggatatactgcctgttagtcattcatggccgttttatctgctccgaggaatcgattaacaacctggagaaggtatagtttctcacacagtactagctgtgtactgcatatgtnaaatntncttttgcagctctttcatgctttgcttgcnatttcatagtatttngngcgattgacttgtttcccacaaatacattaaggcacagtctggnagaaccgggaatttcatagtatctggngcgaatgacntgtttccccatggaattgtgaaaaaatgtnctccaaaaaggggcttaacatcaagaacatatggttgnctaatcctttgg

SEQ ID NO: 43273 - DNA, 293 bp, Zea mays
  Clone ID: MRT4577_139473C.1
ctgttctataagatcgtaccggtccatccttgactaataatgaagcaagcagttaagcctggttgatgagtgggtgacctgtctcccaaagcgtcactaacggcctccattcagtctctgtgctttgtctggtgctgcaaatgatcgcccctggttaggaatcctggctactatggcctatcagtcgtctgccaggtccattatacatagttcgcaagtacgtaattgggtgtttcacctcgctgctaggaggctagtgaaacgtccggtaccctagttttagactttttggt

SEQ ID NO: 43274 - DNA, 612 bp, Zea mays
  Clone ID: MRT4577_139474C.1
acctcgcacctcatacacatccgccatttcttccatttgccgccggcgaaggacaatgccgatgtgccccattaggaaactaatcctcatgctatcccagatccgcatgtcgcttcttttctcctgatttttcttccttggtggtggcacatgtggctgggtgagcgtgtggatctcggcgaactcgtcgaccctggcaacgcggtcacggagatgtccagtgagaacgcgggttgtgctactcaaagttgtcgtagccagagtttttggatgttggagctgcgaaggcattgagggagttcgcggatgaagaaatatatgcaagacgtgagtatcttctgcgagtcgatgttagttgttgccctcctgctgtccagacttctaccaaatcacgaagggccacttcaagtcgcttggtgacataatgatttcaggagcatcacctgcaagcctaccttcagttttagctcgtggattggaattcctgggaaggtcatgttgttgaggaactctactagacacatattctccattgtgttgtaattcattgttgccttgcatacagtgtccaagtataggagcaaagctgcaatgccagatgatactaccgaa

SEQ ID NO: 43275 - DNA, 274 bp, Zea mays
  Clone ID: MRT4577_139475C.1
tttttaatactttctttctttttctatatttcttcttgggtttttttttatttttaaacgaacaatccctaggggggttcccaatcaccaactgggagcctctcacctaatggggccccccagttctacaataaccctcccaaaattgttaccaaccgtcaaagaaatgctctttttttcattggagttcgctcctaagtgttccaaaaaaaaagggtccttacaaatgcccaggtccagcaaaattggaggggtttactaaggcgatataaac

SEQ ID NO: 43276 - DNA, 853 bp, Zea mays
  unsure (1)..(853): unsure at all n locations
  Clone ID: MRT4577_139476C.1
gccggccggtccgggagaacttgcgattcggattgagaatttgcgataccgatctgggagaagagaagggcgtcatgtcgtcgttcggacgcaattcatggtgtatcctcgtgctggcctccgtgctcctcctgtcctgcctcgccgacacggccgtggccaagcgaacaggcgagctcaccgtcttctggggccggaacaaggaggagggcacactgcgtgaggcctgcgacaccgggctctacaacaccgtcatcatctccttctacagcgtcttcggccacggccgctacgccctcgacctctccggccacccgctggacggcgtcggcgccgacatcaagcactgccagtcccagggcatcccggtcttcctctccatcgacttctacatcgacgaccacagcgcaccgggcgaccactacgacgagctcgcgcgccgtctcgactacttcaacagcatgtactaccacgccacgacgaagtacgtacggctgacggcgacgccgcggtgcgcgttcccgcccgacgaccccatggcgcgggcgctgcggacggggctgttcgagcgcatccacgtccgcttctacggcgacgccgacaagtgctcgtacaagaacggcgacgtgtccggcgtcgtggaccagtggagcaagtggacggcgaggtaccccaagagccagctttacgtggggctcgccgcggccgagagcggcgtgccggaccacgcgccgcccccccgttgaggtctacctcanatacctctactacgatctgctngcccaaggtgcagaagggcgcccaactatggtgggcgtcatgggtctggaataggttcaccgacnacaggacc

SEQ ID NO: 43277 - DNA, 820 bp, Zea mays
  unsure (1)..(820): unsure at all n locations
  Clone ID: MRT4577_139477C.1
gccggccggtctcgggatagaacttgcaaattcgatattgagaatttgcgatacccgataccgatctaggagaagagaaaggcgtcatgtcgtcgttcggacgcaattcatggtgtatcctcgtgctggcctccgtgctcctcctgtcctgcctcgccgagacggccgtggccaaccgaacaggcgagctcaccgtcttctggggccggaacaaggaggagggcaccctgcgtgaggcctgcgacacaggactctacaacaccgtcatcatctccttctacagcgtcttcggccacggccgctacgccctcgacctctccggccacccgctggacggcgtcggcgccgacatcaagcactgccagtcccagggcatcccggtcttcctctccatcggcggcgggggaaaccactactccatcccttcctccgcgtccgcggaggccgtcgcggacaacctgtggaacgcgttcctcggcggcggcaacagcgacgtgccccgccccttcggtgacgcggcggtcaacggcatcgacttctacatcgacgaccacagcgcaccgggcgaccactacgacgagctcgcgcgccgtctcgactacttcaacagcatgtactaccacgccacgacgaagtacgtacggctgacggcgacgccgcggtgcgcgttcccgcccgacgaccccatggcgcgggcgctgcggacggngctgttcgagcgcatccacgtccgcttctacggcgacgccgacaagtgctcgtacaagaacggcgacgtgtccggcgtcgtggacagtggagcagtggaggcgaggtaccc

SEQ ID NO: 43278 - DNA, 1240 bp, Zea mays
  Clone ID: MRT4577_139478C.1
cattgggtacctcgaggccggccgggccgggatagaacttgcgaattcggtattgagaatttgcgataccgatctgggagaagagaagggcgtcatgtcgtcgttcggacgcaattcatggtgtatcctcgtgctggcctccgtgctcctcctgtcctgcctcgccgacacggccgtggccaagcgaacaggcgagctcaccgtcttctggggccggaacaaggaggagggcacactgcgtgaggcctgcgacaccgggctctacaacaccgtcatcatctccttctacagcgtgttcggccacggccgctacgccctcgacctctccggccacccgctggacggcgtcggcgccgacatcaagcactgccagtcccagggcatcccggtcttcctctccatcggcggcgggggaaaccactactccatcccttcctccgcgtccgcggaggccgtcgcggacaacctgtggaacgcgttcctcggcggcggcaacagcgacgtgccccgccccttcggtgacgcggcggtcaacggcatcgacttctacatcgacgaccacagcgcaccgggcgaccactacgacgagctcgcgcgccgtctcgactacttcaacagcatgtactaccacgccacgacgaagtacgtacggctgacggcgacgccgcggtgcgcgttcccgcccgacgaccccatggcgcgggcgctgcggacggggctgttcgagcgcatccacgtccgcttctacggcgacgccgacaagtgctcgtacaagaacggcgacgtgtccggcgtcgtggaccagtggagcaagtggacggcgaggtaccccaagagccagctttacgtggggctcgccgcggccgagagcggcgtgccggaccacgcgccgccccccgttgaggtctacctcaaatacctctactacgatctgctgcccaaggtgcagaaggcgcccaactatggtggcgtcatggtctggaataggttcaccgacaacaggaccggatacagcggcgccgtcaagggctgggcggcttgcagctatgctggctgtgttaactaagtgcatagcgcatgtataaaccacgtaaataattcgtataaggtgcaagtataaataaacacaagagactttcgtgataatcgaatgtttctttatgtctaaaatacagttccacttatacaacataaatacattgaatgaagtttctaaaaaaaaaaaaaaaaaaggccccta

SEQ ID NO: 43279 - DNA, 380 bp, Zea mays
  Clone ID: MRT4577_139479C.1
gcgtagtcgactacaacacccaaatagtgagtcgtattatgattacccacgataatctgcggtcttctcaactagcacgggtcttggcgccgcgcccagatccggcactgcccgcggctcgaacccgcaccccgcggcacgcaggccgggacccgtgggcgcgcgccgggcactaggaggtagaggaagggccgcatggcggcgccgccggtgacggcgttgagcgaatacaggaggggaggaggcttcgtgccagtggggatatcggtgttggcaagagttgcctcctgttgcggttctctgaggattccttcagtacaggctttagtaccagaattggcgacgaccttaggatagggacaatagaattggctggcaag

SEQ ID NO: 43280 - DNA, 458 bp, Zea mays
  unsure (1)..(458): unsure at all n locations
  Clone ID: MRT4577_13947C.1
ccaccactcactaccccctggctataacttccagagttacctctgtcaaggaaagctatcctcggtattcgaaccaaccgatgcaaagccaaggactggcatcagagtcctggccgtaccaggcccctgggcatcgccttggaagcaacgtacccaggacaagtgacctttgcaaacacgccgaaggctggggtccgctgagtccaagtcggtacgatctgaccccatgtttcgagtacagtgtcctctttggcgccgtgtccctgatcgccattctcgggttcaccatacggatatactacctgactcaccatgcaaaggcacataatttcggaagaactgcttggatctattggccgacgcaactctgcatgggactcggagcgcttatggcctgcacgttatcgancgcgcatttttcgtctgagaactcatcgccaatcttttcctgnagctgc

SEQ ID NO: 43281 - DNA, 194 bp, Zea mays
  Clone ID: MRT4577_139480C.1
cccacgcgtccgctcacgcgttcgatgactattgtggaaattgcacgtgggattaaaaatgcagcaaaacaagggtctgcgatgattagaagccgaacttacgtactctttaatgcgcccccatagctggaatatggcgtcacactattgaaggtaaatggctaatgtacgcacaacgaccgaactgtggaaaa

SEQ ID NO: 43282 - DNA, 328 bp, Zea mays
  Clone ID: MRT4577_139481C.1
gaaatcgcaaagggtagtttattagctaattaaattataagttgtagttttaaaaaatgccggatgactggccacctggtggattcttaacacgagtggatgtctttttggattgatcgtcccattgatcgccgctgaaggcgaacgacgagtcttgcagattgcccactcctgatttggtcagaggtctatgatgaaattgatcgtgttgtgcgtctattggcttgttgatgtctagaacctctaatggcttgcttaaatcaattactgggccagagtttggctcacgttctactttattcggtttgatatggtctcggaccttaac

SEQ ID NO: 43283 - DNA, 274 bp, Zea mays
  Clone ID: MRT4577_139482C.1
aggtcgaggaaaagtgtacaaaggtaaggctcagctgatggctcattgctagcagcgaatagactaaaaaaggaccgtacacctggaggtgagcttcagctccaaacagatggtgagatgattagcatggcggagcacaagaaccttctacgactttcaggattctgcatgacacctaccgaaaggtttttaggctacccatacatggttaacgaaagtctcggctcacgtacaccagagcggcatccatctgtaccacctgttagctgagaac

SEQ ID NO: 43284 - DNA, 1523 bp, Zea mays
  Clone ID: MRT4577_139483C.1
cattgggtacctcgaggccggccggcttatcccccaccccgaccggaagggggccaccaattgcggcaccgtcgcgagccgatctgtctctcacttccatctcgcctccgcggcgcgaaaccctaggttcgcgacgccatgccggcctctgggtcgccccgtgatggtcgaggcgccgaggaggatgaggcggcgcgcagcggcagcaagtcgctagacgctgaatgcaacgaccgctcaaaggggagccggaaccgggaccaccgcggcaagtccaagcggcgagaggaggaggagagcgagtcctccggagaggactccagcgagcgacggaaacggcgtagaaaggagaaagagcgccggcacaggcgccggcgccgcagcaacagtgagagctcgggctcgtcgtcagagtcggagtccgagtcgtcgtactcggggtccagcgtggagtctgagagcgagtcggagttggattcggaggaggagaggcggaggcggcggcgcaagaggaggaaggaaagggaggatgaggagagaaggcggaggaagaaggagaaggagaggagaaagaggaaggagaaggagaaggagagggagaggaggaagaagaggaaggaggggaagaagaatttggggaagaagggcgctgtgaccaactcgtgggggaaatatggcatcatccgtgagctcgatatgtggagcaagcggccagagttcactgcatggctatcagaagtcaagcaggttaatttggaggcattgtcaaattgggaagagaagcaaatgttcaaggaattcatggaggatcacaatacagccacgtttccatcaaaaaaatattataatttagatgcttaccatcacaaagcaatggagaaagagaaaaagaagggtttaaaaatgattgtgacagaacgcactgtatttaatgatgaggaacagcgacgactagaattgttgaaggagcgtgagcgccgaaaggaggaagaagtggaagctttaaaacgctctatgcaagctggactggctcaagacatgaaggagcaggcccgtctacgcgaagaaatgaactaccaatacaggttgggcaattttcaggctgcagctgcaatccagaaaagattggatcctgatgctcccttgcagtagccggttcgtggatagcccaattccctgcagttattccttggctttcctggacactgtaggacgacgagcataccttagcatattgaacggctgctagctactacgatgttttttttatatagtgtgccagatgctacttttgtattgtatcggcagaattttgaattccagttattcagactcagttgtttgtttcaaaaaaaaaaaaaaaaaagcggcaaaaaaaaaaaaaaaaaaaaaaaaaaaaaaaaaaaaaaaaaaaaaaaaaaaaaacaaggtggatcgttttataatatacaaagttatatataaagagattgaaaaaaaaataatttttaaatgggggggccgattttagggattcaaggttt

SEQ ID NO: 43285 - DNA, 306 bp, Zea mays
  unsure (1)..(306): unsure at all n locations
  Clone ID: MRT4577_139484C.1
tgctaacctactaaatgcatcacgtatgctaatcaaatgatttccttatggtaccctgataaaaacgtgctaatttttagaaataaagctaactgttaactgtggtctgataggtcctaggatgattttaggtgaaaggaactaatcaaaacaccaagagaaataaatacgtggatggcagctcatgttttaatcttgtaacaatgcttttgctagaatcaactgtttttggttaggtgtgttccttggcaaaaacaagcttgtatctntttcttttttgaatgtaatggcaggagctctgccttt

SEQ ID NO: 43286 - DNA, 473 bp, Zea mays
  Clone ID: MRT4577_139485C.1
agcagtggtaacaacgcagagtactttttttttttttttttttttttttttttttggaatttatgtttcaaacttgaattcatatctttagagttcatacctgggttaaatattgatactctaatgacagcatgaaccaaaatttaattcctttatatatttagtgtatagtagtattttcttcccttttttcccaaatcctagaatttccctttctaattcaaagttctcacctcggattcaattcaattccaaacatatgttttgaacttcaacttttcaagtgttaaaataattcctaatataaaatttactgtttattatttttttctattcttttccttaccatttatttatggaagaagtgaatggtttcatttaaaattcccttctctttctctattttctatccccttttgattttaaatttaaaattcacccgcgtactctgcgttgttaccactgcttaagga

SEQ ID NO: 43287 - DNA, 365 bp, Zea mays
  Clone ID: MRT4577_139486C.1
ctgattagattatctttgccctatattgagacaagacttatgctgtcttataatttattttcccccactagggtttttgagatgatgactatagacatattattgttctttgggctagaggtccattgaaaaaaaaatgtcgtattgtggttcaattgaaccactgactattatccatattttctttttgagcgtgtgttgttcagatggaaacaggaaaatgtttctcttaacatcttgcaaacaaagtcttgggataatcttgcctgatctattcacaaaatctctaccatactcaacgttttcagaaatgtgttgacgtgattggaccgagaagactcaagtgtttgcaagatcaggggaag

SEQ ID NO: 43288 - DNA, 337 bp, Zea mays
  Clone ID: MRT4577_139487C.1
gatgtatatatgggaggcacagttgggaagaatgaatgccacagaaacaagagcgtcgtctgggaccatattggaattcgaggcacaacatttgaacaccatggttttgttcttcatctagacacacttttctttgggctagcccctagcagtggttgtacatgtgtatgtctgcaggtacgatcacaggacttgaacgctgttggggaagaagagctttcaggagagcagcgtattccaagtgtacggcacgccacggaggtactagtgcctgcaggcagagaacctcctggggtcggcgcgctgttcggacggctgttacacccactggttgttg

SEQ ID NO: 43289 - DNA, 682 bp, Zea mays
  unsure (1)..(682): unsure at all n locations
  Clone ID: MRT4577_139488C.1
gatcacaaanaaaacaagtacataatataacaagttcatcataaagttcaagagccacaagtccacaagtcccaagtttgcaaggtcacaaaacattatggagcaagtacaataagaaacattcatagcattcatggtacattatcatcatctagatcttcatcaacaagcttacaacgatgcctcaggtccatcatcattatcatcatctaggtcttcatcctcaaatgaaggatttcttgcaagagcctcaagttcatccatttcataaaccatattaggaatagcaacactcttagccttggaaccttttcttgctctagctatccaatctttggtgtagaccatcttctttgtgtgctttccaccatgctaatatgtcaaaagtgtgttgattacttttaccaacctttagtattggatctgccaaatatttttcttgtagtactcctcacagcctcataggtcgagttcttggtagcgaagggcggcgctgcttgaagtggccctgcttgaagtggcggcacggccctgcttgaagtggcggcactacgtgcgatagtgcttctacctgcgccaggccagatgagggagaacaagctgggaattaggtgatacctcgccggacgaggaggatgcgtcgccagctccagctgtagccgccgcccgccaccacaaagcc

SEQ ID NO: 43290 - DNA, 485 bp, Zea mays
  Clone ID: MRT4577_139489C.1
cacaatataatagtttgatcacaaatatcacaagttcacaatattacaaattgataacatagatcacaagttcacaatatgataagttgatcacaaagaacacaagtacacaatataacaagttcatcataaagttcacaaagccacaagtcccaagttcgcaaggtcacaaaacattacggagcaagtacaataagaaacattcatagcattcatggtacgttattatcatctagatcttcatcaacaagcttacaacgatgcctcaggtccatcatcatgatcatcatcatctaggtcttcatcctcaaatgaaatatttcttgcaagagcctcaagttcatccatttcataaaccatattaggaatagcaacactcttagccttggaaccgggtgggtgccggcgtgccgccgccgccagattgggagcgctgagaagagaagtggcggctccgcgctgtgtctgtgtggaccgtcggccgg

SEQ ID NO: 43291 - DNA, 787 bp, Zea mays
  Clone ID: MRT4577_13948C.1
ccggccgggacagaaggtacaagtgttgtagtgatcctcgcccgcgcgcttcgcacgtccccgccgtcgcgctcgcctccctcctctttgttgcctccgcgtcgacctccaccccgctctccgacgcgcttaccgtcgtctcggatttctggtgcactctcttctctacgacgcgagcaagggcggcgcttgccatggcatcgacgggaaccaggcatcactctccctatctctcgggaggggagctgtttgagcggatgcccaccaggaacaatgtttcctagatcacgatgtttgggccacttttggaagaggtcagggatgacatgttttcaagcttggaggacatcaccaacgcaccatatgcagatctgctctctattaattcaatgaggaaaggaaaggggtcatagaaattagtcttggcagatggaggggaacgtctcaatgactgaggcacattttttcttgttagttagctcatggatttttatggtccaagaggagttgctgctatatgaatatgacaacacccattaatcaacataactatatgaatacaatctgaaaggaaggtcggtttggtcagaaacacatggaggtactgatggaggctatgaaacatataagagacatgccagtgaggagcaggagtagtttagtcggttcttgctttatgaagtggatgcaattagaaagacgtacgagcaggccaacatctcgcggtggctcgccctgggcaaccggacctgcccgaccacgatgcaggagctctgggacgacgccc

SEQ ID NO: 43292 - DNA, 310 bp, Zea mays
  Clone ID: MRT4577_139490C.1
gtccccgtcaaacgcccagtcgcagcagcaggcccacgcgcgcaccgttggcttggagaaccaccatgtgcacacttccatattcctccgcaacggaggcggcgaccgcggcgtaagcggtggagttctgcgaggtgagccggtccgtctggggcccacctgtaagctgcacatcaacagaggcgttggttacgccattgttgcggccggagagagcaaaaatattaggtacactgcctcaggagggaagaccctttctgacgagcaaaatcagcgtttgttccttgggggacgcatgggcgcctcaatg

SEQ ID NO: 43293 - DNA, 277 bp, Zea mays
  unsure (1)..(277): unsure at all n locations
  Clone ID: MRT4577_139491C.1
cggacgctggtgngcgggcgaaaatccctcgccgtgaatctcgccccgggccgttgatgcctacacaaatctccaccgattctccaggatacgtgctgacccggaaacgatctcctccatgcgcacaaccgaccgaattaaatgccacccaatctctggctgcataaacattggcccccatccgtttcagtcgcgattgctagtaatcactcgagcgatggaaggacagtgggtgagcagggagataggaaagaatcgtgggcgccattgcctgttt

SEQ ID NO: 43294 - DNA, 339 bp, Zea mays
  Clone ID: MRT4577_139492C.1
attcgtctcgagccggttcgaccagctcacatctttgccgccgccctttttttttctatatcgggggactcttaaaaaaaaactgggggaccacactctcatactccaccgatctgccataagacctcaactctacccccacaatgaagaccaactggtgtacacttctcctaaaggaataatactaatgtctaatccgcaggaacacaatctatacgaaccgttctagattagaactcctgcccgacacaaagcgaaacgcgaccaaagccaaaaccaccctccagcaggcaatgctttacaatacacgaaagacaggatacttactcactagcacaa

SEQ ID NO: 43295 - DNA, 154 bp, Zea mays
  Clone ID: MRT4577_139493C.1
gacccgctgaactggggcgcggcggagtggagctggccgagagctcctgtagaggtgaagcgcatggtggcgcaggcccggcggcccgtggtcaagatcgagggctgcaccctccacgtgggccaggtggccgccgtcccctccaccaaggacg

SEQ ID NO: 43296 - DNA, 593 bp, Zea mays
  Clone ID: MRT4577_139494C.1
atactacggaagaaaacaaactcttatcttgtaacacaaaaacgggctctacaagagatgttcttggtaccattcatgcttattggggtacacgcagatgaccacctatggctcggtacttactaattaggactgacccaggagggggcatcataggacgtcacgtgcttacagagaagcatgtttcttaacaaagagcgggctagacctgctttaagagtatccaaacgacctccacgaagtggctgcgatgtagcataaacatgtaacaagcaaagcgaccccatacggccggtttagtcatcaagcactaccgccttctactttatggactccgatgcctcctcccagcctggaatattagacaattagccaacgctttttcataggaggaggagcactcttcacgttctcgacgtatgagcattgaaaaacagattttggcgaggtagcatcatcttttctggcggcacataatctatggtacataaggagcccgtctccaggcaactgctgctacaccatgttgttgcagtgcatagacctctgcacaaagtgcctttactcatgtcccgagatgcccacgcccggcg

SEQ ID NO: 43297 - DNA, 130 bp, Zea mays
  Clone ID: MRT4577_139495C.1
accatctggagttttaaaaggctcccatgtgagtccctgtgatggccaggccaggggacccctgccagttctctgtggaagcaaggctggggcttgggttcctgtatggtggaagctgggtgagccaagg

SEQ ID NO: 43298 - DNA, 366 bp, Zea mays
  Clone ID: MRT4577_139496C.1
cccacgcgtccggcggaccagcagacccgcgaggcggtgcgggacgagatggcgctggcgctgcgggtggcgctgctctgcaccagccggtgcccgcaggagcggccgtcgatgagggacgtcgtgtccatgctgcaggaggtcaggcgcggccggaagctactagctcctgggatggccaagaagcaggcaaaaattaattagcaaccaccacgtgtgttacgacttgcgtgtaggtgtattattgtactactactcactatgaaatgcgtacttaatttgtcgtgtagtcatgtcatgtataatgtcttactagatcactcatcactgtatgagtacattaaagtttcaagactttcagaggtc

SEQ ID NO: 43299 - DNA, 811 bp, Zea mays
  Clone ID: MRT4577_139497C.1
aacataaggtaagcacaagtaccttgcaggtgacaagaaatcacccgacttttatcgtctaagcaggcctaagcatttaagtaatttacccaggtgacaaggatagcgataaccaaaggtaatcaaagataaatgcagcaattgtttccaaacaactcctgcaacctaatgcaacaatcataggatggtaggcgaataaaacaattattgcaaaccatggtaattagatgtcggggcttgcttggaatcaaacactaggttagtgtttttggttagatgacatctgcttgatgaacgtccccttgatcggtccatcatcttcgggtttgtctccaacaccacgtcgttcatgttcatgtgttccatgtctagcataccgtgtgggagatgggtggtagaggagcggatggtggagctcgacaccggcgtggaggggtcgcatgccatggatggtccggagtgccgaacggctgatgattggcggccatggaggagcaggggtcgtgcgccatggctgagggcgcgtggagcagggagctcgtaggggccgacggccatggaagttgctgggagtagagaggagctcgtcgttcctggggaagggaaggggtggtgctccctagtgctggtcgctggaggaggaagccagcacccacaaggaaaaggagcagagggctgcaccatggatcagagaagagaggggctcacgagctagaggttgaagacaatggatgggaggtgcttggcggatggtggaggccaggatccctatgcggcggctgctggtgggagaagaggaattcccggccgg

SEQ ID NO: 43300 - DNA, 255 bp, Zea mays
  Clone ID: MRT4577_139498C.1
gaaacgaggaccgaggcatcaaggggcacggaagggacagcccgggcaagaggcggaaacccacacaagaggcgaaaaaaaaatcgccctcacccactttaaatggggcaggggagggggggggcgcgcaacaccacatcaagggacgtgcggagggcaaacctccaaacggaaggctggggtacaaagaacaacaactgagaaaccaggaaacaaagacctgctgaccggcgcacagactatgccgggcataac

SEQ ID NO: 43301 - DNA, 135 bp, Zea mays
  Clone ID: MRT4577_139499C.1
tcacacggctagcatcgagtgcattggcgacacaatgacaaccttgtacaagtgtggcattgtcgagaacagcgagttcaacagcggactgatgggctggtcgacacagcgtcgacgtcaagccggcgtgacaga

SEQ ID NO: 43302 - DNA, 213 bp, Zea mays
  Clone ID: MRT4577_13949C.1
ctgatccagtatggctatggcaaaggcaggcgcgccgagggtctcggcggcccagctggtggctctcgggctagcgctcctctgcgctgtcgccggcccggccgccgcgcagaactgcggctgccagccaaacgtctgctgcagcatgttcggctactgcggcacgaccgacgggtgctgtggcgcccgttgcctgccggtcccgtgccgctc

SEQ ID NO: 43303 - DNA, 269 bp, Zea mays
  unsure (1)..(269): unsure at all n locations
  Clone ID: MRT4577_1394C.1
gacgccgccgccacgaaaacgaaacacaagcagcgccaggccgacgaccaggaaggcaagagcgccaacggcgacacccagaccaacaccaacaacagcgggnacaccgagaggcccgcggacaccccggagggcgggggcacgaagcagaacaagggcgggacgaggaccgccaacgagccggccggcaccagccccggccgagagcggggacgaacaggacggcccgacaacggcaacagcgggagcggacagacgggcgacagcga

SEQ ID NO: 43304 - DNA, 353 bp, Zea mays
  Clone ID: MRT4577_139500C.1
gggcccacggacgatcgcgactgcgcagtctaatacgctcgaggcatctcgaatcgatagtctgccatatcgtcggataccctcgaaatggccgctcaagggaccgcaactgtggacgtggctctatctccgattcgaagagaaccgctgaagatcaggacagcgttgcaactcatctcaaggccattatctgcacacaaatggcttatgctgggatcacgtacagctgcaacaacactttctcatcatacgaccaagtccttcatactagtgccagactcggaccagtctcagaacgtcaatcaggtactggcgcacagatcggatcagaaagtcaactcgccaacggtacc

SEQ ID NO: 43305 - DNA, 249 bp, Zea mays
  Clone ID: MRT4577_139501C.1
ccgtatagagtcttttttttctttccaagctgctcaacatgtaggatcatcaactttgcgaggacccctcacaaccccgatgcaaacccacactagcaaacctgtccaacctacataacccctaccaactaacatcctaccctccatcaacactcctaaaaaaaaaacaaatcacacgcactaacataacaccacacagaataccaccaacactttatcttcacttatatagactagctacaccctcca

SEQ ID NO: 43306 - DNA, 274 bp, Zea mays
  Clone ID: MRT4577_139502C.1
gggggggaaaaaatttttgttttagatacaagttagagggtaaatattttttgtggacaaaataagtttcacttgaactgggaagtacccgggtttactttgacggggggaggaaaaaaaattttttttttaaatgaaaaagagaaaagtagttttggaaatgaaaaggggcaaactttttatgggaaaaaaaaaaactgggttccttttctggtggaaaaaaatgaggtggttacaaggaaggttaaaatttattctggttttaaaataaaaa

SEQ ID NO: 43307 - DNA, 620 bp, Zea mays
  Clone ID: MRT4577_139503C.1
tccggatcgcatattttcgatctcgatgggaattctctggaactttctccgtctctctccttccgcattctcgctgatatcaagagcaggatgcaccaacagcggacgctccttctatggccgctcgcccattttatcccacatccgcgatcttcatcgatgttatcttaatcgcgcagccctccctcggtgatatattacgatatcagcgcatgtatttgctgactgacatagcgcacactgccgcctaccatactgcacaacaatctgcgccaccgctggagctcctctcagcacataaatggcttgctattagatgaaggattagaagagctactgttaatatgattccaagaaactatcgcgcctagggcatgatgttgtactcccataccgatgatctcatctacgcttaacggcctcattgcctgcctttgctccctgcatatgaaagatgatcggttgctactagcttgacgttgccatacgacgcatctctggacatatcgctacgagatacgatactgctcttgcatcgtggattctcatcgttggtgcaattatttttaatgagagtgttaacggtcactacaggaatgtatcctgtatgacgtgctgat

SEQ ID NO: 43308 - DNA, 272 bp, Zea mays
  Clone ID: MRT4577_139504C.1
tgcaaatgagatttattttccgaaaagtacacagttcactcaaagggccttatcctgaagaaccttgtttgattacatcatcaatcttcaaaatcattttgacaacttgagtagcgagcaaaagttgttgcttcttcgagatgaagcattcaaaaacattgctgtctttcatattctttactttcaattcgttacagtccacgccaatgaacggattgttttccagttgttgttgtgctttgatctcagcgagggtggagataggttgcata

SEQ ID NO: 43309 - DNA, 371 bp, Zea mays
  Clone ID: MRT4577_139505C.1
gcggtacagaccggcggcgacaggtgggcgcaccctctagcggagcccgagaaggggtgtctcttgggcgccacggagaagctggacggctcgcacatcttcgagcgcacggtgatcctgctgctgtcgtcgccgtcgtcgctgggccccgtcggcgtgatcctgaaccgcccctcgctcatgtcgatcaaagaggcgtcagggtccatcttcgcggacgacgccgacatcgcgcgcgccttcgcgggccggccactcttcttcggcgggccgctggaggagtgcttcttcgtcatagggccccgagcggcggccggaggcggaggcgacgactcggtggcgcggacggggctgttcgaggaggtgatgcc

SEQ ID NO: 43310 - DNA, 607 bp, Zea mays
  Clone ID: MRT4577_139506C.1
gcatcctctcctctccatgccttagtgcattgtgccgcagcctcgcccgcacagccaccgtgctcgccgtcgcgcgatggagcttggttggtcgctgtcgttccgtgccgagatcgcgattcgtttctgagctacggggaatcgacggtcaagcttcggcgaccaaatgatccagttcttcgagttctacgagatcgaagaccctgagcatctgtttggtgaaggttgcctttggtgcaatctatgctcaagtaaagaagaaggcgtcgaggcggatctccaggagttccaggacttcgacgagtttgaggattaggctagcgatcacccctagtcagccgcctgtgcattgtgctatgatgagtcatgttgggactatgcttcgtcgccgaaggtcttgtaggaagaagcagctttcggctgaagctgttcgtatgagatggccgaaggttcctcttcatgaagcttcggtattacaaaccgacttaaaagtagaatgaccctctagtccataagtgcctaggtcgctgttgtaatcctttgtgaggggcataattgtaatttctcataggctgtgtcctgtgcctataaatagtgaacagtattc

SEQ ID NO: 43311 - DNA, 455 bp, Zea mays
  Clone ID: MRT4577_139507C.1
ctctcgcgtccggtccgatgggattaaaatcagcgtatgtccgacgatttatttgacggacgtcggacataagcttatgtccaacggctgtcgataagccgtcggacataagctcttatgtccgacaactgtctgtagccatcggacataatacgatcgtcggagaattgtgtttttgctgttgtgacacacacacaaaagaaagaagagttcagtagcataattggaacgaagaagtgaaggacatgaactttaagaaaaagtttgtccgtcaaacttgcgattacattcttctccaatgcaacttagctcagctggcgagcatgaagaatctggagctatccgcttagcttatctattcagcagcagctcttatatggtcctcagatatctagcactcataagagaaaataagaggggatggtttctattatattttaagagaaaataagagt

SEQ ID NO: 43312 - DNA, 559 bp, Zea mays
  Clone ID: MRT4577_139508C.1
acctgtgccagtgccatcccttttagactcctcggcctcactcaaatcagactacaccacctcaatgaccgattgttcctgagacttgaccctgtgcatgagcttattgcacctttcttcctgccgatcacttgggtgccctcatcctcagaattctgtctcgcctagagctctcagttcctagtgtctccaccgaggtgcgtcgaacgggctaatgagcacgcagggcgggaagcgcacgggctatgaccgtggcgtgcggcgagtcccttatagcctgctatggcgccatcgcagcaaccagggttgaggaaactaaccgtacagaacatagcgccgcagcagcaacaccaacacgattctgccatcactgtcacgccgtatgcgtgacgaaccctgacacctaccagcaacaagaaggtggtcgaaagacaccaacttgctcatggccaacgtagccgcataccatcaacagcaacagctgctacagttatgccagagctgactcaactagccataggagaaccctggcgtctacctaccactactttcatctagc

SEQ ID NO: 43313 - DNA, 199 bp, Zea mays
  Clone ID: MRT4577_139509C.1
gtaggggaaaaaatggccaagttgccaaatgaaaaatttgagttagcccgtcagctcaataaaaaacactctaggaattttataccaagacggtggaggcataactctgagtgtacggcagaattatggaaagattgcacgcaacaacggctattttagctagggcggaccaagaaaaattgctggggttagcagagtt

SEQ ID NO: 43314 - DNA, 236 bp, Zea mays
  unsure (1)..(236): unsure at all n locations
  Clone ID: MRT4577_13950C.1
atcattctttggaacaagctactgattgttattataataatgatagctttgtgaggatcaactaccgtgatacatacaggaaatcatggcttccaagaggntcaatacattaagaaactagaagaagaaaaaggctttgtagtacgttttgttgttggaagaagtgctaatcgtggtgatactttcgatactgagattgatgatgaaaataggagcatcatggatttcttgatatt

SEQ ID NO: 43315 - DNA, 364 bp, Zea mays
  unsure (1)..(364): unsure at all n locations
  Clone ID: MRT4577_139510C.1
agaaagaaatgaaatggcattgttcttatcaggttaggtggatggtgacttttgtgacaagatttgttacagcttgcagaagaagaatcgatggcaagatctggtacatcacaaggctgtaagtagcattagagacagctacgcattgatgctgtactctgctgatacaaccatgctatttgcatgccagataacagatttattggtgtggtgcagcagcctctccagtggtaccatgttggcggtctgcctgctctgctcagtgatcatcatcagtagtaaggttgaacgttttgagcaggtcanggcaggcgggcagtggcttgtccttgaggtagccgagcgggttggccatgcggatgtt

SEQ ID NO: 43316 - DNA, 254 bp, Zea mays
  Clone ID: MRT4577_139511C.1
aaaaggttagcatatgctaaattttattagatactaagggggggtttggtttttagggactaatttttagcccctacattttattttattttagttcaaaaattcccaaatatagaaattcgaactttattttagacaatattttgggcactttattatctaaaaacgcactaacgggtgggactcagggttggaccacgataccccagggctcaattagcctatgaagaggagctgcttatagtcgccgtgcc

SEQ ID NO: 43317 - DNA, 639 bp, Zea mays
  Clone ID: MRT4577_139512C.1
tttaacttactacgacatcctgatgacaccctagcagtacaggagtccctctcctctcgaggtattagcaacccaccgattcctcggacgacgatgaatcctgttgttgcctacctgcttgctgccctcgctggaaactgccagcccctccactgacgattcgactgccattctggagtcagttgactgagaagtggacaatgatgacatggaactcctgctgacccaactgaaaggaaaggacatcacctagctcattgccgccacaagtaagaagcttgcttcaatcccatgtggcagagagcatgtgtcgctgctgcagacaactgcatctgctgatgtaggagctgctcctgcttgtgatgcaaacaatgaagagaaggtgctagagacaggaaaaatgagatgatgatatggtcttcagcctcatctactagggtgcacagtcatcacaatattgttttgggcatggaaaccacaggaaaaccataatcatgtatagatattaatgttgtcttatgatgcaaatgactggaaagactgctacttgtctatatatttgttaattcagccagcagattgctatgctgaatgcaatttactcgtgaaacataggtattctgacttatatatcctgaa

SEQ ID NO: 43318 - DNA, 103 bp, Zea mays
  Clone ID: MRT4577_139513C.1
accaattggagattgccgtagatttccgcgattatgggaactcatttaccttttatttcaaacgtatcagataatcaggtaaatgagttcccattagaatgaa

SEQ ID NO: 43319 - DNA, 420 bp, Zea mays
  Clone ID: MRT4577_139514C.1
aaaaagggagtcattccaccaggggagtaaaggcgcaagaaagaaacccaaagcaattgacgggaatcggaaaaaggggtggatcacgtaaattaatccgatgtaaaccgagaaccttacctctccaagaaggtgttgcacggctgtcgaaagaacgtgctgtgaagtgagagaacgtacgagaaagccaagtgaggaaaagaaggcaagtagagggcggcccgagaaaggagagggcgtaagacgtgatacagagtaggaagaaaagagaagagagctagaaaggaggtaaaagaagagtaaaaggactagaagaggtacggaattcacgaggaaggagcgtgaaggaaggaggaatcccaagtaatcgaggaagaaaaagcttcggtgaaagcgtgaacggattttgtacacactgcc

SEQ ID NO: 43320 - DNA, 1091 bp, Zea mays
  Clone ID: MRT4577_139515C.1
ttcggcccgggaaaacctaaacctagcttttcgtagtacaacgcctccgccgctccttcattagctcaacatggttctcggcctctacaccttcgccgacatcgacgccgacggagcaccccgcctcgaggttgccgatggcgaggagttcgtccgtgtcgatcgcgttgtcgagcttgccctcggtccccgggtgctgaaggcccctggaaccctttacctcaccaccaggagggtgatttgggtcagcgatggcggcgagggctacgctgtggacttcgttgccatctcgctccacgccgtgtcgcgtgatcccgaggcgtatccatacccctgcatctacacacagattctgaaacaaatggagaactcgagctctcaaaagttatggaaatgcgcatcataccttcagatcctggtcaattggatgaactctttgaagcattctgcaattgcgctgagcttaaccctgatcctagtgctgagagtgatgaaaaacatggctgggttcatggtgatgagggttatgaagatacggtagatggaagcgacactgagttttcagatgtcaacccaattggtcaaactggtgagcaggatattaaccatgctgtaatcgagctccagatcaatgaccaacgttttgaggacgcggtagatgaggagagtcacaggaacgggaactagggaccatgtgaattggtcgtcgtcaattcagcaaacttgtctgtaagaacttcacttttctcatgttgcaggatcatgtggaccaacttgaatggcaacaatgggggataacgagctttattatatgagttgtgcctgtaccgtacgtgcatgaccatctatggtcatatgactactgactagtattttaaaggggaagggggtgcaaatcgatacccggccttgtgcaacacattttccttagcaaaagaaaaaaaaatgttgtttggctaagtaaaaatgtagtgttgaaggatcgaaagtggagaggtgtaaatttggttagttgtctctcttgaaaaagtaaacaccaccactcctggctggttttgtaaacaacattccagcagtagcttccaatccat

SEQ ID NO: 43321 - DNA, 772 bp, Zea mays
  Clone ID: MRT4577_139516C.1
ttgggaccctcgaggcggccccggacagcctgggcggcctcaccgcccctccggcctccgccgcgtgctcgtcccaaccctgtcgccggcaagccatggcgtcgcgcttccgctccttcactcgcccggccgccgccgccttcctccggtccactgccagccgaagcccctccgcttcccttccccgcaccctcgctcctgtccctagggcttcggccacggggcggcgcatggctctggcgcggtctctgcaaccgctgcacagcgccgtctcggcggcccggctgacgtcgcggctgggggcggaggtggaccgggccgtgtcgcaggagacaggtctcagtgtccctcgataatgaaaggaactgctccagatggcagcaacatcagcagcagatagttgtaagacttggtcatcataataatcattcttgttaaacggttacgttgtttatttagtggccactttttgctatgcgctaacggcgcatgtttgacctcttaccataatacattcctggtaagggcttttcttttgaattctatgtgtggtcaaggttttaatgagcatagtcatgttcttgtacgcctgtctccatttatatatgtggagatatgggcatcagttcaaagctgggatcaaatttctgggtagcatcccggcaaaatgtgacattttgttgcaaaaaaaaaaaaaaaaagtcgcccgtaaataaaattctcttgaaatatagcgaagattgaattgaaaaaaaaaaaaaaaaaagcggcc

SEQ ID NO: 43322 - DNA, 863 bp, Zea mays
  Clone ID: MRT4577_139517C.1
cgggaaagccccaaaacctaaacctagcttttcgtagtacaacgcctccgccgctccttccattagctcagacatggttctcggtctctacaccttcgccgacatcgacgccgacggagcaccccgcctcgaggttgccgatggcgaggagttcgtccgtgtcgatcgcgttgttgagcttgccctcggtccccgggtgctgaaggccccgggaaccctttacctcaccaccaggagggtgatttgggtcagcgatggcggcgagggctacgctgtggacttcgttgccatctcgctccacgccgtgtcgcgtgatcccgaggcgtatccatacccctgcatctacacacagatcgagacggaagctatttctgacgaggagtctgatgtgtcagattctgaaacaaatggagaactcgagctctcaaaagttatggaaatgcgcatcataccttcagatcctggtcaattggatgaactctttgaagcattctgcaattgcgctgagcttaaccctgatcctagtgctgagagtgatgaagaacatggctgggttcatggtgatgagggttatgaagatacggtagatggaagcgacactgagttttcagatgtcaacccaattggtcaaactgctccagatcaatgaccaacgttttgaggatgcggtagatgaggagagtcacaggaacgggaactagggaccatgtgaattggtccattgtaagtcggtcgtcgatgcagcatacttgtctgtaaagacttcacttttctcatgttgtcagatcatgtggaccaacttgaatggcaacaatgggggataacgagcttattaaaataaaaaaaaaaaaaaaaaagcggcc

SEQ ID NO: 43323 - DNA, 383 bp, Zea mays
  Clone ID: MRT4577_139518C.1
cgcacgccatggtgtcgagtttcattccctccgtcttctatctgctctacgacgctgaggtcgccctcatcgtcttcttccccaaccgcgctaagcccagccttccctccatcaccgagatcctgcaccgtctacagttcgctggccgagctcctccctcgcgctcggatccagccactgacgcccagccccaacgcgacgtcacacacccttggcgagcccctcactattcttattatcctgcactcgatgtgttcgacgaaatgtcgcagcaagctccgccccggatctgtgcagccccaacacacaccgtcgatctgcgcagctacgaccacgacagctccctcgcatcgtgtgctctgcctcatcgcactcgccgtgct

SEQ ID NO: 43324 - DNA, 739 bp, Zea mays
  Clone ID: MRT4577_139519C.1
aaaaacccgcacggcctcaccgcccctccggcctccgccgcgtgctcgtcccaaccctgtcgccggcaagccatggcgtcgcgcttccgctccttcactcgcccggccgccgccgccttcctccggtccactgccagccgaagcccctccgcttcccttccccgcaccctcgctcctgtccctagggcttcggccacggggcggcgcatggctctggcgcggtctctgcaaccgctgcacagcgccgtctcggcggcccggctgacgtcgcggctgggggcggaggtggaccgggccgtgtcgcagggtacgctctgcagttcctacccgggagtctgagtctgatacagtgtactaatctttgcaacgctacaagacaggtctcagtgtccctcgataatgaaaggaactgctccagatggcagcaacatcagcagcagatagttgtaagacttggtcatcataataatcattcttgttaaacggttacgttgtttatttagtggccactttttgctatgcgctaacggcgcatgtttgacctcttaccataatacattcctggtaagggcttttcttttgaattctatgtgtggtcaaggttttaatgagcatagtcatgttcttgtacgcctgtctccatttatatatgtggagatatgggcatcagttcaaagctgggatcaaatttctgggtagcatcccggcaaaatgtgacattttgttgcaaatgttgttt

SEQ ID NO: 43325 - DNA, 790 bp, Zea mays
  Clone ID: MRT4577_13951C.1
cacaaggtcgggaagggttcccgcgagctcaccctctccactcgcgcacccgccgccgcttcctttatctcacgcacccgtcgtcgcctcctctccctcgcgcaattggggccagctgttgggacgacgttgaggacgagggcgatgacgtggtcggcctcctccactctgtggagacaaccaaggcggtcgcggtggcggtcgctagcatgcaaccccactgagtcgagctcatacggcagctcgacgcctcctgtgagacacgccgccacgagccgccttctccacccacatctgcacgcgcaacacaaatctcgtcgtcggcagcttccacaccgccactatggcagccagtaggagggccagcgacagccgcgtcgccgttattcctctgaccctcttgctgatcgagagaggtggctgagagaggtggaccggccgaccggatgagcttgtggctagctggaggaagaggtgaggagatgtatgatctgaatgggagtgggtagtggtggtggcctggcgacggacagcagtgcagagtgacgaccttgctgctgttgtgtcatggcgagagtgctttagtagcttctttatttgttttgaccagtctataaaataaacaaagaatcattagcaattatgtaaccacttgcttgtggattgtggtaattatgtcatatacgataaaacctgttagatatgtcacatatatgcttgttgcttgaaatactaacagcacaatgcatttattaaaaaaaaaaaaaaaaaggccaaaaaaaaaaaaaaa

SEQ ID NO: 43326 - DNA, 2085 bp, Zea mays
  Clone ID: MRT4577_139520C.1
gcctacaacctaaacctagcttttcgtcagactacgcctccgccgctccttccattagctcagacatggttctcggcctctacaccttcgccgacatcgacgccgacggagcaccccgcctcgaggttgccgatggcgaggagttcgtccgtgtcgatcgcgttgtcgagcttgccctcggtccccgggtgctgaaggcccctggaaccctttacctcaccaccaggagggtgatttgggtcagcgatggcggcgagggctacgctgtggacttcgttgccatctcgctccacgccgtgtcgcgtgatcccgaggcgtatccatacccctgcatctacacacagattggagtgatgcacgtgaaggtaagtgttctaaatggttctggttagtcataatgctactagtttatttcacatgagagttcgtttatgctgattttggatgttatttgatattacaattgtgatgttcatttggcaagtacgttttactcgtagctcttttgttttgtctattgtattttatttttgaacattgtagttctagcttttgatttgcacttcttgcatagaaggaagtttcaatatgttgtaatgtctatcttttctttctataaaacataagtttttggtttctataaataaaagggctgactattgtgttaaatgttcacttggtatatggggagccttatagatttgggaggaccattccaattacacgcgagctatttttctttggtccatgtgtaccagtgtattatcatcttttcatagctctgaattcggcacgaggattcttcgggcctggtgggagtgggactacttcacactaaaattccaccttggagaggtaactgaggtgcttgccttagaagttggctcaaacttcagcaatgggaggttttgctgagaatgatcgagacggaagctatttctgacgaggagtctgatgtgtcagattctgaaacaaatggagaactcgagctctcaaaagttatggaaatgcgcatcataccttcagatcctggtcaattggatgaactctttgaagcattctgcaattgcgctgagcttaaccctgatcctagtgctgagagtgatgaagaacatggctgggttcatggtgatgagggttatgaagatacggtagatggaagcgacactgagttttcagatgtcaacccaattggtcaaactggtgagcaggatattaaccatgctgtaatcgagctccagatcaatgaccaacgttttgaggacgcggtagatgaggagagtcacaggaacgggaactagggaccatgtgaattggtccgtcgtcgatgcagcatacttgtctgtaaagacttcacttttctcatgttgtcagatcatgtggaccaacttgaatggcaacaatgggggataacgagctttattatatgagttgtgcctgtaccatacgtgcatgaccatctatggtcatatgactactgactagtattttagagggcgagggggtgcaaatcgatacccggccttgtgcaacacattttccttagcaaaagaaaaaaaatgttgtttggccaagtaaaattgtagtgttgaagggtcgaaagtggagaggtgtaaagttggttagttccacatcgcactatttctgtctgagtgtctctcttgaaacagtaaacaacaccactcctgtctggttttgtaaacaacattccagcagtaaaaaaaaaaaaaaaaaagcggccaacgttttgaggacgcggtagatgaggagagtcacaggaacgggaactagggaccatgtgaattggtccattgtaagtcggtcgtcgatgcggcatacttgtctgtaaagacttcacttttctcatgttgtcatatcatgtggaccaacttgaatggtcggttcgcgacctcctggatgtcttctgattcgggggatagtttgatgcccgtttctggtgatgaatgtgaacttcgtcgtgttatatagatgcatatttctcgaaaatgcaagctttggctgggttcacggcacatataagtacataaagttgttggtttcctaaccgtcttaattgaaagacaa

SEQ ID NO: 43327 - DNA, 279 bp, Zea mays
  Clone ID: MRT4577_139521C.1
agcagggaaggggttttttttttttaccttaagcccgctttcttacacgataaccccacgaggcgaaaaagagcacagaaagactaagactacccccttcccctcagggagcaaaactccctttgcctccggctctaaacgtagaaagacctggccacctagggggggcacaaaaaacccaaatcgggcgttcacaatggacctcgacacaaacgggcggggagcttacaggggtcccgaaggcgcaggaagctcacaggccaaacgggggtgttcagc

SEQ ID NO: 43328 - DNA, 1051 bp, Zea mays
  Clone ID: MRT4577_139522C.1
cacagatgaccggatatgtctccacaagatattaccgtgctccggagatcatgctgacctggcagaagtacgacgtcgaggtcgatatctggagtgcagggtgtatctttgcggaaatgttggagggaaagccactcttccccggaaaggaccatgtcaaccagttttcgatcatcacagagctactgggaagcccaccggaggatgtcatccataccatctgtagtgagaatacactgcgattcgtccagtcgttacccaggcgcgagcgtatcccactctcccaaaagttcaagaacgccgatccagccgcggtcgatctgctcgaacggatgctcgtcttcgatccaaagaagagaatctcggccgcacaggctctagcacacgagtaccttgctccgtatcacgatccgtcagatgagcccgtagcagccgagaagttcgattggtcttttaacgatgccgaccttccggttgacacatggaaaattatgatgtacagcgagattctcgattatcacaacgtcgaccaaaatgatccttctctctagacaagacgaaaagtcgaacaaaaacaacaccaggtactattaacatgacggacaaaaaaaggaaacgggcattggcagaaagaaacgagacataaaaggcgttttttttattactacccaaacgattcgatgaacagacctttttctaccttcttttttttgggggggagagatgaaataatgcacagacacacacgagagccccccaaaagagatttttacatcttggcttttacaaacctactttcactcttcactcttcacttttcaccttactttctctctagtccgtcagttttcaacgatactaaggggggtttatgggtctttcggattttgacgattcgtatttttttaaagcttctttttgatgtttcctttgctattatgtatattgaatcttcattcctcttttgttttccctttgtggaattttgggcttccaatgatatccatttgatcagatcagaaagaaacaaaaagaatactttttcctctac

SEQ ID NO: 43329 - DNA, 630 bp, Zea mays
  Clone ID: MRT4577_139523C.1
gttgaacaagacagatcccctctcctgatcgttgctgttcctcacagcaccatccatggtggccgagccggatcaacaagcagcccccgcggctcaggacaccggccgcgcacatcgtgtgacttgaccgcctccaggagcctaccctgaggagttccacatccgcatcctcacccccgtcctcggcagcgaacagaaggacagggacgcggtgctctaccagtactataacgccgccagcagattctccgcgaaggtcaccccccaaaaagtcgaggatctcctggaggatccaatggctctccgggctgtgtcgagccaaacgttatgacctacttggctctgtgatctgggactcagcaagtgacgacactgaccttgggacttatgttgaacgtcgtatgacagatccacaatattgtgccctaatatgggtgtaatgggactaggactcgacgaatgaggatagcactgtactactgaaataataagggacgtatcgactatatactgctttgacgcttgctcagccctgatctaaagcttgcaatgaaccaatgcgcatgatttcaataccatgactagtatgctatgcttgagtgctgcttgcttcagccagatgcaaattcg

SEQ ID NO: 43330 - DNA, 2062 bp, Zea mays
  Clone ID: MRT4577_139524C.1
gggtacctccggcgaggggtctaaccccaaaccctaaaccatggcgccgccggccccatccgtcggtccccgcctcctactccgccgcctcctctctacggctaccgaagcggcggcggagacacctgcgcccaccgcccccagctccgccgccgccgcgaagccggcgaaacaggacccgaggctgctctaccgtcgtttgtcggcgcttggaagcgccggggaggggagcgtgtcgcgggttttgaacaagtgggtgcgggagggcggcgcgacgcgaagcgacgacctcgtcaagcatgtcaaggagctccgcaagtacaagcgtcacgcccacgccctcgagttgatggattggatggtcaatgcaaggggtatgaacatgtcacacactaaccatgcaatacgtctggaactcatctataaagtgcgtggtcttgaggcagctgagaattattttgctaaccttcctgatccagcgaaaaatcatcgaacttacggctcccttcttagttgttattgctcagcaaaaatggaagagaaagcaacaaatctctaccgccagatggatgaacttggcatctggtccagtacactacccatcaacaatcttatgtccctttacatgaagttagaccagtataggaaggttgttagtctctttgaggagatgaaactgaagaatgttaaaccgaatagcctcacatgctgcattttaatgaccagctatgcagcattgaacaagatagatgacattgaagaacttctaaaagaaatggtagaaaaagatgtgactcttgggtggtctgcatacagcacacttgcttctatctatgtaaatgctggacaatttggaaaagcagaatctgctctgaagaaacttgagggccttatcagtgctcatgatgacagacagccttttgatttccttctgagcctatacgcttcactaggaaatttgagcgaggtcaatagggtatggaatgtgataaagtccaaattctcgaaggtaactaacacaagctaccttggcatgcttcacgctctttacaagctcaatgatattgaccgtatgaagcagatctatatggagtgggaatctaattatgaaacctttgatgtaaagctgacgaatatgatgattcgcagccatctgaaggttggcatgaccgaggaagcagaaatgttggtggagaaggtcaaggaaaatggtgcagagtttgacaccaaaacatgtgagttgtttcttgatcactacatgggcactgaggacatgaactcagcactgaactggttagagaatatgactaaactctccaagaaagcagagaagctcgatcaggacaggatctacaagttccagaagtatttcgaagaacacaaggatgctgacggtgcagagaggttctgcaactgcctgaggacgctagggtgcattgacgggaaagcatacgagtctctcttacgcacatacttggcagccggtaagaaaagctgttcactccgccaacagataaaaaacgataaggttgagatctgctatgacattgggaagctactcaagaggttgggcgacaaggggcgatgagatacatatttatcttcgtttttaatttgagagagattagttctgttgatcctgtacgtccatgagcatcagaaaccaaatgtcggtccaacggttgaaaatgtatcagttctttcgttgttcatgaaaaggatagctcatggctgggctggtatcgttccggcttttgcgttcttacaagaagcagtggggaacaataagattcttgtaagtgcaacgtgaggtcttgtctagctaggcttttttgagatacacttttcttctgaaatgaaattgctgttacaacacgaaaaaaaaaaaaaaaacgcttcactttccatgtctaaagtcagtgtgccgtcaggacatcaggtttatgtcgtgacaacgatatgtgcacgctcgcgaggagtgtagtgtggataggtctttgtaacagagcagcaattcgtgctggaaataattggctgcaggacgttagtccaaagctgtccg

SEQ ID NO: 43331 - DNA, 346 bp, Zea mays
  Clone ID: MRT4577_139525C.1
accacacatactgggacgcgggtgactctgcggtcgaagccaccgacgacggtaagggactgcgcatgcctgtgatcaaggaacggaaccacgacgggacgctagacttctggctcataaggaaggtcaccaggcccttgaagctgaacaaggacatcaacgctctgtaccatgagggcgcctacatggtcactgccagctacttcaacaacggggacaaaatcatctacaccgtgcagtcgcaggaacacaccaccacgatcggcgaaagaagcctaccgggtctcgcataggctgcacgcactactccatgctccgtacatcctcgagagatctgagagagacc

SEQ ID NO: 43332 - DNA, 543 bp, Zea mays
  unsure (1)..(543): unsure at all n locations
  Clone ID: MRT4577_139526C.1
acagtaggtagacacgggagcgcacagcatggggcatgtgcattgcgcacgtgcatgcacgccgtggctgccgatatggacacatatggctttcttcgtacggtccaggcctccaagtaaaggctccattcnatgtataacctcaggatgcgttcatggcagccgtgtagcttcgtcggctgactaccccttctctcgcatgagtatcattggtatcaaggcatcggtctacgcctactttcactcgacggacgcagtaaagcacacaggctagtggggttctgtatgcacatagatggcggtatcaaactgactacatcctcgcatggtttctccaagacacatcagacatcctcgctcaaacgtactcgcacagttgctctaacagcctgacgacgcctatgaccgcgccaagtagacgagaaggtacctggacggcgaatactanttggttcctatctatggtgagaatcgcctcggatcctacattgttatccctaacggctctgagaaggatactccttatagttgcatggaagtaac

SEQ ID NO: 43333 - DNA, 269 bp, Zea mays
  Clone ID: MRT4577_139527C.1
caggaaaactgttcaggaagtgtgatgggatgagctgtggctgtctctgaaaagggcctaccatataacttattactttcaaggatacctttggctcttactacaatagtttataaagcattttatagaaacacaccagggaatacgtggtgaactacatgtatgatcagtgaactgtgactagaattaaccttaaaatctcatgtatgtggggccagagcaacacaggtgggaaacgcagcggacctctgcctcctcggcctcaacat

SEQ ID NO: 43334 - DNA, 302 bp, Zea mays
  Clone ID: MRT4577_139528C.1
cgttcgttacgtgatccgcgcaatgcacctgatggaattcgccttaccgagaagattgccggtcgctgggacggcgtccagcaccgcgtggacgtgcggtgcgataagctccacagtcgcttcacagcgcgacgctataccacccagcaggaagtggatgcggccgtctacgacgggtcaagtgaccacgacggctatgacgaggcgggcttctatatcaacgaccctgacgagaagcccatcttcgactagggtcccatcttcgacaacgagcctgttaccttccacgccgccaacgactc

SEQ ID NO: 43335 - DNA, 464 bp, Zea mays
  Clone ID: MRT4577_139529C.1
tttgttttttttttttttttttttttttttttttttttttttttaaaaaacccctgtaataaattgataaccacagggatcaacccccctccacattatttattcagctatagtcccaaaaaaatctcccaacccttttcacccaaaatttttaggggaaacgatctgccatttacaaaggagggaactgaaaccgcgggaaacttggttgatataaaaagcaaaattgttaaaaaaaacgatgggatcataaaataattaaactgaaactcccgacaagctaaaaagcaaggggtggttcactgggccgaaaactccggtaaatggggggtgcacccggtccaaaacccaaaagtgcaatctggacctgttttgaggggcttgtcctggcggagatctgcccactcaatttgttgttaaaaccaagacaaactgccattttcaacccccttccgagggaaaac

SEQ ID NO: 43336 - DNA, 291 bp, Zea mays
  Clone ID: MRT4577_13952C.1
ctatattcaggaataaaagaaggcagcaaacatcatatataagccttgaagaaattgatccaccacatgaaacatgtcatttgtgttagaaagagcaatgaaaaggaacaccaatgcccccaaggccccaactatccacattcttgtttgcttagttaccaggcaaagaggtctggtccagcatcaccatcaactgaagcattcacgacaaatggctcttctttcttggaatttgattttatatagttcagcaactgctttcctgcagcattacttggttaggacattaag

SEQ ID NO: 43337 - DNA, 297 bp, Zea mays
  Clone ID: MRT4577_139530C.1
gtatagcggttttttttaactattactttttaagcaaaagtaccaccccccttgtttgattcatgttcaaaagtaggacaaaaaaacccaggggcccccagaggttaaaaaaaaggttttgttcacttcccaaaattcgaaacaaaatattcaattttttttggtttaattggccaccaccctatttccaggaaaaaaaaattgttttttggaaactcatgtttgccaaaaacccaccaaaatttacccgttgattgcccccggatttatacctttccaatatttaaaaaggaaatt

SEQ ID NO: 43338 - DNA, 298 bp, Zea mays
  Clone ID: MRT4577_139531C.1
cgacgctcacggcttcatggaaaaatgcgtgagggcaagcctggctctataactgttgcgcgcccccgaaccaaccagaccttagaactgctatcacattaccagacagtgcggcatgctaacacctacacctccacccggttaacctgcctaccatacatatgcgctagacaggacgctagctcggcggcgcagatgcacatcccgcgcagagaagccaccgcagagcctggggccttgatagacgatcctcgacacggtcggagcccagggagcactacgattgctgactatacac

SEQ ID NO: 43339 - DNA, 161 bp, Zea mays
  Clone ID: MRT4577_139532C.1
atctagccgctcggttccctaccggagaatagcccggagccgggggtcttagatattcttgggtcaacgctaatcacgcctcctctccacaggcaggcgacccatttgaagcgaatttgtctcgccctcaccccgaatctgttgcttcaccttttgataaa

SEQ ID NO: 43340 - DNA, 3582 bp, Zea mays
  Clone ID: MRT4577_139533C.1
aattcggcacgaggccaatcccaatcccgagctccaagcaaacccacctccccggctgtcccccactcgccgatccagatctcctccactccaaccggacgcctccgccgccgctggcatcggtcgagccacacgcgcacgccgctgaggaacccggagcgggcgccggcaatggagcagctgcggacgatcgggcgggagctggcgatggggtcgcagggcgggtgggggcagtccaaggagttcctcgacctcgtcaagtccatcggcgaggcgcgctccaaggcggaggaggaccgcatcatcgcgcgcgagcttgagcacctcaagcgccgcctcgccgaccccgacgtgccacgccgcaagatgaaggagctcctcctccgcctcgtctacgccgagatgctcggccacgacgcctccttcggccacatccacgccgttaagatgacccacgacgagtcgctcccgctcaagcggaccggttacctcgctgtcgcgctctttctcgacgaacgccacgacctcgtcatcctcgtggtcaacaccatccagaaggacctcaggtcggacaattacctcgtcgtctgcgcagcgctcaccgccgcgtgccgccttatcggtgaggaggccatccctgccgtgctgccccaggttgtagagctgctcgcgcaccccaaggaggctgtgaggaagaaggccgtcatggcactacaccggttctaccagcgatccccctcctccgtctcccacctcgtctccaacttccgcaagaggctctgtgataatgatccaggggtgatgggtgcaactctttgccccctctatgacctgattttggaggaaccaaattcgtacaaggatttggttgttagtttagctatcatcctcaaacaagttgcagagaggagaccaccgacttcctatgattaccgacatatgcaagcaccgtttattcatcttcaacactcgcaagcacttgctgtacgtggtcatagcgataatcaagcctgtggtcctatgtacacaggaccgagtgacatatcccggaagtcctccaacggttcgaagaaacagcatgctatactgtatgaatgcatatgctgtatttcatccattttgccaaaccctaagatgctagaggctgcagccgaaacaacatcaaagtttctgaagactgctaggcataatcttaagtacatgggtattgatgctcttggccggctaataaaaataaacccagatattgcagaagagcaccagctagctgtcattgattgcctagaggatccagatgacactttgaagcgcaagacctttgagcttctttataagatgacaaaatcaacaaatgttgaagtgattgttgataggatgattgaatacatgatcaacataactgatcatcattataagacagaaattgcatcacgttgtgttgaacttgcagagcaatttgcgcctagcaatcagtggttcatccagaccatgaacaaagtctttgagcatgccggagatcttgtcaacatcagagtggcgcacaatctgatgcggctaattgctgaaggctttggagaggaggatgaaggtgctgacagtcagctaagatcatcggctgtggattcatatctccgcattgtcggagagccaaagcttccttcttcgtttctgcagataatatgctgggttttgggggaatatggaacagcagatggaaaatattcagcttcttatattattgggaagttgtgtgatgtggcagaggcccacctcactgatgacactgtcaaggcatatgcgatctcagcaattctgaagacatttgcgtttgaaatcactcttggaagaaagatcgatttgctgcctgagtgtcaaacattggtagatgaattgtcagcttcacattcgacggacttgcagcaacgggcatacgagctacaggctttactaggcttggacaaaactgctgttgaaagtgttatgcccgcagatgcaagctgtgaagacattgaggtcgacagaagcctctcatttctaaacagttatgtgcagcaagccttggaaaatggtgcgtccccttacattccagagagtgaacgctctggtgttataagtgtcggcagctacagaagccaagaacaacaggaaacatctgcccatactcttagatttgaggcctatgagatgcctaaaccttcgttgccactagcaacttcacaaaccagcatgtccacaccacctactgatctggttccagttccagaggcaggctactacaaggaagacaatcaaacatcaatgtctcaaccaccaagtgatgcaatttctggtgagtttggtgtcaaacttcgccttgatggtgttcaaaagaaatggggaaggccaacatattcttcttctacaccctcaagctcgatctctagtcaaccaacacccaatggggcctctcattctgatgggggagggtcaagttcgcaaccacgggagtcatcatacggttctaagagacagcagggcacggaagtttcagcagaaaagcaacggctggctgcttcactttttggttcagcagcagctaaagctgataggaaagcacaagcttctcgaaagacagcaaaggacagtccctcaactgagaaagtggctaccactaatgtgactgcccagcctgttaaggagcaagtaatccctgctgcaccaccgcctgatctgctggatctgggtgatgagcctgtttcatcgagtccaccgtcggctgaccctttctcacagctagaggggctccttggaccagcatcggctgccccggtgctttctggaactccggctaccagcacttccaaagcaccaggccttctgtcaatcttctcagatgatgtaccaaccggagtgactagtgtgtccaccgatcccactctaggtgatgttaattcgatgggctcccgcaaaggagcagctgcagtggcttcaatgaagggcccgagcctccaagatgccttgcaaaaggatgcggctgcacgacaagtaggagtgacaccaacagtgaacaaccccaatcttttcaaggacttgctaggctgaaggggacagtagggcacaccatatgctctgtgtggcctctttgggtacgtggagttcgtctccgacatggttcgatcaccgaaacgacgccgaactcgctgtttgatcagcgtaggctggggttttagggttacaagggctaatatttgtttgagagtcacaagacacgacctatctccttccaattgtggtttgtggagatttgtggatggttgcgggtatttttttttcctttacgctcttgtaattttgtcctgagactggtgtacatgtgtctacatgatgtgtaatttgtacatgaagaccatggtccgtccagaagcgtatgccgtcgtctttttgttcattcatgtaggaggggcatgctcatctgtgctttcagagtttcccatatatgttgattaatataacaattgatgtcattctctggaacttgggtgaaataaaaaaaatggtacgtgcgggtgcagcaaaaaaaaaaagaaaaaaaaaaaaaaaaaa

SEQ ID NO: 43341 - DNA, 3656 bp, Zea mays
  Clone ID: MRT4577_139534C.1
aattcggcacgagggttccctactcgccgatccagatctcctacagctttccactccgccactccaaccggacgcctccgccgtcgccggcggcggtcgagccacgcgcgcacgccgctgaggaacccggagagggcggcggcaatggagcagctgcggacgttcgggcgggagctggcgatggggtcgcagggcgggtgggggcagtccaaggatttcctcgacctcgtcaagtctatcggcgaggcgcgctccaaggcggaggaggaccgcatcatcgcgcgcgagctcgagcacctcaagcgccgcctggccgaccccgacgtgccacgccgcaagatgaaggagcttctcctccgcctagtctacgccgagatgctcggccacgacgcttccttcggccacatccacgccgtcaagatgacccacgacgagtcgctaccgctcaagcgtaccggctacctcgccgtcgcactcttcctcgacgagcgccacgacctcgtcatcctcgtggtcaacaccatccagaaggacctcaggtcggacaactacctcgtcgtctgcgcagcactcaccgccgcgtgccgccttattggtgaggaggccatccccgccgtgctgccccaggtcgtagatctgctcgtgcaccccaaggaggctgtgaggaagaaggccgtcatggcattacaccggttctaccagcgatcctcctcctccgtttcccacctcgtctccaacttccgcaagaggctatgtgataatgatccaggggtaatgggtgcaactctatgccccctctatgacctgatttcggaggaaccaaattcgtacaaggatttggttgttagtttcgttaacatcctcaaacaagttgctgagaggaggcttccgacttcctacgattatcaccaaatgcctgcaccatttattcagataaaactattgaagatacttgctgtgcttggcagtggtgataaacaagcaagtggacatatgtacactgtattgggcgacatattcaagaagggtgacactgcgagcaacattggcaatgctatactgtatgaatgcatatgctgcatttcatccattttcccaaaccctaagatgctagtggctgcagctgaaacaacatcaaagtttctgaagagtgatagtcataatcttaagtacatgggcattgatgctcttggcaggttaataaaaataaatccagatattgcagaagagcaccagctggctgtcattgattgcttagaggacccagatgacactttgaagcgcaagacatttgagcttctttataagatgacaaagtcaacaaatgttgaggtgattgttgataggatgattgagtacatgatcaacataactgatcatcattacaagacagaaattgcatcacgttgtgtcgaactcgcagagcaatttgcgcctagcaatcagtggttcatccagaccatgaacagagtttttgagcatgctggagatcttgtcaacatcagagtggcacacaatttgatgcggctaattgctgaaggctttggagatgaggacgaaggtgctgacagtcagctaagatcatcggctgtagattcttatgtccgcattgtcggagagccaaagcttccttcttctttccttcagataatatgctgggtgttgggggaatatggaacagcagatggaaaacattcggcttcttatattattgggaaattgtgtgatgtggcagaggcccacctcactgatgacactgtcaaggcgtatgcaatctcagcaattctgaagatatttgcgtttgaaatcgctcttggaaggaggattgatttgctgcctgagtgtcaaacattggtagatgaattgttagcttcacattcaacagacctgcagcaacgggcatacgagctacatgctttactaggcttgggcaaaaatgatgttgaaagtgttatgcctgcagatgcaagctgtgaagatattgaggtcgacagaaacctctcatttctagacagttatgtgcagcaagccttggaaaacggtgcatcaccttacattccagagagtgaacgctctggtcttacaagtgttggcagctacagaagccaagaacaacaggaaacatctgcccatactcttagattcgaggcctatgagatgcctaaaccttctttgccactagcaacttcacaaaccagcatgtccacaccaaatactgaccttgttccagtttcagagccaggctactataaggaagaccatcaaacatcaaggcctcaaccaccaagcgatgcggtttctggtgagtttggtgtcaaactccgccttgatggggttcaaaagaaatggggaaggtcaacatattcctcttccacaccctcaagctcgatgtccagtcaacaaacaacaaatggggcctctcattctgatgggggagggccaagttcacagccacgggagtcctcatacggttcgaagagacagcagggcacagaagtctcagcagaaaagcaacggctggctgcttcgctttttggttcggcagcagctagagctgacaggaaagcacaagcttctcgaaagacagggaaggacagtccctcaactgagaaagtagctaccactaatgtggctgcccagtctgttaaggagcaagtaatcccagctgctgcaccaccgcctgatctgctggatctgggtgacgagacagttccatcgagccgtccatcggctgaccctttctcacagttggtgggtcttcttggaccagcatctgctgctccggcgctttctgggactccggctaccactaccagtacttccaaagcaccagatcttatgtcaatcttctcagatgatgtaccaactggagtgactagtagtgggtccaccgatcccactccaggtgatgctatttcggtgagctcccacaaaggagcgacggcagtggcaccaaagaagggctcgagccttcaagatgccttgcaaaaggactcgactgcacggcaagtaggtgtgacaccgacagggaacaaccccaatcttttcaaggacttgctaggctaaaggggacagtaaggcacaccgtatgctccgcgtggcctctttgggtagatggagttcatctccgacatgtctcgatcactgaaacagcgatgatctcgctgtttgatcagcgtaggaaaagggttgcaacttgcaagggctatatttgttctcgagtcacaagacacgacctgtcctccttccagttgggaggggggttgcgctgttgagatctgtgaatggttgcgggtatttttcctttaacctcttgtgattttgtgctgagactattgtacatgtgtttacatgacgtgtaatctgtacatgagaccgtggtacagaagcgtgtgccggcgcatttttgttcagctgggctagatacactacaattgctgggcactggaaagtaaaacaatgaaagaattggtgtcattctctggctggaataaaaatataaaacggtaaatgtgtagtgttgtttattgttgatgaaaacagtcgcagatttgtttttgcaacttttaactgttgagaagtaatgcaattctttttttcggttccaaaaaaaaaaaaaaaaaaaaaaagccgcagatttgtttttgcgccggtac

SEQ ID NO: 43342 - DNA, 374 bp, Zea mays
  Clone ID: MRT4577_139535C.1
acgcccaacgtacgacactcataccatgattttcttaacatatctaatcctacaaattatctaccggtaaaaatttaagtgtgttaccatgatatctacttagacaaatatatcatctattaactatatatacatctctatccaattatcacattcatcatatacctttatatatacttcacttttcatagacatcctaattgatatattatttcatacaccaaatacgtcatccttataaaaaacaccacagtcaatgtttaatcttcttcaatacaacaactagttcacttacaactacattatcctttaaccatattatttacctattctaactttacattcttttactgtcaatctaaaataataatcat

SEQ ID NO: 43343 - DNA, 757 bp, Zea mays
  Clone ID: MRT4577_139536C.1
ggccgcgggttttttttttttttttttgtgttcaatggtattcatgtagtttgtctctattctatcgttgtctcataccctcgtctatattctgtctttagaatctcttgtgcgagttgattggattacaagtgaggaaggacaccaagggcaccagacttctcgatgcttccaggctcatcactagaggcataggtgatcttgccgtggtcgataaccacggcgaaacgaccagttcgctcgcccaggttccagccgatgctggtggagaacttggcgttgtggtcggacatgaagagaatcttgtcatcggtgatgccattagccttggcccaaccgtgcatgacaaatgcgtcgttgacagcaacgacgatgacctggtcaacgcccttggccttgatctgctcaatgttctcgacgtaagaaggaacgtgagaggcactgcaagtaggagtgaaagcaccggggacagagatgaggacgaccttcttgctcttgaactcctggctggcgttgtagttggtgggagcaccacaggtagagaactcagcgatctcgggagtgggctggacgtagctaaagaagacaccctcggggaagtcggcgccgaccttgagttcaggcatgttgactgtgtttgtgtggttggtggtgtttgtgtgtttgcgtgtttgcgtggttgatggtgatgaatgaaagggttaaggtttgatgtgtgttaaactcccggccgggagatcgagccgaccccggccgg

SEQ ID NO: 43344 - DNA, 366 bp, Zea mays
  Clone ID: MRT4577_139537C.1
ctccgtcctgcgtctttctaaacagagggcaaaaggtctatttcaggaaatcgtgatgcactgactgcttggaccattactgatggatataattcggcttagttgaatagtattgtcagaccatttgatgtgtaataactcgctcaactatccgtaggacataacgccaaaattgtactgctaatgacccgcataacatttgtattgatctgtcctttggagcaagaatagcctgttctgtttaactcgaatgctaccataactcacatcaagcctgaccagaaccagtggtaccatgcttacaagatctacaacaagaaggctgctgaaactctttgatctgtatacttgggccatctatgccaa

SEQ ID NO: 43345 - DNA, 276 bp, Zea mays
  Clone ID: MRT4577_139538C.1
caaaatgttttctctactaaaaatcatctctaaaggatatcttccagaagtggagttacggaatcaaaaggttagactcatttatgttgacaagcttttttcccaaaatagttgtcccagtttacaccaaatttggaacattttagcctcagttatgaatgggaggcttgagagataactgtaggtgtacagaccacttgtggttcagtccaggtcaaacatgcacagcaactggaaggctctggaaatgctcatttgtttgcacatctctcagac

SEQ ID NO: 43346 - DNA, 169 bp, Zea mays
  Clone ID: MRT4577_139539C.1
atctaaggcggccgctgcttttcttcaggggtcgagaaatcaaatgtgttacagcgtccagttgcctctctcttcatattggccgggcgagaaatgatcatttggaactcctcgattcaacaaaaaacaccaggggaaggcgtgaacccatacgggaaggggaacccaa

SEQ ID NO: 43347 - DNA, 238 bp, Zea mays
  Clone ID: MRT4577_13953C.1
tacattcacttatacatcatcttcacttaccacataataaataataatacaagaaagatctaactatatgaaggacatcaaaaacctatcaccaataccacaaaatcttaacatacaaaacaaatacatattacatacacacctaacaatatcacttctaatctcttaatagacatttcactataactcaataccacaatatctcttataaaatcaaccataacatctaatccaaatc

SEQ ID NO: 43348 - DNA, 751 bp, Zea mays
  Clone ID: MRT4577_139540C.1
cgggccgggtcaaatcgcacgaggccagatccagcagaattgagtgacaggctcaaacacaagctagaagataggtgcttagtgagttaaccagtgggatgtcgctggaagatagtttgaagaagagggtggccaagtgccgcagggagtatgacattatttacaagcagctaccggtgctgctagagaagatggaaattctatttcctacggggaagaagatggagagctccgagccggagaacaaatccgaagcaaagggggagccggtcgacccgctgcgagccatgacgccggcagaaataggggagcgctacaaggatctggcggacaccgtcaagggattcctcaaggatctggacgaggccgagaaggagatcgtcgcaggcacgagccaggcggcaacgccacctgcttcagtggaagaccagtaataatcaagagcagcagcagcacaaccgcacaaggagagggaggcctggatctgcatcaggaggatcatcatcccgtctaataataattactccgtattagtttcctttcgtcagtcatgtttcccagttggttaatcatctggatgttgggtgataatttagctgttctggtgtgttgtgattccgatcgagtcgagcaggtcgtagctaggcgtgtgttcgtcggctgtatgtatcgctttcgatccgtggaatcggtcggagtacactgcctgctatatggttgtttatgtttatgctcgtgcttatccttactg

SEQ ID NO: 43349 - DNA, 688 bp, Zea mays
  unsure (1)..(688): unsure at all n locations
  Clone ID: MRT4577_139541C.1
ccctgcttgcaatattattataantttcaactagaacaggtggcgtctttatgggcgccctatcttccttgtgcacatgtcttattcaatattcccgcctcaacgaagtactgaaatatgtgccatgacacaataacaaagtgatttagtggcagtcatcaggatgagatgtctgtacaagtattagcatggaaatatcaaaatttctcaatggatgtaaaaatgacatcatcagaatcaatttaaatcatggaagagaagcgtcaatttcagatcttgaaagttacataaaccacacataccaaaaaaaaagcagccgtagtaaaatactgctagaattcaacacaaacacagtatgttatggcaatcaaagacacagtatgtaatacaccatatataaacacagtctaggaacacaaacacgttgtaggaacacaaacatattgtagggtacaatacgacaatataatacatatggtgcggacgcaggttccacaactgtctctaaaagacagcgtacatgcagttgctaaacggtgatcagcacaacaatacataactctaacagtttggagctccatagactatacatgtacggtagacaacgatcatatatcctttccgaagcagctgtacatagcagcttggatacaaagcagtagacaacgatcatccaaaagagcgaaca

SEQ ID NO: 43350 - DNA, 674 bp, Zea mays
  unsure (1)..(674): unsure at all n locations
  Clone ID: MRT4577_139542C.1
cctcgaggccggccgggacactcttccaacaaccgaaatcgatgttagtcctctcccatcggatctatcgacccgcataagcacatcgtctcctgacgatcacagagagctacgattcatccgagttaaggaagccatggaaaacaaggagattgggagacaggaccccgagaatacccatcctcagcttcaataactgcgactactatcagaaggcggaggacaatgaacatgtgctcccaccgctgcaaagagatgataacgaaggacgatcaggccaagctggatgcctcctctatcaacaacatggtcgaagactaccacttcctcatggatacgactgctgctgacagtaacacgtcatcaggtggtgcccaatctgacacgtaaataatgaaggggcagaatgccgctgatggtgccggatccattcacatatcgcaggctatctccaaagagggcaatgaatttcgaagcggagaagcgtcatgcagaagatgttgaacataaaatattcaagtgcctgtgcgttgaactgtgtagtgaaaaactccaccggctagctatagaagcacgactgcttgattaaactaacagactgctgacatggacagcattgtcaatgctagtccgacggagaaggaanacaagctctgaaagatgtatgtcagaat

SEQ ID NO: 43351 - DNA, 230 bp, Zea mays
  Clone ID: MRT4577_139543C.1
tggcttggaacctttgggctgatttatgtgcttggaagaagagaaactccgggtttgagtagatcgaaacgtttgagggaaaaatttaagataacggttttccttaagtatgtccactaaattactaatttcaatacaccaagggatcgattcaacctatattttgaaaccaattggccggaaggaactgcctaccttttgggttaagctgtaatttagtaccccttgga

SEQ ID NO: 43352 - DNA, 265 bp, Zea mays
  Clone ID: MRT4577_139544C.1
cccacgcgtccggcgggatccacagaaggatgagtgaagaggataagactgctgcttctgctgagcagccgaagagggcccctaagctcaatgaaaggatcctctcttctctgtccaggaggtccgtagctgctaatccttggcatgaacttgaaaccggtcctaatcctcctgcggttttaaaggtggtggtgggaacaacaaagggaaccaaagttaattttaaccttgacaggaaacctgaacggataaaggtgaaccaagt

SEQ ID NO: 43353 - DNA, 455 bp, Zea mays
  Clone ID: MRT4577_139546C.1
aagctacctagagctagctacctcccaccacccgcaccatttcctttaacagccaccgcattattgcaccgggtcgggctgctgttcgcggccacgacgctagtcgtcttcgtcccgcagctcgcggcgccagctgccccctgcccctactgccctacgccgacgccgccccctccgtcaccgcccccgcccccggtggtgaacccgccaccgtcacacacgccgtgccctcctcctacctactccccgtccacgcccacgggcacttgccccgtggacacactaaatcttctggcgcgcgtggacaccctgaacggactctctcacgcccttgtctggacccacgccaaccacacctgctgcccgctgctgtcccgcgtggtccacctccacgccgagctctgcctttgctccaccatcaaggccaacgcgctcagccacagactcgtgctccc

SEQ ID NO: 43354 - DNA, 902 bp, Zea mays
  Clone ID: MRT4577_139547C.1
ctagccactggccctgcccctgccgccgccgccgcccttggtgctgcccctgctgctgccgcccttggtgctgcccttgctgctgtcgcccttggtgctgcccctgctgccgtcgccgccgccactgccgctgccgtcaccgtcgccgtcgccgtcgtcgtcgtcgtcgtcgtcgtcttcaccctcgtcgccgccgtccgagtcctcctcatccgaggagtactccgactcatccgagccttcgagcccggagcgctcaacggcccggatgtacgtccagacctccgcggctatcccctgggagtcgtccgagtcatcggacgacgccgggggagagacgggagccggagacccctcggactcggaggagaactcctcctccgagtattccgagtcaccgaaatcctcagatggaggagtcggctcgcgcttgcgcttgttgttcttgcccatggcggaagcagacagaggggaagaaaagaaggcagtaaggagcagcgaagagatgtgaagaaaccagagaagcaaaggggttatttatagaatggaaaggcaaccgctcacttctaaccgcggtcactgaacagtcgcaaggcattcaataagcacttccacccatctgaagacatgtcagacggcggacgccgtttcatgcaacactacacccattgggactccagtcaacagcgcaaaggatatgattacactagccgtcccatcgcattactactcagaggcaaccggctaaaacactcagcgtaccaagccgtcccttgcccacacccattggggggggacgcccaggaattatcagtatatttttcaaacggtcacatccgtgcagggcacgcagtgaatacctcaagacaaaaatgagatatcagtaaggatcagagtaaagc

SEQ ID NO: 43355 - DNA, 441 bp, Zea mays
  Clone ID: MRT4577_139548C.1
aaaaaaaaacggggggggggaaaatccccacccaaaaaaaggattacggggaaacattttccccccgggcgaaaaaaaatgggggggcccatgaaaaaaaaaacggttgccggggggccggccccaaaaaccggattggtttttaaaacaggttaaaaggtaaaacgggggaccataggggaaaaaccatggcaaattttgggaaactaaaaaaagccggacccaaattgctaaaaagggttttgttggaaaaaagcaaaggcccacaaacatagaatgggggaagttccttttaaggccttgaaacaaaactggaaggagctaagaaactttttccctcccttgggggaaagggccccggccttgaaaacggtcggcggtcggggggggggaaggggcggccaaccttgggctgggcccttttggcctggggttttgggg

SEQ ID NO: 43356 - DNA, 279 bp, Zea mays
  Clone ID: MRT4577_139549C.1
cgcgcggacgccagcagagctcgagctgctgcagctgctgccgacgccagagtaacctcgatccccgagctccggataccggtgcctcgccatggctgaccagctgaccgaagaacagattgcagagttcaaggaagccttctccctctttgacaaggatggagatggcaccattaccaccaaggagctggggactgtgatgagatcgctggggcaaaaccccactgaggcggaactgcaggacatgatcaatgaggtggatgctgatggcaatgggac

SEQ ID NO: 43357 - DNA, 295 bp, Zea mays
  Clone ID: MRT4577_13954C.1
ggggggggagtaaaaggcacttttttaccataaagttattatttttgcttcatgtccattacctgggaattgttcatttcttagtgaaacagctggtgtttttgagatatgaggagatggcgggcataaacccaaatccaaatcttattcctaaaattgaaaccaacctagggggaaaagaggttattaaccgcttgcaaaacaacaagaacacgcacttggcaatatatttcaaatctaatggaggcgcaaatttaagcccccaatggcctgttttgcttctttacaaacctag

SEQ ID NO: 43358 - DNA, 217 bp, Zea mays
  Clone ID: MRT4577_139550C.1
acgcaaacatacacgcctccgtacacgcgtcatcccagccgttcacagctttctggggtctccagttcccgccgccggtccagtcccgtggcgggagaccaagagggagtggatttcgatgcacatcaggcatacccgtatccagttcagaaaggcatgcatgtagactgtcacggcttgaccatggaaatcatgctgactgtgaaatgcccggtga

SEQ ID NO: 43359 - DNA, 1160 bp, Zea mays
  unsure (1)..(1160): unsure at all n locations
  Clone ID: MRT4577_139551C.1
aagtgcaccaaatatattctcttcaaatatacccgcagcacgcggcatgcagcatcgctttcaggcaccgaacgtcgccccaccagtgcacacatgacatgagttgacagacatccgaagctgccgcgctgtgctgcctgcccactacgcaccgcccatgcccaggcaggccccagtctgaaacctatgtgccaaagcaaaccactaaacaaagccgtcggctcgcaaaccattagcggcgcgcggacgctgctctgctgcttaagcttataaaagcaggcggggggtgctgctgccaaccccgcccaccaaaccgcgccacccattgttgtcgcttctcacttctcactcaccaaccaacccaaccgagcaacttggctcgtaccgtacgtagtacctgctgcgacacgccgaggagctagacctgtcggagctaggacagtcagacacgagacgacagagaccatgtcgacgacgacgatgaaggcgagcgacccggggtccgcgtggttcggcagcggcgcacgcacccggtcggcggcggggataagccacaacgcgcggctcgtcaccaccgaggtcgccgcgttcgtgtccgtgctcggcctcgccctcttcctccacctctacgtctgccacgtgcgccgccgcaaccgccgccgcgcggcggcagtgctgccgacgaccacggccgccgcggcggcggcggcggccccgaagcgcgggctggatcccgcggccgtcgcggcgctgccgaccgtcctctacagggacgcgctgcgcgtcgctgatgaagatgctcagcagggagaggccggcgccgcggaggccacacggcgcccacgccgacgccggggacttggacgacttggaacggcagcagcattctgttgccgtcaataattagcctattgttttttattagaaaaaagaaggaaagaaaggcggcctttttagtctggtcgttctccacatcatttgtatatcccgcatttgcgtgagtggtgcagtagtaagacaggtctgtgactgtgagctcttgactttttttgatgaatgtaagagcccatttcanaagaaaaaaaaaaaaaaaaaaaaaaaaaaaaaaaaaaaaaaaccttgggggggggcccgggcccccattcccccttttgggtcgg

SEQ ID NO: 43360 - DNA, 181 bp, Zea mays
  Clone ID: MRT4577_139552C.1
gacccacgcgtacggccacacgtccgttaagcacttttttgtaccaacaatggcaactaaaatgtccgtccttcttatgctccttggtctttatgcaagcagctgctactgcaaccatatgcccacaatgctcacaagcgtttatagctttgcaccgcgctcctgacctactaacaacgat

SEQ ID NO: 43361 - DNA, 1076 bp, Zea mays
  unsure (1)..(1076): unsure at all n locations
  Clone ID: MRT4577_139553C.1
ccgggcccaaatcgcgccacccattgttgtcgcttctcacttctcactcaccaaccaacccaaccgagcaacttggctcgtaccgtacgtactacctgctccgacacgccgaggagctagagaggaccgcgcgcgtgctgctgacctgcgggagctaggacagacacgatacgacagataccatgtcgacgacgacgacgaaggcgagcgacccggggtccgcgtggttcggcagcggtgcacggacccggtcggcggcggggataagccacaacgcgcggctcgtcaccaccgcggtcgccgcgttcgtgtccgtgctcggcctcgccctcttcctccacctctacgtctgccacgtgcgccgccgcaaccgccgccgcgcggcggcagtgctgccgacgaccacgcncccgcggggnnggggnggcggccccgaagcgcgggctggatcccgcggccgtcgcggcgctgccgaccgtcctctacaggacgcgggcggcgccgacgatggcgccgagtgcaccatctgcctcggcgccgtgcaggaaggcgagctggtgcgggcgctcccggcctgcggccacgtgttccacgtcccctgcgtcgacacctggttcgcgtccagctcgtcgtgcccggtctgccgcgccgaggtcgagccgccgccgccgccggcactgagctcatcggctctgttcgtgcaggcggagaaggtggtgcaggacgccgtcaaggaggaggccggcagctccacgccggagagggggatcggtgcctgcgcgtcgctgatgaagatgctcagcagggagaggccggcgccgcggaggccacacgccgacgccggggacttggacgacttggaacggcagcagcattctgttgccgtcaataattagcctattgttttttattagaaaaaaaggaaagaaaggcggcctttttagtctggtcgttctccacatcatttgtatatcccgcatttgcgtgagtggtgcagtagtaagacaggtctgtgactgtgagctcttaacttttttttgatgaatgtaagagcccatttcaaaagaattggtatg

SEQ ID NO: 43362 - DNA, 872 bp, Zea mays
  Clone ID: MRT4577_139554C.1
ggctcttcgcctcatcgggcgccaaacctttccgatttcaaaccgcgcttcgcccacgagaagacgaagcccgaaagaaagggagaagtccccgccgtcgtcgtcgtagagcaaagccatgaagttcaaggccttctttaccgacgatggcatctccctcctcgacaagcgattcctaccggccatggacaaggtggggcgcgtctgccacgttttcttcacgcccacgcacgccatgctcctccacaacctgctcggcgccacggccgctgggcccgacggcggcggcccgcagtgcgtcgctcagttcgccaaggacctcctcttccgtgagtacaacctgtcctcgcgaaacgggaaccaaatcgccttctccgtcgaagtcgcgctgcttcaccgcgcgctccgcagcgtgctcgccgtccacgcgcagccgccggccgccggggacgccgctggtgcccccgctatacaggtgaggctcgtcaacaagctgcccgcagggtcacgaaccgccacgccattcctcactttcgaaaccaagggcgcccacgcggccgtcgtgcaggatgtgcccatctcgcgtcctctctcacgctccgacgtcgagcggttgcacgcggcccttgacgctgccaaggatctccctaagactctagtccaggttcctgatctgccacaactgcaaagcttagtggatcgtttgaaaaatgttggtgatctgctaactgtggctgtcacccaatatggtgatctccatctacaagtttccacttctcttgttacggttggctctgaatttaggaagcttaggggttattggggatcgtgcaaatgcacctgttggtgatcaaaatttgacttcttcgact

SEQ ID NO: 43363 - DNA, 605 bp, Zea mays
  Clone ID: MRT4577_139555C.1
actacgagaggaaaaggagatcggaggtcagttatgcgccgccgcctgccgttttccgatctgcctcatctcgccgtcgccgtcgaaggcctcgtatgaagatcgagtggtgcttgcgaagaggcgaccaaataagcagacccccctttgggagccgcagtccccaatcgaagcagcagcagcagctcctttccgagccgcaaccggcaatcgaagcaatcaagcggctcctccccgagccgcagtccgcaatcgaagccttcccctttttctgtcgcaaatccgcaatcaaaccagtccttttttagatacatccagaaaccggtctttggaattgatctccgagttgcacaccacatcgatgaccaaatcatccgtgcagggcctcagcaaatcctccctcaacattgtgcccaagcacgaagggaggaagttaacctcagatgatatacttcaggccaatactgccatgctggaagcaaccaggggcatacttgaaaggagggcgggaaatccatacagtattcgcctgttgcgcatggaattctacttgggagatgagtccattttcattgggcagactgttgccaacaccatagcaacac

SEQ ID NO: 43364 - DNA, 332 bp, Zea mays
  Clone ID: MRT4577_139556C.1
aacctttccgatttacaaaccgcgctttgcgcaacgagaagacgaagccacgaaagtaaagggagaagccgccgccgccgtcgtcgtagagcaagccatgaagttcaaggccttctttaccgacgatggcatctccctcctcgacaagcgattcctaccccccatggacaaggtggggcgcgtttttcacgttttcttaacgcccacgcacgccatgttttttcacaacctgctcggtgccacggccgctgggcccgacggcggcggcccgcagtgcgtcgctcagttcgccaaggacctcctctttcgtgagagtaccctttgttcgagaa

SEQ ID NO: 43365 - DNA, 450 bp, Zea mays
  Clone ID: MRT4577_139557C.1
caggtcccgccccacagctggtgggccgtttttgttttccctttttcaggcacacctggttccggggaggggcgggtgccccccccttccccctttttgggcccggggggcccccttgtggccaccatattccgcgaaaaacatgggggggcggccaaaacctttttttttttccccccccccctttttttaaaaaaaacctttttttttttttccggaactttacccccccttggttcccggttttgctccccccctctcttttgtcccggggtttccggttttctgtccaagctttcgcccccaatttgcctttgccgggggttgttgccggaggggggggggtttgccccccaagcctgaagggcgggccccttttcctggccggcggggggttttggcccttgcttctcccccccgtgcggggccccccccccttttttgtttttt

SEQ ID NO: 43366 - DNA, 824 bp, Zea mays
  Clone ID: MRT4577_139558C.1
ctgtcgcaaatccgcaatcaaaccagtccttttttagatacatccagaaaccggtctttggaattgatctccgagttgcacaccacatcgatgaccaaatcatccgtgcagggcctcagcaaatcctccctcaacattgtgtaggataatgaagttgatatgctcagcaagttgcctgatgacattttgctcaacattgtggagcgacttgatattgctgatgccacacgaaccaccatcctatccagacgttggaagcagatccctgcgatactctcaaaggttgttataatggttggttcttttcagcccaagcacgaagggaggaagttaacctcagatgatatacttcaggccaatactgccatgctggaagcaaccaggggcatacttgaaaggagggcgggaaatccatacagtattcacctgttgcgcatggaattctgcttgggagatgagtccattttcattggccagactgttgccaacaccatagcaacacaaaaggttgcttcagttgagtttataatcttaacgaagttgcgcaatgtttttaccaataatgagctgctcacttatgggagtcagttcatgtcattctttgattcttgtccagtcacatttggtggtcttgcacgcctcacactagagaatttgaggttaggcgaatcaggctttccgaaaattttcagtatatgcaagcaattggagttcctccgcctctaccactgtgatatgggcattgagtctttgctggaagtggagcacccacagctcagtgaactagtgattgcctgcagtaggattattgagaggattgatct

SEQ ID NO: 43367 - DNA, 401 bp, Zea mays
  Clone ID: MRT4577_139559C.1
tatttttttttttttttttttttttttttgggggttttttattttttttttggggtttttaccctctctttttttttgttatttctttttctggaaccggcgggggctttttttaaagggggaggccggggctaaaacaaatggttcaaaccccaaatttttttttaaggggggggggccccgcctaaaaggccccaatttttaattttatggcccctccacccaaactaaaagaggccccccatcaagtcccaccagggcaagggaggggggaaaaccctaaaacaaaaaacccggtctaccaacacctctcaccggggggtaaaccctaaaaaagctttacccactcctggggaccccccaccccgtgttttgaaaaaaaaaaagtcctcccccccccc

SEQ ID NO: 43368 - DNA, 146 bp, Zea mays
  Clone ID: MRT4577_13955C.1
gtggtccaggaggtgagcacagacaaccggcacgaggtcgggcaagatagcggccggcatctggacagccgtagagaacgggtaagatactggcgcaaccagtagctggagcaggccgaaccggatgtgcactcggtgatggacca

SEQ ID NO: 43369 - DNA, 1302 bp, Zea mays
  Clone ID: MRT4577_139560C.1
ttttccacgcgtccgcccacgcgtccggtccggttttggtagaccgcggccttgggcggagcaatccaggtggagtgggccgagaagcggccgcctgatcgagccgaaccaacggccgacgcggcgcacgccatggtagcagctggcaatccacctccaaaaccgtgggaacgtgcaggaaattcatctggcccagtgccttttaagccgccctctggtggtagcaccagtgatgttgttgaagcttctgggacagcaaaacatggagaagttgtttctgctgctggaaacaatgttgcctccaatgtaaacagcacaatttcaatgcctgtgcccccaaggccttggcagcagcaaggctatgaaaactcttatgggggttatggctccagtatgtatagctcttacggcggatatagtggaccctatggaaataacatgtactcaggttatggaggaggttatggcggtatgtatggaggttctggaatgtatggtggatcaatgtatagcggtggaatgggaggaccctatggtggttatggtatgggcatgagtccttataatcagggaccgaattcatttgggccacctaccccaccccctggtttctgggtgtccttcctacgagtgatgcatggtgttgtgaatttctgtgggagggttagcttccttgttagccagaacactcaggcatttcacatgttcattactgcacttttgcagttatgtgatcgggctggaatgctttatggtgagcttgcaagatttgttctacgtttgctggggatcaaaagaaaaccaaagaagagcggtgttaagggcccaggagctccatcatcggagggacgaggccagcagcttgttgaggcgccgaaagttaactcgtgggacagcgtgtggactgagaatggcaagggaaattaaagggcccgtttgggcacagtgaggcagttctcctgaaaggagaggagggcgagtttgcttgtggaagagaaatctgcgaatatctgttcggatgcgttttgcatatgcatagaaggcatagacaaggaaccccttatgcctttttgtatttgtcatgttcttccatggtgtacatatagatcagtgtgcaatgagaaatgtgagcgggtaatgtacggctttcccccccaaaatattactgcaatagtaccgtttgtacttaaaaaagacggaacacaatatagatgatcctttttatttggcctgttgctactacatataaggttgtttatacatggagtcttggcaaaaaaaaaaaacaggtattagcaaaaa

SEQ ID NO: 43370 - DNA, 165 bp, Zea mays
  unsure (1)..(165): unsure at all n locations
  Clone ID: MRT4577_139561C.1
tggagctcgagggccgcgggttttttttttttttttttggacattttctgaattgngctatttaaaattgtgtactgaagtactctattacgcagccctttttacggtctcacccacaaatctcacattttatcagttccacgcctattaccaactgctgcatta

SEQ ID NO: 43371 - DNA, 628 bp, Zea mays
  Clone ID: MRT4577_139562C.1
aattcggcacgagggtggagtgggccgagaagcggccgcctgatcgagccgaaccaacggccgacgcggcgcacgccatggtagcagctggcaatccacctccaaaaccatgggaacgtgcaggaaattcatctggcccagtgccttttaagccgccctctggtggtagcaccagtgatgttgttgaagcttctgggacagcaaaacatggagaagttgtttctgctgctggaaacaatgttgcctccaatgtaaacagcacaatttcaatgcctgtgcccccaaggccttggcagcagcaaggctatgaaaactcttatgggggtaattgtaatctgttttgcatgtttcagaaaatattcttgtgtctcaaaatgttaacgttttgatgaaaatgcaggttatggctccaatatgtatagctcttacggcggatatagtggaccctatggaaataacatgtactcaggttatggaggaggttatggcggtatgtatggaggttctggaatgtatggtggaccaatgtatagcggtggaatgggaggaccctatggtggttatggtatgggcatgagtcccctatatcagggaccgaattcatttgggccacctaccccaccccctg

SEQ ID NO: 43372 - DNA, 303 bp, Zea mays
  Clone ID: MRT4577_139563C.1
gtgccagggtgttaacttcttctgcccactccaccggtactccatcccgcgcgagtgaacgtcagactaccggactgctatcaccgacaccatcgccaaggctaatcctgcggtgaaggcaaacacactcgtcaggatctaggggtggttgcctactgttgggtatcaagaacatcgtaaaccgcggctactcttcatgcggaactgctggcttgtcccccgcacctttatcttacatgtttgctgctacaatctggctgtgacattgcaatcacggtgcacacttgagtaacccgtctcgag

SEQ ID NO: 43373 - DNA, 522 bp, Zea mays
  Clone ID: MRT4577_139564C.1
gcgcggacgcgtggggcgggcgccctttttttttttttttaaaaaggagcatctatattgtgttccgtgttttttaagtacaaacggtactattgcagtaatattttggggggaaagcgcgtacattacccgctcacatttctcattgcacactgatctatatgtacaccatggaagaacatgacaaatacaaaaaggcataagggggtccttggttatgccttctatgcgtatgcaaaacgcatccgaacagatattcgcagatttctcttccacaagcaaactcgtcctcctctcctttcaggagaactggctcactcttgcccaaacgggccctttactttcccttggcattctcaggccacacgctggcccacgaggtaactttcggggcctcaacaaggtggtggcctcggccctccgatgatggagctcctgggcccttaacaccgctcttttttgggtttcttttgagcccccacaaacggagaacaaaatttgcaagctcaccataaagcattc

SEQ ID NO: 43374 - DNA, 351 bp, Zea mays
  Clone ID: MRT4577_139565C.1
caaagcctatggcggatactttgagaagactgtctcatccgaacatggacaaaaatttttcttccgccatgggagtgtcctgcttgcaacagtatctcacataccagcgacctacaacatacaacggtgtggctgtgtcacattctatctatgacgatgaagctgaacctgctcctgctactgatcaataacactgaattgcaaggacaactcattcgcgtgaattgagctcagattagaacaaattttcacgggcaccggatgaggcggaatatacatgtccaatacatctactaacgatgaatctaagagaggctacattgtgataacaaagtcatcaagaactccaat

SEQ ID NO: 43375 - DNA, 468 bp, Zea mays
  Clone ID: MRT4577_139566C.1
agtactcaacatgtgctctcttaggaccacaagaatctcaatgctgttgcctggtcatgaggtccaagtgcttcgcgtctgattacggcctcattcattcatttctgtggctgttactcatgctaataagcgacgcgctgtcacacctcacgatattcagatccaagacttacgcctgcctgtatgaatgagtccgctcgattggctccatctgcagactcagaaacctggatctgaccgccgtcgggctgaacttctgaccttagcacctgcgattccctcgccagcagtctgaactcacaggccaaactccctcgaccttgcttttaccatggctctgagtccggtagcatacgacgatctgagattgcttgatcaggatttggagggtcatgcactatatcctgtatatcgcgtggccggtcacccttttagatgactgccatgatctccatatctgattttgga

SEQ ID NO: 43376 - DNA, 416 bp, Zea mays
  Clone ID: MRT4577_139567C.1
gtcgcgcgtctaggttcactctctcactatagcgcccgctctgtcgcccttcgtgtacctgttcttcctcttctcactgcctgccactgagagcgtaagtcaaaggcacgaagtggctcagagcatacgccctgagagaccattgtaactaggcctgtcggcaggatagtagccgtcgactaatccctacaaggaacagatggagaagaaggcgcacatcctgatgaacaggtacaagcttgggcgcacgctcatgcaaggcacctatatcaaggggtaccacagacggaacctggctttcagagagagcgcgtgcatgaaggccatcgacaaggagaaggtgatgcgcgatggcatgatcgaccagatcaagcgcgagatctacgtgatgcgccgtgtacggcaccccaacgtga

SEQ ID NO: 43377 - DNA, 1123 bp, Zea mays
  Clone ID: MRT4577_139568C.1
catttgtttatctcacatgatggttctaacaatacggacacgtgggcggacgcgtgggcgtagtttcataaactacgagagagatacgttttatgaacaaatttatttttattttgtcatatgaagaaatgttcaatatataaattgtacatcatgatgagttatacaaatttatagttgaaaaccttttcatttgaattaatttactatttaaaaatgtgatttttaaattgtttttgcctagtgttggagaaaaaacactcggcaaagagctctttgccgagtgttgtatttgtgacactcgccaaagagcctgccaagtgtcaaaaaaagacactcggcaaagaaattctttgctgagtgtcaaaaataaaacactcggcaaaaagtttctttgtcgagtgttttcttttaccgagggttttttgcgtggcactcggcaaataacttctttgccgagtgcccgaaaaaagcactcggcaaagaatatgacaatcggcaaagagccaaattatgccctccattagtgatgctgcaacacaatccacagggcaaccaggtgatggtggcacagccgcaattcgttgcgtcttgaccaatatggtttgtgatcaacttctagttatgcctgattactattttatttacgtgatatcagtcccatatgtatgattaacaaaagttctaccatatatagatgtattcaagctggtgtagactaggactagatttttacatttatttgttgtataaatctagaagaatagaagataagccatatcaaaaccataggcagtgtctgactggcttgtgtcatttgtgcaagacgacaggagcttttacgattgaggttcttatatgggctgattggaccagctgcccagaaaacaaaagctcatctcatattttgtctgttctgtattttctttccttttcccccttccatcttaggacagatatgcactcagcataagcatttcattaattttgaacctgcagttctctcactctcctcgtatgtgttcacatagtgggtcctaggcactgttttctgcggatctagttttcttctacagcatctcttgaattcctgatatcttgacgtggcaaccttgttcttgct

SEQ ID NO: 43378 - DNA, 577 bp, Zea mays
  unsure (1)..(577): unsure at all n locations
  Clone ID: MRT4577_139569C.1
ttcttcgaccagngacttggatgagaaaaacttctgaagttcgtgaacaaatatgatccactagacgagcaccatgtgttgcgcctttatgactacttctaccatcaggaacacctttttattgttactgaactattgcgagcaaatctatatgagtttcagaaatataatcaggaatcgggtggtgaggtatattttactttgcctaggatacaggttatagctcggcaatgtttagaggccttggtttacttgcaccatttaaggatcattcattgtgacttaaagccagaaaatattcttatcaagagctacagtagatgtgaaattaaagtcgttgatctgggaaatagttgcttcttgacagacaacttatgcctctatgtccaatctcgttcttatcgagctcctgaggtcattcttggcctaccttacgatcagaggattgacatttggtctcttggttgcatcatttctgaactgtacactggtgaagtattatttcctaacgagcctgtgtccatgatgcttgctcaaaggattggcataatcggcccaattgacatgggaaatgcta

SEQ ID NO: 43379 - DNA, 153 bp, Zea mays
  Clone ID: MRT4577_13956C.1
ctcgtgggggcgcagagacaggagttttgttactcgcctatcggctaagagtcaaagctttttgcatttactactttcaccggtgcagcgctacattattccgtcgataccattagggactagatctcgaccgacatcgggcatgccggtctc

SEQ ID NO: 43380 - DNA, 154 bp, Zea mays
  unsure (1)..(154): unsure at all n locations
  Clone ID: MRT4577_139570C.1
ggttaatnaggnacnggagcagctgagcggccaagtcaccggtattcttccaagggcaaggtacacngtgagatcngcatgctatgtgacgttccggggtgagaangcaatgcagctgctgganagtggcttgaaggtgaaggagaacgancng

SEQ ID NO: 43381 - DNA, 233 bp, Zea mays
  Clone ID: MRT4577_139571C.1
cgctgttctcagcgatgccctgcccagcgtttgtgggacaacgcgacagcggcggaaggggcggcgcatgcgtttctgctggccgaacccccccggggacaacgaacccccgtgcgggggccggttccctttcgggcttggccccgggggcaaactggtgaccagcggggtgggcgcccggattatttttaatccggcgggcattcccctgcttggcgtggtgcccggtgggg

SEQ ID NO: 43382 - DNA, 455 bp, Zea mays
  Clone ID: MRT4577_139572C.1
ctcgaatcgaataaataatcatagtcagagctagcaagcaatgcaattgacatctggtatctcaattgatgacctaacagttctaatgcgctgacacctagtagtcccatctgcacatgccatcgtcttgattgtgtcgctgtcttgattgtgtcgctgcctacctatgttggcacatcattgttgtatggatatacatgtctaaaatgggccaggtttgctaggcggcccatggcctggcacagtttaacctggcttgagcatgatccggcccgttgtccactgggcccatgctagtctggcttgatcaccgtgtcgtgcatgggccttaggtgcagcacgacgggctagacccggtacagatcggttttttttccctatttttcataaaaaatatccttattatgcttgattatagaatataaaacaaaaaatatgtgtgtaaaggtggagtg

SEQ ID NO: 43383 - DNA, 242 bp, Zea mays
  Clone ID: MRT4577_139573C.1
cttgccttctagcttgtttacaccccaaaactaaaactagagtcggcggcggcaacaagcggtacgtagaggatgaagagcaggagcagcactctgttggtgatcctagttctccaggcccttctgctctctgcggctgtggccaaaggacctgcaggtacgtacgtgcttgcctctcctccggcctcctgacgctggaaaatttcatctagctgcgctcttggacccgctgctcgtgtata

SEQ ID NO: 43384 - DNA, 369 bp, Zea mays
  Clone ID: MRT4577_139574C.1
tttttttttttattttctggtcaccaccataagagtttaaaggggcagaacttgatgcgattctgaaacaaaggcaatctattgtaacaaaatttgactgactgacaaacgaagggcagactctattaccaataatgttattggggaccgaacctcccccctagtaggacagtttcaggtgtttggagaactaagcctacatccaaaaaacattggtggaagaaacctccctttacatgagcaataaatttctgtattgtgaacggctatatcttcaccagttccttattggaaaggaccggtaacacacactgttcttgatcggcaaaatatttttccatataaagacctccggagccgacttttttt

SEQ ID NO: 43385 - DNA, 634 bp, Zea mays
  Clone ID: MRT4577_139575C.1
agctacaaatatatatatatatatatatgcgtgctgtgtatctctttcatatgatcatgatcgataaggtacaaaagtgtactgctatcgtctgtgataagcagcaaaaacattgcgtgtcctcatgaatttcaattatatatagtttatgtataataggaactaaataatcatgattttaatttgtcgtacttacatgaggagggttaaatatatttataatactggatcagcagaaggatcgagtggagtagcagcagcggcaatgggttcccctcttctcctcaccgtcacgttgagcccgccggccatgtgcgccgtcatcagcggcaggaacaccggcacgcggccctcgtcaacgggcacgatctcaaaccgccggagcacggtgctggccacgaacttcatctgcacgaaggccatctccttgccgaggcacgtccgcggccccgcctggaacaccgggtacttgaacggcgacacgccggccaccgcggcggggggcgcgttgtcctcccctatggacagccagcgctgcacgctgaagtcggcggcgttggcgccccagatggactccatccgccccatcccgtactggaagtaggtgacgcggtcgccgcgctccacgcgggtg

SEQ ID NO: 43386 - DNA, 609 bp, Zea mays
  Clone ID: MRT4577_139576C.1
cattgggtacctcgaggccggccgggctgcgactcatcacaactgatatgcccttcctgctgcctgtctacgatcgcccttctattccgtcttcctttccctgccctcatgtctatgcactccgtgtagagttactcattctcactatctcacacctcctcacaatgcatgaatttcctaactgaacaagcatatatagacctagactatatgctcctgtttatgactacctggaacccatcatctgtgtgcctgatgtattcttccccttatgatattaacatgcactcattatatgcagtatgagatgcattacgtcttaaggtccacttccaaacaacaaatgattagaaatggacctctgatgtccatccttgtgaccccttacaagtcgatcatgtgctctctcgtggatatcatgaacatactcgatgcctgcattgagctcatagccgctcccactatcaccccacataatcgctcgtcgcatgaacgaggagatcacttcccgtctaccgagcgacctaactatcattaactgcgctccgctcgctgcccactactccgtctggatacctgtcgcgacacttgcctcaatgaatccttccc

SEQ ID NO: 43387 - DNA, 777 bp, Zea mays
  Clone ID: MRT4577_139577C.1
ttgtttgtttttttcttattatttctatgtttttgtttgggtactctagkattgatcacaatccacgggtgttgagckggrtkggggkgtaaattagtttaaggtagcgaccccagtcsrcctcaacacatgtggattgagttgcaatactagaatatctaaactaggcctagtgggtttgtattctcctttctttctattaatgaaagaatatgcagcggcttckgcgtattcaagaaaaaaaggctgacaggcaggactaactgcgtaactgkgcaagacattgtsaaattgacacgctccttccaataactgataaaagatctttgctagtttcagataattttgcttaataggtaaattgttkaaaaggrtggsasrkkactgsktttctgagactaggtattcagcgactgcaatagtattgctttgttcagggagagatkagsassagggtstgaaatkgtkasacaaagtgcgcactaatctaccttctatggagkagaaaaatcttcattatgcatckaaaataarttattcgrttttatatagtasagtasraattctaaktgggaagttagatgsatakagktgtgagagtggrtgcactaakcaggttaaaaagcttaatctgttaggrgaagataagcaattcacktakacaattcaacaakaatgtasrkatatactartctartccaatctatgrggcatgaaggctactcagataaaaatttgtgcragctcagatcactcaagttagttcaaacactcaat

SEQ ID NO: 43388 - DNA, 601 bp, Zea mays
  unsure (1)..(601): unsure at all n locations
  Clone ID: MRT4577_139578C.1
ggagctgcatattgcggatggagctgtggtagatgaagcatctggggagggcgctgagtgggttgatgatttggaggttactgaaggttatttgatccaatgcaccttcagtcaatggattcagatgagcttgtctgcccaactttcaatgcgcaagatgaatttaaggagccttttttacttcgtgaatggcgtccatggtatatattgtactgtatgaccgaacaggttatagggctttttattaaaggtgaggctgtcgtatgtatttaaggcgacttgcaaaatgtgtatgtattggttgaaaaagtagnggttgtaaccgttcacatcagaccaagggtgtctgatcttgcggaaacattattcttcactgaaaaggagctctgcatatattttatatctggtgaccatataaaagtgatctcacgtgtgcaatacagagctactgctgtggtaactaaagtggaacggcacgtattgatcattttgtctgacacaactaaagaacatatgcgtgtgtttgatgatcactgtcccgaaagctctgacatcaccacacgaataaccagaattggagattatgaactgcatgatcttg

SEQ ID NO: 43389 - DNA, 315 bp, Zea mays
  Clone ID: MRT4577_139579C.1
aattgcggggtcgacgcgctctcttgtcggcggccgccctgcatttgaagagcagttaccctaccacgaggaagccatatagggcccacggtcgaacatctgaaatacatgtggacaggatggcataggaaaaatgactaaagaactggacttgttcggcacacaaatgcactcaataacgccaaaaccatatggattgagaacgatacgaacactccctagtgtatgctgatccaatgtgtgcggatgagcctgtcacatcataacattcctacacttgggagggaccaaagcgctctctatacatagggattg

SEQ ID NO: 43390 - DNA, 296 bp, Zea mays
  Clone ID: MRT4577_13957C.1
ccgacgcgtacgcatagtgtgtgttcagcaaatgatttaagctcattgccgccgggtccacgagggagaaatgaaacactatcatcttttcctccctcttcaatagagctctgttcgtctcccctcgtataaattgccgaccaccgtctcaccttaaagaccgccttgctgttcgtcaaaatttcccatcttacgcaactactattactccggtcgcagccttaaataccttccgccaccgctattacttgtagccctcctccatgccaatcaatattcatggtgaacaacatcca

SEQ ID NO: 43391 - DNA, 449 bp, Zea mays
  unsure (1)..(449): unsure at all n locations
  Clone ID: MRT4577_139580C.1
ctcttttttttnnttttttttcaactagagaagcaaaaggtgctcaacagacaccatgcacacaaggcgaaatgtggcacggacattatttacaacactaaaacaactgggggatttgtagaaaacctgcgcttaaaccccaaataaaacacgaacccctgcattgacccctatccaacagcagggagagatcaataatggccggccttacaccgagtaatacacctgccctgatccaacttaaaaaaaagagagtgcagaccaacagtgcccaatgtccaacttagtattttgacaaacttataaaccatgtgggatcactcaattgattagcctctccaacaccataaagcaattccttggagctatattttgaggatatattcctataacaaagggcataccagtaaagctcgttcgaaaggacatcagttgccttatttacttga

SEQ ID NO: 43392 - DNA, 153 bp, Zea mays
  Clone ID: MRT4577_139581C.1
attcggctcgaggagtagtcgagacccctaatagtgccacgcaggggcgcaaatggcactgggggacattttaaatgaagaccgggccagcccccaacattacaaggaaccatagttaataatggcaaaccctagtaagatgcataatattta

SEQ ID NO: 43393 - DNA, 653 bp, Zea mays
  Clone ID: MRT4577_139582C.1
gaccgtcatatgctgctttagcagagtattttccattagaagcaaatctgaagatatgcatgtcctccctccctggctgtagattgattgtcagtagggcatcccacacctcaagaaaatcagacagtacccctactgtcaatgcccctttgatatcagtcagccactttctgtctgagaactgtccatacagctctagcaaatagaagttggctgaatgacatcaaaggagctctcattgtggaagtccttgctgattttcttgatctttgggatgcaattctcacagtaaacttaaatcctcaaatggaggacaaacacatcttgagatgctcataatggaaaatattctgctaaagtagcctacgaaagtctcttcattggatcaacatactttgagcactacaacatgatttggcattcttggtccccccaccctcaaaatgcaattttttcttatggcttgcggcgcttcagtgatgttggacatttgataggcttcaaaggagagggcgggatcaccagatcagtatcttctatgtgaccaggaaccagaaaccattgaccatctccttgtgggatctgtgtttgcaagaagctactggttcaggctgctgggacagcttaacctccaggacttcgctcctcaagta

SEQ ID NO: 43394 - DNA, 245 bp, Zea mays
  Clone ID: MRT4577_139583C.1
gagcttattagtcggcggccgccctcttactttcggggggatgctaaaaaatagcgtgcgggcttagtgcatccaaggagcaatgcaaaggctgcccgtgcacagcgtcgtgaacgggaaaatccttgaagtgcacagctaaaggcgtcacagagcacatgctgctttcgaaagaatcgggtaatggcagacaggcccgcaccgatcgtccattctaagtgttggaggtcctcaatggctaatga

SEQ ID NO: 43395 - DNA, 388 bp, Zea mays
  Clone ID: MRT4577_139584C.1
ccactaaatggggggggaaaccagcagaaatccgaggaacccaaccgaccggctacaaaaaaccaccccccggggcgggggcccaaaactaaaaaagccccaccccccggaagagggggaggggccgggggaaaaagctacctccccggaaaattaacagggcggttttttgattctctaagcgggaatgggaatggctcaacgggggggggggggggggccaaacccggagggaggaggcccatggggcggggggggcacctgccggggcggggttgaaaaaccctgataatcctgcaacgaacaacggaagggcggaaggaggaggagcttttgttgccacctgccatgcccagttggaaacagcccctgcaggcctcctggggaa

SEQ ID NO: 43396 - DNA, 345 bp, Zea mays
  unsure (1)..(345): unsure at all n locations
  Clone ID: MRT4577_139585C.1
tctcttccnccattcttttccttttaacttcncntctcctgccctctggcaccttctaatgcgatgacggcnacnacaacnannnttcaaattattactacnnccccatatctatttaaataacttcaagtgaaaggcttagctttttttttatttcctccctccatnacaaaaacatattatcttatctcctcctcccttaaccccacaaaataaaacatctcgtcttttccccaccccacccaccatcttctcctcaccatctttatatatacactctccacgcaccccggctccatctacccattccatattacactacacttcatntaactttcaccacca

SEQ ID NO: 43397 - DNA, 796 bp, Zea mays
  Clone ID: MRT4577_139586C.1
aattcggcacgaggcccctcgtcgccgcctccactacagggctttgctcctcccaactctcgaaaccctacccacccgatgagagatcgatcggtcgagcgcgaattccccagccgcgagcggggggatcggccgccgcccggggtgctggggcccccgcgccgcgggccggcgtacaagacgaagttgtgcgcgctgtggcagcgcggcggctgttcccgcgacacatgcagcttcgcgcacggacacgccgagctccgccggttccccggatcgcgcacctcgttcccaccccgcgccggtatacacagccttctctcgtgcccccattatcctctcgcacgcttttcttttcagtcgaatgtttaacctctgagatcgggatcccctggtggtgtagcgttcgttgtagatctggaggtctggttgtatgttcttttcctgcaaatcatgttcctcgtattgtttttattggtaggttttgttgtaagatgtcactaattctgcaccctaccgtgaatggttgctcatgtaatctatgtgatctatctgtttcggaagaacaacggtatgtgaccattcaatttatgagatgaagaagaaggccacggtgcagcaaaaaagggggatatttaactttttgccatctttatggatggccctaaaccaccagccactgaccatctgtggagctacaagggttacatacatggacatgggaccacatgtgttctgggtatcaatgtcgattttaggtgtatgatttaacagattttttgaatgccgatagcactga

SEQ ID NO: 43398 - DNA, 251 bp, Zea mays
  Clone ID: MRT4577_139587C.1
ttgatacgtgcgcagacagggacagaaaaggggggggtttatatagctacgagtcacattaacaacctcctgaagaatctggcatacaagacagaggattgatgagtagacaagaacacaaaggacgacgaaggtagggaaagaccgcgtataaagacgaaataacaggctccggacgacatggaaaatagacagtaccgagggatgacagtgaggatcaacactcaaacggttacagctactagtacaaa

SEQ ID NO: 43399 - DNA, 1432 bp, Zea mays
  Clone ID: MRT4577_139588C.1
cattgggtacctcgaggccggccgggaaaaaaaagctcgactcgacgccgcgacgcttcccacctcgaggtcggccgggacacgcccggggctcctcggtgccctttcccctcgccccctaccgacaccgaccccgacccatgggcggtggcgccgaccgctcggcgccggtgcgcgccgaggagtccgtctccggcggcgtcgacgtctggagcgacgccgtctcctcccacgcaccggaccacctcctcgtcatggtccacggcatcctcggcagtactgctgattggcaatatggagctaatgaatttgtaaagcaactccctgaccatgtaatcgtgcactgcagtgaaaaaaatgcatcaatgttgactctagatggagttgacgtcatgggggaacgcttagcaaatgaggtgcttgatgtaattagtcgaaggccagaaatcaccaaaatttctttccttgcacactccgttggaggattagcagcaagatatgcaattgcaagactttatagacatccagacagcgtgtctgatggaaatactaaaggaaccatctgtggcttggaaggaataaactttattactgtagcaacgcctcaccttggttcacgagggaacaagcaggttccactcctgtttggatctgttgcaatggaaaaggttgcttgccacatcgttcattggatatttaggagaaccggtagacatctctttctaactgacgatgatgaagggctgcctccactgctgcagcggatggttgaagatcatgacgatctctactttatatctgctttgcgagcattcagaaggagagtggtgtacgcaaacgcagactgtgatcacattgttggctggagaacatcatctattagaagaaacaatgagcttcctgagttgccagtatcgtcgtctgacaagtacccccacattgtacatgaggagcattcagaagaaaccgatgatgataagtggcaagattgcatggcagaatgtgatatggacgttctggaagagaagatggtgacggggcttggaaaggtgtcgtgggagaaggtggacgtgagcttccacagcagcatgacgagcttcgcggcgcatagcatcattcaggtgaagtacgcgttcatgaacgagggagcggatgtgatacagcacatcatagaccacttccagctctagagaattttattcctcttccccggtgcggtggccaaaaaaatgcatggaaccgcacgaggagagcatgcatacacggatggagagccatggaggtgcagtgcagcagagtgtgtgcagaggctgctagctaaagcttgttgggcgggcgggctggctggctgacttgactggctggctgcgctgtgtaacagtgcgttgtctatgtttttgtttgtgctacgtacacaattaaagatgatgag

SEQ ID NO: 43400 - DNA, 457 bp, Zea mays
  unsure (1)..(457): unsure at all n locations
  Clone ID: MRT4577_139589C.1
cagagaagaagaagaagaggaggaagaagaagcatcggcagcatgtcggaggggactgccaactgcgtggacatcctgatcgccatcatcctgcctccgctgggggatgttcctcaagtacggtgtgctgccacgagttgctggatgctgcctgcctcctgcaccttgcctcgggctacatgccccgggcatgcatgctacggccatgctacggccatgcaccaagtatacaacttagctagttcatcgcttggcgcgacgagcgatgcgcatgtgctgctgtagtctggcgtactggttgcatgatggcgctggatggccgagctttgtgnctggtggatgtgagtgtggctatggaagttgccaggtgcgtggtgtttgggctgacgcgtgagcgccagcgccctnatggcatgcatgcctgtgcaaccggcgaacgcatataaatgcgatgagt

SEQ ID NO: 43401 - DNA, 766 bp, Zea mays
  unsure (1)..(766): unsure at all n locations
  Clone ID: MRT4577_13958C.1
gcgtcatctaaaagccccccggcgcttttgctatgctgttaagagccaacagaagacgttcgttttcccaaatggcgagaattttgttcatttcttctgcgctgaagacggaaaacttgccaggcgttttcttgaacttgtgcaacgttggcgaagctggtatctggtcaataagcaggttgacttcgggaagaaggacaagcctccacaacttgccatgcctctagaaaacgacacggttcgcaaagccatttccagatcgaagagttctgccgcatataaagggcatagtacgcaggtttccgttgacgagacgccatacaccatcggcgctttccagccacttcttgatatggaccgctttgataaacccctggaggagttcggcaaagatccagaacaggacaaacaaaaacatggggatcccgatactgagtttagaagtggactcgtccggaacgcgacctgcaaacagccaaacgtcttaacaaagtctaaatcaatacatcaaaagcatagatcaccgccaacgcctcgggatgaggcgcaattctcttctacggngcttttgggtcaagtatatgaagagaaacgcaagatagctgaacgggcgcctgtcatcagcccccctcccaccaacgcggctttcacanaaggagcctcgctcttgggtcaaggttatgagcaaaagcgcaagatttctgagcgagcgcctgtcacaacagtgttcctttcacgaatgccggnttacagagggtccttcact

SEQ ID NO: 43402 - DNA, 367 bp, Zea mays
  Clone ID: MRT4577_139590C.1
attcggctcgagagcatctaatgtgcccttttgtcacggagagtctttcggtggaccagctacgaatgtggggcggtttgagattcattctggggcggggacatactttcgggatgcaagcactgacatgagcagtcgaacggcaggaccaaagggttatctggctagagctgatggccaggtggcacagtggaccgtcaacaggacctataaccgcagttggggcagttcatgtggaaatggcgagctttaaggctgatacaaaaatgaatcgtggaccctggatcaccacctgagaaacatggtcacagcaggctgcaaactgccagaaggccatctagaggtgccgaaccctgggtggagcatg

SEQ ID NO: 43403 - DNA, 692 bp, Zea mays
  Clone ID: MRT4577_139591C.1
aatgacaatagcacggcattctagaccagcccttgtagacgtctagtgtcaaccatattcttatgttgcaacagatgctatttcatacagatatagaaactccaaacgtttaatgattaatcaacccagacgagaacaggaaaaaaatacatgattatcacgtgtaaaatcaaacccagagaatcccattcgcctttgtaatttcttgcatcatcgaccgcttgttaggataggtgaagtatacaacaaaaagaagcatcgtgatggcagccacgacggtggccatgtagatttacatctcctgccgcccctgcaaagaccagtccccaaggcacttgaaagagcccattgagaattatctgttctaatgtagttggagatggatctaatgttttcccttggacggatcacacagatgaagcctgcagagaagtctttcatggaagtaagcctaaaattcacatgatgtggtcaagcttattcagcattccaatgcatacctctggatctcaaccatattttcctcaatgaagcaacccgaccccatgtttatcatgtttgcgccattgtgttgaaggatcctgagcttcccttccttagtcccataaacaaggccacctcctggtaaaggatgaaagcatgcaacattgactttatcttcggcactaggaaacactctcacaagctccata

SEQ ID NO: 43404 - DNA, 663 bp, Zea mays
  Clone ID: MRT4577_139592C.1
tttctccttgcgtcaattcgcggcggcgtacgtgtgcaggatagtgattaacataccaggaggaacagatgctactaaaggtgagttttttttaaaagaaagtgactcatgaattatataccaaatagcaaatttaagtgtatagtatgtatttatatatgcttgtcctcataaatatataaagaaaaaaagaaacgaccctcaaaactaatatagtatagtaatgtttcgtttcagttatagtatccggattaatgctctaatattatcacacaaattgaggtgataaaccaaggagatagatgaaaacacatgcatgtgtatatactatttcttattctcttaattccaacttattataaattatcctgacttttcgcattggttttgctttattaatataatatgtatctagatataatctatatgttagacataatgtatatatatctactaggtttgtatagcaaaagcaattatctagaatagctatcacgacttataatttgaaaatggaaggagtggtacatatataacttcttcacttttgttttactcaagctttctaaggagttagggcagcactaagaattatgtgaaatatatattgcttcattcgtcctaaatacatggtatatattaaaagttcaaattttcgcccta

SEQ ID NO: 43405 - DNA, 712 bp, Zea mays
  Clone ID: MRT4577_139593C.1
ctgcatctgatatgttattaaatgtagtaactgtgcctacttcaaatgcaattgaaatgcatggtgctggcggccagtctaacccaagactgcagggcagcagctctattagtaatcttgagaggttcagtgctagagatgctttgcaagtgtcttccctgagcagcattgagccaatcccatcaacagctgggtcttcgggatccaattcacgccgtgctatgccactgaatatgctcctcactggtggattagatgttcaaatgttccaaagaaatgtaggaagtggacaacaggatcattttctcttcggcgactcaagtaactgggaagtgccatttgtgcagggttttttgatgacccaaaaccatacaggtttgcaccctgcacttgtgaacaataatgtccttgaagacctatctggtgctggtactgcagggattaacaactcaactagggaatcatcacacatgcataactttggacgtccaggtgcttcatcatcgattccccttacttctggcagttctaggagaccaaatcgacactatgcctcacgctctgtgcctggggttgggagtttgctcctagtaggtcctcaaattgacgaagctgaagctcatgctgcttcactaggtgctggttcagaaatcactgcgtcgatgcttgctcctggtactgaattgccttgtacagggaagctcagaatatg

SEQ ID NO: 43406 - DNA, 3666 bp, Zea mays
  Clone ID: MRT4577_139594C.1
agagtctgcagactcaccgctgactcttgaccacatcatgtgaattttaggcttacttccatggcttcatctgtgtgatccgtccaagggaaaacattagatccatctccaactacattagaacagataattctcaatgggctctttcaagtgccttggggactggaaacattggtatccagtttactgattggaatcgtgtccttacaagcatcattagctcttacaacttgctgaagcaagctgccctacaaattttttccgctggatcaggagccttgaatatttgtccagttttgcaggtctttgcaggggcggcaggagatgtaaatctacatggccaccgtcgtggctgccatcacgatgctgtaattataccttttgtacatgtattccaatcagcttaactcgattgctgttgtatttcagaacgttgacggtgctaatacttctgaagtctttttgttgtatacttcacctatcctaacaagcggtcgatgatgcaagaaattacaaaggcgaatgggattctctgggtttgattttacacgtgataatcatggatttttttcctgttctcgtctgggttgattaatcattaaacgtttggagtttctaaaaaaaaaaaaaaaaggaagtgccatttgtgcagggttttttgatgacccaaaaccatacaggtttgcaccctgcacttgtgaacaataatgtccttgaagacctatctggtgctggtactgcagggattaacaactcaactagggaatcatcacacatgcataactttggacgtccaggtgcttcatcatcgattccccttacttctggcagttctaggagaccaaatcgacactatgcctcacgctctgtgcctggggttgggagtttgctcctagtaggtcctcaaattgacgaagctgaagctcatgctgcttcactaggtgctggttcagaaatcactgcgtcgatgcttgctcctggtactgaattgccttgtacagtgaagctcagaatatggcggcatgatatcaatgaaccatgtgttcctttagcacctgaggcatgccgtctgacgatttctcatgccgttctttgcagtgaaatgggtgcccatttttccccatgtggacgatttcttgtagcctgcgttgcatgtttgttgcctcaaacagaaggtggccgtggtagccaattgcctgtgccttatgaagaggctggatcatcaccaactcgtcatccacttccctctcaccgagttatttatgagcttcgggtttattcgcttgaggaggagacatttggggatattcttgcttctagagcaataagggcagcacattgcttaacttccattcagttctcacctacatccgaacacatacttttggcatatggtcgtcgtcatagctcgctgcttaggagcatagtcgtggagggagaaaatgggattcctgtatatactattttggaggtagatatgacaatcatatccaatttctaaatcacagtttgattggtaactgatgtcatattaattattgtatggggatattgacagtgctggttctgcagttgcatgatactttttgatacatgggattcaaaatgatttgcttattatcctccacaactactcatattgctcatactttgtgtacaatgtaagccaaactatcaatctttttttttaatttattactttaggtatatagagtttcagatatggagcttgtgagagtgcttcctagtgccgaagatgaagtcaatgttgcatgctttcatcctttaccaggaggtggccttgtttatgggactaaggaagggaagctcaggatccttcaacacaatggcgcaaacatgataaacatggggtcgggttgcttcattgaggaaaatatggttgagatccagaggtatgcattggaatgctgaataagcttgaccacatcatgtgaattttaggcttacttccatggtaattactgaatcctattttttgtatcactattatcttttatgctgtcatggatgcattgttggcctcaaacattgtcttgttggatttttcattgttggcaagaagctcaatgatttatacagattaaacttatgggaagtagtggacttggttgttgatctgaaagcatgattgtttgccattacagaaagacttctctgcaggcttcatctgtgtgatccgtccaagggaaaacattagatccatctccaactacattagaacagataattctcaatgggctctttcaagtgccttggggactggtatgggactctttgcactttaggattaactaatattcctggtatggatataatatcttttctctgctgctagctacaagggacctgagtatcttaagtcgattttgtacacagtaggataatcaagtaattaatgctgtaggaaacattgctatccagtttactgattggaatcgtgtccttacaagcatcattagctcttacaacttggtacgcattgctgccctacaaatgtttccccccaccatgtgtcttgaatattacttccatggagcaggtgggcgcaggcttcaaataagctagccatccaaggagagacgttagatccatctctaactaagtgccttggggattggtctgtgcagaggtggtaggagatgtaaatctacatggccatcgtcgtggctgccataacgatgctgtaattataccgttgtacatgtatttccaattagcttaactcgattgctgttgtatttcagaaagttgacgatgctaatccttttaaagtcaaaagttactttttgttgtttaggtgtttggtttcttagtcaccctcctttctatttgggaggcctccttgagacatattgtttggctttttagggacaaagtgactaagtttaggaggtaggaaccaacaccctcttagtgcatgttgtatggacactaaagttacttttgaactacatatgttacgtgtaaacacgatccagtaaaagaatgtttttatcatagcctctagaatatatatttctttggcagtagaatgattctaatgccttgctatttacaacttgatttaggtctttgcaggggcggcaggagatgtaaatctacatggccaccgtcgtggctgccatcacgatgctgtaattataccttttgtacatgtattccaatcagcttaactcgattgctgttgtatttcagaacgttgacggtgctaatacttctgaagtctttttgttgtatacttcacctatcctaacaagcggtcgatgatgcaagaaattacaaaggcgaatgggattctctgggtttgattttacacgtgataatcatgtattttttttcctgttctcgtctgggttgattaatcattaaacgtttggagtttctataactgtatgaaatagcatctgttgcaacataagaatatggttgacactagacgtctacaagggctggtctagaatgccgtgctattgtcattattttttaagtttaccaagagctatctgaacgcgttccatttggattgaggtgtattgaagtggatggatgaggattttgattagtagtggatttattccctcttaaaaaaaaaaagggggagtaactaagagaatgtgcctcagaaaaaaagggggggccgcccta

SEQ ID NO: 43407 - DNA, 517 bp, Zea mays
  Clone ID: MRT4577_139595C.1
tgggaccctcgaggccggccgggccgggattgcaaccatagacacctgcctatctatctaccgagagagagagaggaaagtacctagatagcatgcagcgcggcagcaagaacgcagcaagaggagagttgacgctgctgattctccagctggtgctagctccgacgacgcccaccgtccgcctcctgcacgcggatacctccaccgtgctgggcctggacatcatcgcgaggaagtttggccatccagcgaaaggcatcctctgtgctagaaactgtgacttcctaccatgctatacggcagacatgattggccaatgcatcgcccaaatctgcatgatgtgatatctaggctagcgctattctgcaagttgcagctgggagaaacacaatgacgtgacaatgacgatcaacttattgcatgtgtatggagagctaataagtaaagaataacagataggtacatggtggatgagaacgctccaactggaacatagaactgccccgtaggtgccgtt

SEQ ID NO: 43408 - DNA, 3021 bp, Zea mays
  Clone ID: MRT4577_139596C.1
tccctcccttggctggagcctggagccgacggagcagaacgacggttccttgcggcggcagcgacctcgagctgagggcggcgagaaggcgggaacaactcgatctccctttgctagctagctagtcccgatggagccgagggttccttgcggcgacggcggccccgaacctagggccgcgagaacgcatcgacgggagggcgagcgaaaccacgtcctcgatgcgcgaatcctggagcctcagcgacagagatcgaatccaatcaggaacatctttcatctattaactcaacgagaggtctcacctcgattgaaacaccatgctaaaagaatgtggaatgagtccccaaaatatgatcctgattcaattgagttaaggtctgcagatgctaaacttgatattttttcatgggcagaatcacagtccctgcatagctggtctgccaagtattgccctcttttgccacctcctaggtcaactattgcagctgctttcagtccagatggaaaaacacttgcgtccacacatggtgaccataccgtgaaaataattgactgccaaacagggaaatgtttgaaggttttgactggacatcgacgcactccttgggtggtcaggtatcatccattacattctgacatcctggctagcggaagtttggatcatgaagttcgtctatgggatgctaatacttcagactgtattgggtcacaagacttccatcggccaattgcttccattgcatttcatggaagtggggagattttggcagttgcatcaggtcacaaattgtacatatggaactacaataagagagatggcacttctgtaccagccatcatactaaaaacccgccgctcgctgagagctgttcattttcatccgcgtggggctccatatcttctaacagcagaggttaataatatagaatctgcagactcaccgctgactctggcaagatcctctggatatctaaattacccatcggccctgctggtgacaaacactaattctagattctgtacacttcctgagtccaatgtggtgtcaccttgcttactgtggcctgcatacctcagagatggtggaattttacatgtgctcggcaatgacagtagttcaaccattgtgcagcagagatcatcattagttcaaccttccacatcagatactgcaaatgtacagcttgaacagtttgctacccctatggatgtatgtccgggagagccaacttcatctaatgacatacccgatgcagtaactgttcctacttcaaatggaaatgaaatgcatggtgctggaggccagtctaactcaagactgcagggcagcagctctactagtaatcttgagaggttcagtgctagagatgatttgcaagtgtcttccctgagcaggactgacccaatcccattaacagcagggccttcaggatccgatttacaccgtgctatgccactaaatatgctcctcactggcggattagatgttcaaatgttcctaagaaatgtaggaagtggacagcaggatcattctctcttcggcgactcacgtaactgggaggtaccatttttgcagggtttcttgatggccccaaaccatgcaggtgcttcatcttcgattccccttaccactggcagttctaggggaccaaatcgacgctatgcttcacgctctgtacctggggttgggagtttgctcctagtaggtcctcaaattgacgaagctgaagctcatgctgtttcactaggtgctggttctgaaatcactgcgtccatgcttgctcctggtactgaattgccttgtacagtgaagctcagaatatggcggcacggtaccaatgaaccatgtgttcctttagaacctgaggcatgctgtctgacgatttctcatgccgttctctgcagtgaaatgggtgcccatttttccccatgtggacgatttctggtagcatgtgttgcgtgtttgttgccacaaacagaagacgaccgtggtagccaattgcctgtgtcttacgaaggggctggatcatcaccaactcgtcacccgcttccctctcatcgagttatttatgagctccgggtttattcccttgaggctgagacatttggggatattcttgcttccagagcaatacgggcagcacattgcttaacatccattcagttctcacctacatccgaacacatacttttggcatatggtcgtcgtcatagctcgctccttaggagcatagttgtggaaggcgaaaatggggttcccgtatatactattttggaggtatatagagtttcagatatggagcttgtgagagtgcttcctagcgctgaagatgaagttaatgttgcatgctttcatccttcaccaggaggtggccttgtttatggcactaaggaagggaagctcaggatccttcagcacaatggcgcagacatgacaaacatgggggtgggttgcttcattgaggaaaatatggttgagatccagaggtacgcattggaatgctgaagaagcttcaccacaccatgtgtttttaggcttacttccatggaatttttttctgcaggcttcatctgtgtgatccatccaaggggaaacattagatccatctctaactaagtgccttggggattggtctgtgcagaggtggtaggagatgtaaatctacatggccatcgtcgtggctgccataacgatgctgtaattataccgttgtacatgtatttccaattagcttaactcgattgctgttgtatttcagaaagttgacgatgctaatccttttaaagtcaaaagttactttttgttgtatacttcacctttccgtacaagctgtcgatgatgcaagaagttacacaggcgaatggaattgcctgggcttgcttttacacttgtaaaaatcgtgtattttattttcctgctctcgtctgaggttagtgtaataattcaacgtttggagtttcttgttttaactgtattttacatgaaataccacctcaaaatcctgttgtggaatcagc

SEQ ID NO: 43409 - DNA, 397 bp, Zea mays
  Clone ID: MRT4577_139597C.1
gcctgcaagtacactctataggagccccctggaggggctgactgaacccgtccgggagttcccggagtgcacccacagcgtccgcgacacacaaccacgaggggatccgggccttcctctcccgcctcctcgacaccacccggcgcgcgctgtcgggcagcccgcccctggtccgagctcgcggaccgctcggctctctaccgcccggagtccctcgccgaggccacgtgccgctgagcgcaagaacctggcctacttccgcgttaactacaccgccgtggccgcgctgtgcctcgccagggagctcctggcgcaccccttctccctggccgagctgctggggctgctcgccgcctggtgccttctctacgtgctccccccccgcgacgcgcccccc

SEQ ID NO: 43410 - DNA, 608 bp, Zea mays
  Clone ID: MRT4577_139598C.1
tccgttgctgtcggcaacatgctcagctccatcaggttgtttctaaggaagcctgtaccagtggagaagcatcagatttagcaggtgactattcaccaatggattgttcgccatatcctgcagaagctgaacatgtgccaacagagaaatatgtggcttctgatcagcccgttcacataggtgatactgttatctcgaacgggaacaccagttgtgctgaggatgatgtagtttctgcagccgagcacttggttactgatgcagatctactgatgtttggagatgaaggtagaggaccgaaactagatgcatctgagagcaattttggtagcagcgtttctagtttcgaaggagatcaaagcaatgcatcacaacattctttcactaatattgggcaaaactgtaatgagaatacctacagaactccccatgattttgttgaggctgctgcttttcaatcaaacccatcaaatttcagtgggctgaactttaaattcggtgtgtcatcctctccacaaatctctgctgcggcagcggcacaaagacgtagcgacagcaacggaattcgagctaagggtagtctagcatcgaaaccttcaactatcgac

SEQ ID NO: 43411 - DNA, 578 bp, Zea mays
  unsure (1)..(578): unsure at all n locations
  Clone ID: MRT4577_139599C.1
ttgccgccacgcgtcccgcgccgcttggtcggcaatggcgcagcctcgccgtgctcggcgccctcctcgggctccacctcatcgccgccgtggcgcagtcgccgccaactgcacccacgacccctgccgcacccacgacccctgccgcacccacgactccggctacacccacgacccctgccgggcccacgactccggccgcacccacgacccctgccacacccacgactccggccgcaccgacgacccctatcgcacccacgactccggctgcaccgacgacccctgccgccaccccggtcgcgccagcaaacccgccgccggttccgacaacgccagcgcccaccgccaccccagtcgcgccagcgaagccgccgccggtcgcgcccgcggtcgcgccggccaaacccccgccggtgacgccgccaccagtgacgcctcctcccgctacgcctccacccgcgacgccgcccgcggtgctcccacccgccgtgctgccgcccgccgcggcgcctncgccgacggccacgccttcggccgaggcgcccgcgtggctgcctcccgcgacgacgcccccg

SEQ ID NO: 43412 - DNA, 2576 bp, Zea mays
  unsure (1)..(2576): unsure at all n locations
  Clone ID: MRT4577_13959C.1
cattgggtacctcgaggccggccgggaatagattcctacgaaatctcgattctcgcagactgtcagggcggtagaaaacgcgttgaccattcacaccccttcgccccaccctccagatcccgagcaggcggcgcgcccccgccctcgccggggataccggatcgcgtgcctcgagccggccggggaaaaaaaacagaactgaatagaagttttcttaccttcgtgcttcgagttgcgtctgtgctcctggcgcttcgtcgccgaattggtgtggctcacgtcgccggtgaccttccggtggccaggggcgtgacaccgcgctgccagatccggcgacgtatcgactgtcacggtaactagtctccagccggggtcccagccgatgggcgccagcgggctcaccgcggtcgtcgtgctactcctcgcctcggcgctactccgtgtccctgcctctgcaggtagaagccttctggaaggcgagaaccccaactccggcggcgaggacgctcctgcacctaccgtttctgggaagtcttcagctgcggggcagcagcaggctgagagcaagcggcaacagaattcactggcaccactgccatctgcatcatcaccgccgccgccgccacccacacaggagacgaattcgcacaaggcagccagtcctcccccaggaggtggagcaggaccgaatggcgggacggacccagaggacacgggaagtcaggggaggaggatggggactgataaactgaaggaggcgatggagaagtgtgatgcctcgcataagtgttcctctggaaaggaattttctgcctgccttcaggtttctgaggacgcatcagttgggtcatatattattgtcaagaatgaaggccagcatgacattgacattaatgtcaaagaaccgtcatcaaatacagataatgataagaagtctctacatcttatcaagggtgcctttggacagatgaacataacatataccacttcagatgctgggaatattactttaagtgatggaaaggtagactgcatcatacatgttgggcagccagtagagaggaaatcggtttatgatttgcaacaacagtttcagcagcttacagcctatgcaatgcgtttgaatccagcttatggagcctctttttttgttttcactgttgttttggttgctgttggatgtgcctgttgcaagtttgcaaagagaaaaggcaatgatggtgtcccgtaccaacagcttgagatgggaggtcaggcaccaaactcttcgggggtggacaacaccgcaagcacaacagatggctgggaagacggctgggacgatgactgggatgatgaagaagcaccggcaggacctgtggataaaaagcctacgggcagtgtctcagcaaatggcctttcgttgagatcacagacaaatagcaaagatggttgggatgtggattgggatgactaagctcctaagaacttggagtgtagctgtcaaatgagggaggaagatacttccatctgtctgacctgcaggaaagacatctacagttcgaaatgatggaacttagtcttgaccaagtgacccttatcctgaggtgaaggattgcctcacgccctcacttcatacggtttgtacaatattgttccaccccccgtctgagttgatacacgaactgttagcggtactgatttagttcttttcggtttgtaatggtacagaagaattgtcagtatatatatatataaaaccaaagcacacatttttattctttggttgaggtaattattctttaaactgcgaggagactgacatactgaaggatgccatggagaagtgtgacgcctcgcataagtgttcctctggaaacgaattttctgcttgccttcaggttcctgataatgctatagnagtgacatacattatttttcgcaatgtataacatatgggacgaatatattttcgatgacatacagaaaattgacccataatattaactcaaggagcaccacagctgagccaccgctgcagcgcacttgccgccactgttctgccaagttgccgtcgtcttgcctattcttttctttcccctttgcgcgcgccaacaaatcacaattgagaaatgtttctttctagggttcttgagaaaaaggtaggagaagattttgtctccaactagccccccacccaatgcaacatccacaggagaactttacatggaattaacaatcttgagagggctcagttgcaggccttggcgatcaggtaattattgtgttccaaccaccagcaccatcaactaactaaaggcactatgattctgaatggtaccataggataggcactgagccctgaaggttggctaaaacatacctgaatatacagtaggttcgcaggtttcgcctcagcctgatgtgcagagagcaatacaaaacaaataaattaaaaggatgaacaaaataaataactaaaaataaaaaagacgaacaaaagataggagggaggggggataataaaatagaaacactacgagatgcgggaaagtaaataaatagaaaacctaacttttacgtgaaganacaagaga

SEQ ID NO: 43413 - DNA, 381 bp, Zea mays
  Clone ID: MRT4577_1395C.1
ccagaacttgctgctaagccgattagtgccgctgatattgatgccatattcactaaagaagttgttaatcctgccagcaatgctgtagagtcttctcaaacagtgggggctcaaatggtcagtggaaattgtcaagaaagtgttcacgacgaaggggacagctctgacaaccatggaaagaatacagaatcgtcagatcagacaactgatatggtggaacgtgagactggccttgctgcaaaactggataagttggagaatggtccaaagatcagtgagagtaatccggaaggtaatgttcacgacgaagaggagagttgtgacaaccagggaaagaatacagaatcatcagatcaggccatttgtatggtggaaagtgag

SEQ ID NO: 43414 - DNA, 449 bp, Zea mays
  Clone ID: MRT4577_139600C.1
gcggctggcttcgctttcccttccaggtgtctctcatggtcttagagacggctctgggaggactgaacctggcctcttgaaaacaaaagccctcagtggatattacctctgtggtcttaaactcggcgggctttctgatatgactttacctagaaaggtatgtaatgtggttgctggtttttccttctggaggaaactagaagcggatggcctcaccgagtctgaaatgttctccgatgataatgggtattttggtgaagtgcatttatgtgggatgtgaatgcagtgtttgaatggacattcctattatcctggggcactggtaaaggcagctaaaggcagatgaagggcacggaccaaaagttggatcagaggagctcccttgtctgtccagcgtgctgtggaccctggtctggcttggagagaatgtgggcgttttattttccgtc

SEQ ID NO: 43415 - DNA, 1229 bp, Zea mays
  Clone ID: MRT4577_139601C.1
cattgggtacctcgaggccggccggatcgccccgagatccatcactcgcattctcaccggcgagctcagggctcagcatccgcgcgcctcctctccaagcagaccaccaccgccggaagcatggccgcgccgctgcttcggcaatggcgcagcctcgccgtgctcggcgccctcctcgggctccacctcatcgccgccgtggcgcagtcgccgccaactacacccacgacccctgccgcaccaacgactccggccgcacccacgacccctgccgcacccacgactccggctacacccacgacccctgccgcaccaacgactccggccgcacccacgaccccggccgcacccacgactccggctgcaccgacgacacctatcgcacccacgactccggctgcaccgacgacccctgccgccaccccggtcgcgccagcaaacccgccgccggctccgacaacgccagcgcccaccgccaccccagtcgcgccagcgaagccgccgccggtcgcgcccgcggtcgcgccggccaaacccccgccggtgacgccgccaccagtgacacctcctcccgcgacgcctccacccgcgacgccgcccgcggtgctcccacccgccgtgctgccgcccgccgcggcgcctccgccgacggcgacgcctccggccgaggcgcccgcgtcgctgcctcccgcgacgacgcccccgcccgtggccgaggcccccgcggagctgccgcccgccgaggcgccgtccaagggcaagaacaagcacaagaggaggaggaagcagcacggcaagaaggaggcgcccgcggaagcgccgcagccgctgagcccgccagctcccgccgcgccgtcgccggctgatctggaggacgtgtccggccctgcaccgtcagccgatgtgaatgcgagttgccggcagcaccagaactgggcctccgtcgtcgtgcagaccgccatggcggcgcttttgttatcgctagcgtggtaaactaataaatcccagagagaaacgaaagatccatatatcagcgtaccagctcagctcatggtttaattatttccgcccttcctgttcatgccgcaccatcatacataggccggtgagattatctgcgggatttgttataggaaccgttggattgtggcttgtggtatttgtttttgacacattctgtatccattttttcgttaatttttggaataaagacgcacacttgctcaccc

SEQ ID NO: 43416 - DNA, 581 bp, Zea mays
  Clone ID: MRT4577_139602C.1
gccggccgggcctcggcgcgacgcggcggcccgggccgggtgggagacggcggggtggcgcggtcgtgagcgagaggaccaccgacacggacacggaattacaacaaggtggatgcgcctgctgatctggtgacgcacgtgactcgaagggaaacgctgctgctgatagctcctgaatctcaccaccgcccatccagtcgtaatcatcaattcacttctcacggcgctagctacaagcggtgcgtagtcctacatcgacgactccgtatgacactgcctgacgccgtcgtatgtccaatacgtcgggcgttgccataaaactgcgaaacaacgaattccacccgggaagttaccttgttcaacaaggatatgcacgccaacctcttctactgggcgcagccaaactcccccaccgtctacgactgagtctacatagacctatacaggatgaaccaccgttacatcgggcaagatggacacttaatacagccggagtctctgacaggccatgattgctgggcctagtgcatatctaaaacgcatgcatgctctattataggtagtcatcactatatatatac

SEQ ID NO: 43417 - DNA, 1387 bp, Zea mays
  Clone ID: MRT4577_139603C.1
taaaattgcacaagtgtacagcaagtttgtacgtcctcttccatcatctatcaaggaatttgcgttaagtttccacaaaattttcccacacattgcagataccaggcatcttatgtctgtcaatcaagcagttcagaaactgatgaagcacaaaagcaaatcactatcttcagctttcttattgttgtgccctgcatcttattcatctgttgagaagccatccagtcattctcctgtgacaattgaagttgaaggagatgaaacgatgtcttctcgcttcatttctggtgccaagcatgaagctgggtacgatgcatacatgactggatgcatttttgcgcagttgtgtgcttatcttggcatacaatttgagcagttctcacctctggataacctagcaacgaacactaagctgcagaaacacatcaattttttgtcccctagctggaacagtggaacagtgcttgatttgagcactggcatggagacaccagatccaggttacacgagaaggtaccctgctgctgtgtatgataacattgttgtcatctggggattcctgtctaaggttagaccgaaggaaattaaggattgcatctgcaaagtatttggttcaggttcagttacaaccgtcttctccattgattccactgctgcccttgtgcagttcaagaaacaagagtctgtaaacgatttcttggatttgaaggctgttttggagagggcagatagtgctatctcaattctacaccccctgtcaactatattggaaggaggccaaacacgagctgcaaagtatgatacctacagagacatctgcggctcttctgaatcaatatatctctttgctgatcaagctgaagcagtctgtgcaacctcaaagaatcaactcatagaaaatgttgatggcaatcttatatctgatgttcttgatggagctgcactcgcctctgtaaccgaggaagatggaataataccgagttccaagaatcaaaacgttgctgaagttacatgttaggatatagcttagatgctctatacgatggcaaatcattgtttgtgcagacgaatgtgaagctaattactaccatcgacctttttcagcaggttattggcctggccttctatttgaggctcactgactaggccaatattttgatgggtattctttttaccagtatctttaggcacagtgccatctctagcatccgcacggtgcaagctctgaactacagagtaaatctatacttatgcagggaagcattcttcttgatgccatttactggatgatcaatgcattattacatcgtctatcttgggtgtagtggctgtgaactttttattaatataatgacaagatagagtaaaaaaaaaaaaaaacataaac

SEQ ID NO: 43418 - DNA, 443 bp, Zea mays
  unsure (1)..(443): unsure at all n locations
  Clone ID: MRT4577_139604C.1
tttgggctgatttatgtgcttgtttatgtgcttgtggatgtgcgggttatcttagtatcgaatatccgaccgacctagcaggcagtcagtcagtcgaactataacggacttcattaagccttgcttgcttagcagttatgatatgatggcgatgatgatgaatgtgggtgtcttcgcgcggaatgataatgaggtgtcgatcgcggggttctgtggctttacttcgtcggaggatcattattcgactgagaaggcggtgtatcctgtgtgtgagtgtacattggagtgtgcggcgtatgtgtgtggggttcntgataagggtcctcctgagcgtatttatgatgcgatgctgtcgatgcgtgttgatccttcgtgtgtgtttggtgcgtggatgtttgcgactgcgtgtcctctgatggcgacttatgagtgggggcttttgg

SEQ ID NO: 43419 - DNA, 223 bp, Zea mays
  Clone ID: MRT4577_139605C.1
cccggccccgatccccaatttcgaccaagacccacgcctacggggccgactgtttgtttttttaacaaagcaaccaccaactgggccgggggcgggagcgcctttatcaatgacgcgggccaacctgccgtggacccgttcacccccgagccccaaggggaaggcatccttaaagggcaacctaaacctcctgcggggattaggcgactttgccgggaaggcc

SEQ ID NO: 43420 - DNA, 586 bp, Zea mays
  unsure (1)..(586): unsure at all n locations
  Clone ID: MRT4577_139606C.1
gccggccgtttccgagaagaatgtttacaagaatctttcatagtattcgcgacaatatgggtaaatcagccatacgtcagaccacaaagcatgattcaccttctatcagcgattgttcagaaagaagaccttcggttacagaagaatgtgatagtatgttgacaagattcacagctcaaacagcaccagaacctattcctattagaaagaatagcagaagaagcagtgctactgtatttggcatttccgatgttacttttgacgattacgtacaaaaagacctcgtttcaagttcctggagttaaaacaagttagtttataatcctcttctttgctgaaccaagtgctcttttcggttactttaaagagtctacttctttctcactttgatatacaagtgtatggcaaccctatgtcttttttcccaatgtccttctttctgtaaattcatgtaattagcttcttttctaataaagattgtagtttataaatcnnnaaaaaaaaaaaaaaaaaaaaaaaaacaaccaaaccaacaaaaaccacaaaaacaccaaaaacggtacaaaaaaaaaaaaaaagggcccta

SEQ ID NO: 43421 - DNA, 302 bp, Zea mays
  Clone ID: MRT4577_139607C.1
ttagcagtggtaacaacgcagagtactctgttttttttttttttctaggtgtaaatctgatgagagaggttggggtacacatgggcattctgtaccagcggtggaaggcgccggcgactatgacgaaccagtgtgtgttattattattataagacaacgatggatttctgtagctgaaggggttatttgcctatactattgtgcttgttaggttactgtgacgatgaacgtagtgtcagacccctcttcagactacggttgggtgtgtattgggcgctcttccgctttctgggtcactggct

SEQ ID NO: 43422 - DNA, 264 bp, Zea mays
  Clone ID: MRT4577_139608C.1
gctttgtggcggcggacagcggctgcagctagagccgggcagcgggcgacgcatcctgccatcgtcctcgtccggccagctgcacactgtgatccaatacaatggctagcgatggctgaagacctagatgatgatgatcatgatgatggacctgaggcatcgttgtaagcttgttgatgaacatctacatgacagtaatgtaccatgaatgctatgaatgtttcctagtggacttgccccgtaatgttttgtgatcttgtgaac

SEQ ID NO: 43423 - DNA, 324 bp, Zea mays
  Clone ID: MRT4577_139609C.1
ttgggtacctcgaggccggccgggaattctccattcattcagtctcgactgcatcttccccccactgcccattcgcctcgctcttgcataagatatcttctgtccagctagaacatcctagagctagctgttgcatgcgttgatcgagccaccaccagctagcattgtgatcgagggaacaagaagagatgaagtttggcaagaggctcaagaagcaggtggaggagagcctcccggactggagagacaagttcctagcgtacaagcgcctcaagaggctcgtccgcctcgtcccggcctcctcgcccagcaggaggggcggcc

SEQ ID NO: 43424 - DNA, 430 bp, Zea mays
  Clone ID: MRT4577_13960C.1
aatgcaacatccacaggagaactttacatggaattaacaatcttgagagggctcagttgcaggccttggtgatcaggtgtcatgactgctatggtcgctgacgaggaagtagaagctattagtgtatagagattctgtaatggtgtgatgggctttcatgccaagatttgtgtataagtaattgaccttcgtgcttcgagttgcgtctgtgttcctggcgcttcgtcgccgaattggtgtggctcacgtcgccggtgaccttccggtggccaggggcgtgacgtcaggtaattattgtgttccaaccaccaccaccatcaactaactaaaggcactatgattctgaatggcaccatagggataggcactgagccctgtaggttgcctaaaacatatctgaatggatatacagtaggttcgcatgtttcgc

SEQ ID NO: 43425 - DNA, 370 bp, Zea mays
  Clone ID: MRT4577_139610C.1
cgtcaatccctatcgtagctcggtacccgctgggcgagagtaggaggtgcccggtagggggtgcatggcccgcctatgggcttggttctggacacgtatgacttcttggataggtgtgggccagaactaccgcgtcgggatcattgtcaacaaccagggtaaccgaaccacgccctcgtaggtgacctttaccgactccgagcgcctcattggcgatgcggccaatacccaggccgccttgaccccagatcaacacgttgtttgttgccaaccgtctcatggcgaggaggttcagggtgtgcgctgtccatagggttatcaaccgtgtggcccttcgaggtcttttctgggccggcggagaagccagtga

SEQ ID NO: 43426 - DNA, 616 bp, Zea mays
  Clone ID: MRT4577_139611C.1
gccggatgaaacacacacagttgccttaagaaacacagctaccggatgttatcatcatctagagtgcagggttcagttccaaaagaaagttgactctttagcaatctctctcacgggcatagtaggtctaggttgacacaaccagtcacaaaaggatgcccaccctgtgcatcaaaatactattttagaagaaaccctcctccattcgctattagtaccatatcagtgttccgctatgttctagtaccacatcagtgttccatgtcgacggcatcagatcctcaaaatagctacttctttttctgtccaacagagttgtttgcgtcttccaggtggcgcaacaggattggaatagcgcttttgcaggtgtgcattttttttttccttcgtgaagtatgcatatgttgatcctgtttcccaataccttttccagatttacttgatacagctggctccttttcgtgcaatccttttttgttgtgtcccataccacgccaagggggtgatgattgcttggcagagtcattagaagatgtagcttctatttcatcagaaccaccagattgattagaagttgtaaggctatcggcctggtcagcctcaacgtcctgattcg

SEQ ID NO: 43427 - DNA, 1332 bp, Zea mays
  unsure (1)..(1332): unsure at all n locations
  Clone ID: MRT4577_139612C.1
attgattatcgtaaggaggtactcactgagaaggttgctttccagaactctggtcctgcatccattaataaacattcagtgctccagaataacggtaaaacacgagttaaggatccagagaaaaagcagcaagcgggagacgaagaagctcgcaaagaagctggtaatgaaaaatctcatgaaacaggagcttcatctcagagaagatgtgatcctccttcgaatcatgacgttgaggctgaccaggaaggtagtcttacaacttctatccaatctagtggttctgatgaattagaagctaaaggattgcaagagaagaaggcagctgtatcaagtaaatctagaaaaggtatttcaaagcgggatcaacatatgcctacttcaccaagaaaaagaaattctgtacacctgcaaaagcgctattccaatcctgttgcgccacctggaagacgcaaacaactctgttggacagaaaaagaagtagctattttgagggtaatcattctttggatgtaaattttcattgttgaaacactgtctctagcgctggctgcgctggttttcccaggccaggttcgtagtgtgtctcgcctggccatgagtattatacttttttactgtgatgatccaggatgggatggcaaaattatctccacataataatggtaaaataccatggacccagatactgcaatatggccgtcgtgtgtttcacaagacgcgtctgccatgtgatttgagggtgcaagtggaggaacatggagaggaagaagtgggcaggctactgatgctggcaatcttacacaggcacacacacacacacannnnnnnnngttgtgtgtcatactgaattactaaccacaccttcatttgtttgtgtccatctgcaaatctgatgccgtcgacatggaacactgatgtggtactagaacatagcggaacactgatatggtactaatagcgaatggaggagggtttcttctaaaatagtattttgatgcacagggtgggcatccttttgtgactggttgtgtcaacctagacctactatgcccgtgagagagattgctaaagagtcaactttcttttggaactgaaccctgcactctagatgatgataacatccggtagctgtgtttcttaaggcaactgtgtgtgtttcatccggcagctgccagtgcctcgcccaatgttctcgaatgaggtaggcgtcgtatgctctaaacacatcacgaataatttcttccagcgtnnnnnnnnnnnnnnnnnnnnnnnnntgaacgcaaccttgtaagtcacgttgcagaagctatnnnnncagttagtgaaacc

SEQ ID NO: 43428 - DNA, 157 bp, Zea mays
  Clone ID: MRT4577_139613C.1
cccacgcgtccgggtatctttcttttaatggcaccctgtatgaagtctgtcatttgtaaccacaatgggctcttgtctggcgcgtctttttagactttgctgggctgaggtcttgtcttgtccgtctcttttgactttgctgggctgattcccgtgc

SEQ ID NO: 43429 - DNA, 576 bp, Zea mays
  Clone ID: MRT4577_139614C.1
cgaaaaggagccagctgtatcaagtaaatctggagggggtattgggaaacaggatcaacatatgcatacttcacgaaggaaaaaaaaatgcacacctgcaaaagcgctattccaatcctgttgcgccacctggaagacgcaaacaactctgttggacagaaaaagaagtagctattttgagggatgggatggcaaaattctctccacataataatggtaaaataccatggacccagatactgcaatatggccgtcgtgtgtttcacaagacgcgcctgccatgtgatttgagggtcaagtggaggaacatggagaggaagaaatctgatgccgtcgacatggaacactgatgtggtactagaacatagcggaacactgatatggtactaatagcgaatggaggagggtttcttctaaaatagtattttgatgcacagggtgggcatccttttgtgactggttgtgtgaacctagacctactatgcccgtgagagagattgctaaagagtcaactttcttttggaactgaaccctgcactctagatgatgataacatccggtagctgtgtttctcac

SEQ ID NO: 43430 - DNA, 1463 bp, Zea mays
  Clone ID: MRT4577_139615C.1
tggaggtcttgtctcaacaaggtttgtgcataaaatgtggtgaaggtggtcagttgttggaatgcaatggctgttttttagccgcccatagcagctgttttggttcatcggcgacatttgaaggaaccaattttttctactgcccggtatgcttgtataagaaagccactgaagcatataaaaaggcaaagataacatattgtgaaactaggaagaaccttgttgctttccttggcacagcacaagccaccaatcaacctgacaaacaactaaatggggcgcagccaggagctgccaacagagatgaagagcctcatgatgagcaacattctaaagggtgtggcgcatcaaaaggggcccatgaaaatgaagtatacaatcttgctcatcaggatgaagagcatcatcagcagaggaagaagcagaaaataaatgctataggtaagagttatcctaaggaggtactcactgagaaggttcttttccagaactctgatcctgcatccattaataaacattcagtgctccagaataacaataaaacaccagttaaggatccagagaaaaagcagcaagcgggagacgaagaagctcgcaaagaagctggtaatgaaaactcatctcatgaaacaggagcttcatctccgagaagatgtgatcctccttcgaatcaggacgttgaggctgaccaggacgatagccttacaacttctaatcaatctggtggttctgatgaaatagaagctacatcttctaatgactctgccaagcaatcatcacccccttggcgtggtatgggacacaacaaaaaaggattgcacgaaaaggagccagctgtatcaagtaaatctagaaaaggtattgggaaacaggatcaacatatgcatacttcacgaaggaaaaaaaaattgcacacctgcaaaagcgctattccaatcctgttgcgccacctggaagacgcaaaaaactctgttggacagaaaaagaagtagctattttgagggatgggatggcaaaattctctccacataataatggtaaagtcccactaacccagatactgcaatatggccgtcgtgtgtttcacaagacgcgtctgccatgtgatttgagggtcaagtggaggaacatggagaggaagaagtgggcaggcttactgatgctggcaatcttacacagtgccacacacacacacacacacaactgttgtgtgtcatactgaattactaaccacaccttcatttgtttgtgtccatctgcagatctgatgccgtcgacatggaacactgatgtggtactagaacatagcggaacactgatatggtactaatagcgaatggaggagggtttcttctaaaatagtattttgatgcacagggtgggcatccttttgtgactggttgtgtcaacctagacctactatgcccgtgagagagattgctaaagagtcaactttcttttgg

SEQ ID NO: 43431 - DNA, 646 bp, Zea mays
  Clone ID: MRT4577_139616C.1
aattcggctcgaggcgtcttctcccgcgctaggggttagcatcggtccccaatggcgtcctcagccgccgccgccgccgccaccgtcatgctcggcggcaagggctccgccctgtccccggccgccgtttacgcgttctccctcggcctcgccgccccgggcatcgacccttccgcgcacaagtcgctctctacccgcgcgccctcgccgcaggagacccccgcgcggctcgccgccgccctcgcggcgctggcgccggccgagtcccgcgccgccgcggcggtgctgcttaacaagctggtcctcacgtcgtccgactccgcctccgcgctcgtcaccgccgccacggtcgcccgcctcgcggactcgctcgacctcgccgccgcgctgccgctggcctcccgcgacgaggccgcggtggccgcggcgaccgcgcccgtcgccgtcgcgctagcggcgctgatcgattgctgcgccgagccgctggctcgcgtcgccgacgccgtcgccgcgctgtcgtgcgaggccgcgcgcggggacgccgcggccttcgacgtgccggcctccggcgacgggctctgcgccaaggacgaggcccgacgtcgccggcgacatcaaggtgctcgtcttcggctccaagcttgtc

SEQ ID NO: 43432 - DNA, 446 bp, Zea mays
  Clone ID: MRT4577_139617C.1
attcgaaaaagaggaacaactcccgacgtttgctctgctagaagatttctgtccttcgcgacaccatgattatcccaggacagtgacagaggatgggcctcctgcactaccccgagacctgaggcgtcctccctcagagcggaggaggccacgaaggtgtcctcgaggctttacaggatgtcaccatgctgctgatgaccatcaactccgccgcgatcgatgattatcgatctaaccgagatataatcttcgccacaatctccgaccagacgtcccacatcctgattgtaagatatcacctacaactaattaccttgccttgccgcccaacttgtatgacacatatatacgaagaaataacgcctacatgcacgaaaccgctcgagcgagtgtctcctccttgatgcatgcatacgtgatcgcgctgatctataccaacaaccaca

SEQ ID NO: 43433 - DNA, 194 bp, Zea mays
  Clone ID: MRT4577_139618C.1
tctccccccccccttacttaattttttatattattttattttactttctcttacattatagttttttttttttatatgagatgatctacacttatcccactttcctcactaattacaacttatcaactgataaaaccctatctttacccatctttatctcctttctataaattttcaacttatcaaataaaata

SEQ ID NO: 43434 - DNA, 336 bp, Zea mays
  unsure (1)..(336): unsure at all n locations
  Clone ID: MRT4577_139619C.1
ttcagggtttatgatactgactgcaacgggnaaggttgcttttgatgacatcttaagcatcttgcgagatctgacaggttcatttatgacagagcaacagagacaggttcgtactctggatttccggttccctcttgggttatcacacgacatagcaattcttgcatgggcatgaactgctagctagtttcagctgagaagttatctcagtaaaacataatgccttttgcaaggagtttatctgcaaattatctttntctcctcccccaaaaaggcactattggcaccatgcggcaggatatagnttcctggagttaaagattcttaatttgcgta

SEQ ID NO: 43435 - DNA, 1202 bp, Zea mays
  Clone ID: MRT4577_13961C.1
tgaaaaaccggtgcggccggtcttttttttttttttttttttttttttttttttttttttttatacaattaatacgacttcatctcagtgggtttattttgaaggggtacaaaaataccttcggactttacaaagagagcgagaagataagatgcaacaccttagaaggctgagagaactcggtccagtccgttctccaatcgtgtcaatgtatgtcactatgtatgtccatgttcctctatttatagttagagggtacagctttatgtgaatttacaatggtctcttgacggtctcatgcgaaatgcaggcaggaggcagcattgtcttctgatgctaagctccagtaatgttagtttggaagatttatatttacccaccggccaccggtacgtaccataatgcagaaaaatgatgctactcgagctgcgacgttaaccatttgctcgcagtcgcagccaagcccggcagccgcgaagtcctcctccaaatcttcctcttgtcctcttcacgcacccgaaatcgagtcctcgccagcatcgatcggccaatagaactagaaccccacgaaatctcgattctcgaaccgaggcttcagaaaacgcgttgatctttcagacaactagccccacccccaccctccagatcccaaccaggcggcgcccccccgccctcgtcggtggtcctggatctgtcgtcaagccgccggggcgccacggccgctgcgattagctgccctgccgcgctgccagatccggcgacgtatcgactgtcacggtaactagtctccagccagggtcccagccgatgggcgccagcgggctcaccgcggtcgtcgtgctactcctcgcctcggcgctactccgtgtccctgcctctgcaggtagaagccttctggaaggcgagaaccccaactccggcggcgaggacgctcctgcacctaccgtttatgggaagtcttcagctgcggggcagcagcaggctgagagcgagcggcaacagaattcactggcaccactgccatctgcatcatcaccgccgccgccgccacccacacaggagacgaattcgcacaaggcagccagtcctcctccaggaggtggagcaggaccgaatggcgggacggacccagaggacacgggaagtcaggggaggaggatggggactgataaactgaaggaggcgatggagaagtgtgatgc

SEQ ID NO: 43436 - DNA, 228 bp, Zea mays
  Clone ID: MRT4577_139620C.1
ctcgagccgtatttttttagaagcaggtatgaattaaagctaagataacatggtataagtgttgtttttacaagatgcgcagtgtgattcgttctttaaatgaacagatgagctagtaatattatggacaatccatttagcattcggacgatggagtcgagtcagtccccaggtgcaacttgcagctctgcacagatgatcagtaagtatccgcgacctggaaggctg

SEQ ID NO: 43437 - DNA, 270 bp, Zea mays
  Clone ID: MRT4577_139621C.1
gtttttatgtgtcttgttttgtgaacagagtatgaatcactcgtaaagtctgtaagttcaatctgtctaccaggatgacaccccttccgacaatattgtgaatggtcctgtttactgccatcaggacgggactgtgttccagcttacagtggactgccactcagatgacctaactgatgtggatgatgtgcaaaagacgctaaccaataacgggttgctgattgcacatgcactgaatatttggccaaggaaggaagctgtatagagtcc

SEQ ID NO: 43438 - DNA, 131 bp, Zea mays
  Clone ID: MRT4577_139622C.1
acagttctacattaaattaccaatcctgtacaggtaaggcttagttacaggccggatcttttcaaaatatttattcgcgcgaaatgaaggtacacccgttcgggaaacagaaaaaagggggctttatgtgt

SEQ ID NO: 43439 - DNA, 293 bp, Zea mays
  Clone ID: MRT4577_139623C.1
aacagcagataggtcaacactaccctatttccgtccccacttcaacaaaagaacaaacacacccacacatggcctcatgaagcatccccacaaacccaaacggcagtgcaaactctatccaaacccgaagccctcctcaaagcaagtaacacacacccccccaacttctaaaaagaaaacttgcccctcccccccacccttcctcttgcctcaaacactcccctacttcttaaaagaaaaccttccccttcttcccagctttacccttgccttcctcgacccccccaagaagc

SEQ ID NO: 43440 - DNA, 239 bp, Zea mays
  Clone ID: MRT4577_139624C.1
acagtgtcagtccatccggcatcgctacctgcaggagaatgaacatcaccatatagtgatgtataaagcttttaccacaaactttcaggaatgtcttgcatggtggatcgcatgatataggatacactcgttggacatatatcatcatccgtattaccttgtccgcactgtccatacagtccccacacaagtgtaagaatagctcctgaatctgttactgcagaactgtgacaacgtcc

SEQ ID NO: 43441 - DNA, 1476 bp, Zea mays
  Clone ID: MRT4577_139625C.1
aacccttacgctgttccgtgccggtgctcgtcggatccttgtatttcacgctcgacacttcatcactccagaaattcacgtcacatcctggggtgtgtacgtgtacgtgtacacccaccccatgatatatacccaccagtttcgcacacgtagatatcctcgaggccggccggggatagacacagatagctagaacacacgagcagaggatggctaggcctaggccgtcggtcgtcgtcctcgcggtggccgtcgccgtggcgtccctcgcgcagcccggcgcggccgacctgaagctggactactacgcgagcacctgccccaacgcggaggccatcgtgcgcggcgtggtgcagcagcgactgcaggccaccatccgggccgtcggctccaccgtccgcctcttcttccacgactgcttcgtcgagggttgcgacggctcggtgctgatcgaatccacgcccggcaaccaggccgagaaggacgcctccgacaacaagtccctcgcgtccgaaggcttcgacaccgtgcggagcgccaaggccgccgtcgaggccgcctgcccggacacggtctcctgcgccgacgtgctcgccatcgccgctcgggacgccatctccatgagtggcgggcctttcttcccagtggagctgggcaggctggacggcctgagctccaccgccagcagcgtgccaggccagctgcccgaggccaaccagaccatggaccagctgctggcagtcttcaaggcacacgggctcaacatgtccgacctcgtcgcgctctcagcggcgcacagcgtggggctggcgcactgcagcaagttcgcgagccggctgtacagctaccagctgccggggcagccgacggacccgacgctgaaccccaagtacgcgcggttcctggagagcaggtgccccgacggcgggcccgacaacctggtgctcatggaccaggccacgccggcgcagttcgacaaccagtactaccgcaacctccaggacggcggcgggctgctgggctccgaccagctgctctacaccgacaaccggacgcgccccatggtggactcgctggccaacagcaccgccgccttctaccgcgccttagccgacgccgtcgtccggctcggccgcgtcggggtcaagtccggcaggcggggcaacgtccgcaagcagtgcgacgtgttcaactgacagggaaatcgtgttcaacgtccggaagattcatttgatttgggtgttttgcttgtaatgcagctgttctctttgattcgttgcatagcacgcggttgattcttaaacttgtttgtggtaattattcagcaattagttgttctacaaagtggtgaataatgattctgcctgctttgtcatagagtaaaaccccaaatagcagccaaaattagatcatacatagatacagttgattgcaaaaaaaaaaaaaaaaaagcggccgtacgtatccacattcaat

SEQ ID NO: 43442 - DNA, 129 bp, Zea mays
  Clone ID: MRT4577_139626C.1
ctatctgcctttcagtgctggccgctccgtgctccgtgcaaagctctctgttctccttgtattagctggtaccaggctttgcttgccgtacccttacgatgctcctgctggttcctccctctcttcccc

SEQ ID NO: 43443 - DNA, 656 bp, Zea mays
  Clone ID: MRT4577_139627C.1
ccggccgggaacaatttcttcccatcaaacaaacacgaacacgacatcaatggcatcacaccactaccactactactactactatccactcaaacactcacccccaatctccaagatgctcgcagccgctaaactgatcgactcatatgagatggaccctgatgtctcgtggctcgaggttttcgcatactcgggagttagcgctgctttatgcgctaccatatgggtcgcagccaaagcatgctgagactgcagtgccagatcagcacctctatcatctacccagcccaacagaggaagaattgcctgtcacaaatctcagcattcttccacttcggccccacgaatgaatcatttcccaactgggtttcgttgcggggatcttcacaaggaacttcgacaaatcccctcgcttgaaatcaacactccttcactatgatcaatatcgtttgtcgtacgggctaaacaatatcaagccatgtcgagacaatcaagggacacagcactgattcgcccaccatggttccagactgctttcagcacgattggttggatagatggagaagatgcggttcacggttaaaaaagtatactagaaatatatattgaaagtccatcattcaagttacaaaaaaaaaaaaaaaaaacccgcggcc

SEQ ID NO: 43444 - DNA, 201 bp, Zea mays
  unsure (1)..(201): unsure at all n locations
  Clone ID: MRT4577_139628C.1
ttcttctctcgcatccgcagcctctcgagcggtactccatcccctcgatctggaagcgcancagcagcagtcaggcggccatggacgccagcgcaccaggagccgccggaaaggcaaaaaaggccccggccggccccagggccgccggcccaaggaggaagccgggaccagggtcggcaagggccggccgtaagttcccgg

SEQ ID NO: 43445 - DNA, 317 bp, Zea mays
  Clone ID: MRT4577_139629C.1
aaaccggccccggttttatttttaaaaaaaaacccataaaaaaaaatttgggtgggggggggctccatgtaaaaaaataatttactttaaaaaatgggggaggccataaattttggaaaaaaaaatagaaattaaaaaccatttttaaaggttcaaaaaaacgggatttatagtttctaacgggtttgggggaaggggggctgtaaccaaaaccgttttagtttttaaggggctgaaaaacccttttaataaaaccagcaggggggagagtccaaagaatcctgggggggttcctggaagggaaaccttgcaggggg

SEQ ID NO: 43446 - DNA, 553 bp, Zea mays
  Clone ID: MRT4577_13962C.1
cggcccggaaaaaaaaaaaagtgtcatgcgggccgcaaaacccaaggccccgcccgggggaacagcccggggggccggcccaaaaaaaaagggccggggggggcagccaaagaaaaagccccgggccgcccataacaagggccaaggccccacgaaaaaaaaaaaaggcccacgcacccttttaataaaaaggccggaacccctttaggaaacaacaacaaatcttccttgcgcaaagatccgcctgccccccatcccaaaaggagcccggcaaccaccaccgtccttgggggggacaacgctccggccggaccgaaataaatgcccgtacttgggaggccgaagggccctgcccacataatccattgggaaaacattgccaaaccagggtttggaggaccttcgggggacgaaggcccccaacaacaattactcacatgggaagcgaaagaaaaaaatggccccaaagaagctttgaagctggtttggaaacacggttctttcttccaagtcccgcaggacaatgttaaatcaatccagggtatcctgaaaa

SEQ ID NO: 43447 - DNA, 445 bp, Zea mays
  Clone ID: MRT4577_139630C.1
cctactcgacagcatcgggtaatagtacgcggtatagcagcttggggagggactcacactcggtgactccatcattcactacgagataaacctggagttgacgctgcactcttagggaggcctgcagagatgtgtgaagacctttgctgggaagacaattacccttgaagtggcactctcagacaccatcgacaatgccaaggccaatatccaggacaaggagggcgtcccagctggccagcaacctgtcatgtttggcggcaagcatgtcgaggaggggaggacccttgctggctccatcattcactacgagagcaccctagagagggcgctgcattttagggttggtatgcagatctttgtgaaaacccttactggcaagaccatcactctgaacgtgaattttgaagatgccattgacaatgccaaggccaatatccaggac

SEQ ID NO: 43448 - DNA, 256 bp, Zea mays
  Clone ID: MRT4577_139631C.1
ctggcacatcttcaatatagcaacaatgatttcattgttgctagccaccactcgcacgaggagtctatcttgactacactcacattcaaaacaaacacacagtggcgtgattccatatctatgactacctgtacaactaccttgacctgaaaaccaaatagctgatgatacttaccttatcttcctgcctgagactctttctcaccatgcaccaccggacctgccagttctccaatctgaaactgactaacactac

SEQ ID NO: 43449 - DNA, 363 bp, Zea mays
  Clone ID: MRT4577_139632C.1
ttctcgcgtccgaaagaagccatttgccgccattgttggtggatccaaggtctcaactaagattggcgtcattgagtccatgctgtggatggaaggtatcctcataccaggtggcggtatgatctactgatcatgcaagggacacggatggggacccggaaagtctcttgtgcctgaggactaactagagctggctacggatctcaaagagacggctaaggcaagggtgggtactcatcctgcgcagacacctgttgtatctcaaaggtgtcaccccaaagcacggtcatagtcctgttgttccacgctcggctgagcttcttgacaactccaccagagtggccaatgacggcagcacataaa

SEQ ID NO: 43450 - DNA, 581 bp, Zea mays
  Clone ID: MRT4577_139633C.1
tgggtacctcgaggccggccgggacgggcgtacggacaaaaatctgccgctgcgtacaacaaagaaagggacaaatgacctaagctatggagacgctgcgtaagtgtccagacaatggccgacaaatcgccgcacaatggagtcggaaacgactccgcaaccacctctgtcctcagcgaagagggctgtgccttctctgcttcagttcgacgctctattcgcgggccggaaggaggagacgggaccactcggccaccagcaacgcgacgggggctacgtgacggcgctaaacaagcacgaggcgctgatcgagagcgacgtggacggaatcctctacttcttccataacaactgcacgttgctggcactcaagaatgcattcgtgctgaaaagcgtcaaggctaccctcagcaatggggtccttgcgagcatgagcagaactaatgacggactcttatcgaacactgacatcgacatagacgacgatcagaaatgaaaacaccttaaacaattgaggatgatgacgacgagaacagaaagttcgttcctgacaacttcgaggagatattcttacaagcacc

SEQ ID NO: 43451 - DNA, 258 bp, Zea mays
  unsure (1)..(258): unsure at all n locations
  Clone ID: MRT4577_139634C.1
tatctctatagctcgagtattgcttgctctccacnaganacaangnagancaccaacaatngccgcngcgtcctcggtcctcctgcttctcctggccgccgccttggntagcatgatcgccaacgccgccancttctccatcaccaacaactgcnggttcancgngtggcccgcggccaacccggtgngcgagggcacgcagctgancccgancngnacgtggacagtcaacntgcctncnggnacnanctcnggncg

SEQ ID NO: 43452 - DNA, 400 bp, Zea mays
  Clone ID: MRT4577_139635C.1
gcttggatcctatagagcggccggcctgcccttttttttttttttttttttttttttatttgttaaagggcattttgaattccaattccttggaacgcatgctacagagacttgaaacggcggcaaaattgcatggtacggctgggaccaaccgcccgaacatatgccaaacaaaggctaacggggttttataccgtagggccacctgtttaaaaagccagcccgaaggggggggaaccacggaagacaggtctttttacaaaggaaaaatcaaggcctattgtgagccggaagagctcccggagaaaaagggcaaactggaggaaggcaacaagttgcggtgatcaccggggaaccccgcacacttctaggccggataccgaccccatgggacaaaagg

SEQ ID NO: 43453 - DNA, 314 bp, Zea mays
  Clone ID: MRT4577_139636C.1
cgtcctttttttttttttttttttttttttttttttttttggggttttttttttttttttggaaaaatgtttaaagtttatattgaacaaatgtcattaatgtcttgggggaccaaaaaaacgccgggaggcctttgtccctccacgaatcgaccccgaaaataaagtgccacaaaacacacctcgggggtttcctttttgggggaaaaattttaaaccaaaccgggtaaaatttttaaagaaaggggaaaagaagctcggccctttctttttttttgtgtggcccaataaaaaaaatcatgtggggcctcttt

SEQ ID NO: 43454 - DNA, 474 bp, Zea mays
  Clone ID: MRT4577_139637C.1
gccggccgggccgggagccctgccttatcctccaccgccgccgccgccccctccccccaactactcgtcctcacccgcacccgtagtcgccgcccgcccccagatctagatctgagcctcccatgaccagacgatggcaggaggctgacgcccgccacgccaggatgctcaaggacgcgttgcgccagttccgcgacactgccgccgccgccgccgcctgcgtcttgccgccgaagaaggccaggagggaccatggagactcgtagtaataggctaatagcgattgatctgatcctgatgctgatggtgatgctagcagggaaggcatccccatccaccccaattggatgttcctccctccctcttctgtccatgtactcagcagtagtgcttgtcagttcgtatatgaatatgagtggtagtacagtactgatttgcagcagcattatgttcatttgtgacctcatttatgtt

SEQ ID NO: 43455 - DNA, 169 bp, Zea mays
  Clone ID: MRT4577_139638C.1
gccaattccacatccccatcgtattggggtgccgatacgagactattatgctgtgaatcattttttgctatatgcaagaccaccatggacccaaaactaattagaatggaattcctcagcgaatgccaataccgcattagcatgtacctaagcaccttatatcccaata

SEQ ID NO: 43456 - DNA, 204 bp, Zea mays
  Clone ID: MRT4577_139639C.1
gtgagacagacgcacgctgagattttactgaggaaaggtggcatttgaaataacagacatacaacacattttcccgcgtataaatattgaaaccggcgcgcaacggacatgaccacaagcacgttacaggtgaacatgaaccccctgagcgaccatggaacgaacaaaggcggactgcatctgacaggaacttatttagacgcc

SEQ ID NO: 43457 - DNA, 446 bp, Zea mays
  unsure (1)..(446): unsure at all n locations
  Clone ID: MRT4577_13963C.1
aaaccaaacctgttttaacaggaactgttggggtttgttnacaggcgaaataggcttttttttttttcaaccgggaaattttaatttttagggggggggtggggttgtttcattttcngaaaattgggtttttaggggtgggaatcttggcattggcgctttgaacttggggcggcttacaaaaaagcgggggttttttttaatggggcacacatttgggggtgggaccttccatgggaatgctttaaggtggggggcccttgccctttttgggctggggcttttttgtgtgggacttaagttttttacccttnagagtgttccctttnggttgggctctctgttcaggggggggggaaatggacgctngtaacctttcactgccgaattggtttttaatgggggctttagggttgggttccttttggggctttttttggtttccg

SEQ ID NO: 43458 - DNA, 161 bp, Zea mays
  Clone ID: MRT4577_139640C.1
ctcttacagagaatgaaaaacatccctagacgctatctgatcgttctggacggggaaccctcgtgttttaataaacatgagcggctgatgcgcaccctatgacactatcgacgaaggatctgtactatgctatgtgccacgcacacgagataacttccttg

SEQ ID NO: 43459 - DNA, 342 bp, Zea mays
  Clone ID: MRT4577_139641C.1
caacaaccataactttgatggccgccggcctcaaccttgaaatcgggttgagggtaaagaaacgtaacttcgacaaactctaaaggcgcggttgcgcacccaatgggaaccccggcttaacaccttccaattcctctgagctcgcctttatacattcccagaaacttaaaaagccgaggatatccgccgtcctctgtggcctctgtgctctccggcaacatcttgccctttccgccctttggcttttgatatgtttcacactctctcgtgtgcatacacagtgcacagcacaggtgtggtaacagaatattacactgtggcttgcctctctatatagaatat

SEQ ID NO: 43460 - DNA, 635 bp, Zea mays
  Clone ID: MRT4577_139642C.1
gattcgctcgaccacaacccagctcgctcgtcccctgtgatcaagacgagcacctagtagcagacctgctctatcatcagtgtagagtgtcggaaggcgactgtctctcttggagactggttgcaacgataatggccacgtagtctctccgcatgcccttgatgctgctgtacctggccagactgacgacatgctccttcgcggcgggcagcttcgcaccactagcatgcacatcacgcgttgcgacaagcgaagcaaggaccttgacaacgcaacaattgctgacgctgacgctgaaccgcacagtccgagatccgtggttccagtcccggcacgagtacctgttcggcaacatcgacatgcagatgcggctggtgccgggcaactcctgcggcacctgcaccgcctactacctgaactcgcacgacgccgcgcacgacgacatcgacttcgagatgctgggcaacgtgaccacccgagccctacaacctgcacaccaacccgttcacacacctccacggcgagtgcagattaaagtaccacactctggttcgaccccaccgacgacttccacacctactccatcctctggaacaacaacgactgcatcctcatgtgggacgacatgaccatca

SEQ ID NO: 43461 - DNA, 538 bp, Zea mays
  unsure (1)..(538): unsure at all n locations
  Clone ID: MRT4577_139643C.1
tcactatagggtaagctcggtcccacgcatgctgcagacgcgttacgtatcggatccagaattcgtgatagttagtaaatttttcggattttgtatatccacttcatttttcccattcgcgcggtaaatagcgtaataagtagaatcattatctctattgtcaatgataccgattgcaataccttcatctcttggaatggcaccttttaaagtcggttgttttggtggatcatgatcaagccaaggcataggcggaattaatgcaggatatttatatatgtcttttgagagtctatctttagctccaagtggattgttattaatatcttttaagctaaaatgcatactaccttttatttcaggatatangccggtttaatgcaatttgtcttggatattcttctgggatcagaccaagcagggacggagttattattaattttataggccgcttgaccgatgtataggtgaatcggcttgttatttgtttctttaacccaccatctactaatatggcatatgcagctggggtgaaacc

SEQ ID NO: 43462 - DNA, 231 bp, Zea mays
  Clone ID: MRT4577_139644C.1
cgaagagcggtaaaaaaaaatgttaatattgttgaaactgaccaaccatatgtggctgcggcatcattgcgacctttgaaatgagctcgtgcacaaagtgcatacaccactgcggcccggttacaagcgcgttaaaaaaaaaccttggtggaatgaccctgacccaagaggcatgcatgggtacatcataaaagcttaggttcacatatgacactccagtggctggaaccc

SEQ ID NO: 43463 - DNA, 251 bp, Zea mays
  Clone ID: MRT4577_139645C.1
tcggccacacatactgtgcaagctagtaaacctcccacaactttaatgtactgggggggccctccatggggttctaataatacaacaccattctggttttcaaaaggttcacattaaacccattccaaaacactttctttgttctgctttgcggttttaacaaccctagatttacgtaccgttttacttctagcaaattcattttttttagtttcatatcaaattattagatttcccgtattttttaaatt

SEQ ID NO: 43464 - DNA, 402 bp, Zea mays
  Clone ID: MRT4577_139646C.1
aagcaaaacttaataaattgcaacaaaatcctttgaccaattccctattacaaaacacaacacaacctataaaattcacgctccgaggtgagcgcttcaaggggagcaaataaaatgggccaaatctagcttagacatggcaacttggataggggaactggtaaaaccgcgttccataaagcaggatgcatagtgtgcaaacctttggaaacctacctactgtaaccaaagaacaatgtatacatgaacactgaaacttcagaactgcaattacaactacattataccagattcttgaccactggttttggaacaatacaatggtaattgaacaatgaaatgctgaatatgcaactccccatatgggagctcaaatcacggaagcacacaactgctggtaaa

SEQ ID NO: 43465 - DNA, 150 bp, Zea mays
  unsure (1)..(150): unsure at all n locations
  Clone ID: MRT4577_139647C.1
gatgacctgattctccgcgcgcctgcgcgcccctgcgccccccgtggtgacgggcggtcggtgcctcctcaactacagaaaggggcgtgtgcttancgaggacgagcgtgccaacgcgagcatctacttccataacttttttatggagcg

SEQ ID NO: 43466 - DNA, 270 bp, Zea mays
  Clone ID: MRT4577_139648C.1
ccttctctcccctcctctctgctttaattttctcagaattctctggactgaggctccagttctggcctttggggttcaagatcactgggaccaggccgtgatctctatgcccgagtctcaaccctcaactgtcaccccaaggcacttgggacgtcctggacagaccgagtcccgggaagccccagcactgccgctgccacactgccctgagcccaaatgggggagtgagaggccatagctgtctggcatgggcctctccaccgtgcctga

SEQ ID NO: 43467 - DNA, 376 bp, Zea mays
  Clone ID: MRT4577_139649C.1
caaaattgatacggaacatagtgatggaacctgtgggaatgtttttatggcttctaatgtagaaactaatgaaattgttgctgttaaaaaaaaaaaaaaaaaaaaaaaaaaaaaaaaaaaaaaaaaaaaaaaaaaaaaaaaaaaaaaaaaaaaacaaatataaattacacaagaaaaccaactacatagtgggttgaatagtattaaatttaatactgtcctctgaccgtcgttttactaatgttacaactgttaaacaccattccattccctaaaatatacatatcaaatgaaaatccaccttttatagattatttaaaatttcaaacacctttaacataccatacacataaacaatcctaatatttaaaaataa

SEQ ID NO: 43468 - DNA, 340 bp, Zea mays
  Clone ID: MRT4577_13964C.1
aattatacggtgctattgctctcgccaccggcacgccgatagccgcctcatctggcgcgccccccttcaggagagaccgctgaggtcgctggcgactagggaaccgttgattaccgaagctccaagctcgctaccggccgttatggtggatctggtaaagcttcgtgcgtgaactagcgtcgcactggagggttggacaggacattggaccgaccataggtgtggaagaatatgcagcgtattgcaccctgactgatactatagcacgtgctactggtgggatacctggagcctatgatgactgaggctgcacccatatgcgttctttactcatggacag

SEQ ID NO: 43469 - DNA, 238 bp, Zea mays
  unsure (1)..(238): unsure at all n locations
  Clone ID: MRT4577_139650C.1
aaagcaacaatattaaattaatcttatcaaaggtttaaagattatgttgtattaggctttatcaccttattacattaaaagatctagcagaggcatatataaaactgtgtgtccagtaaactcaagtgagaatgtatgttgacacttttgaagatatttctaattttattttttcaaccatttttaaaccaatttatcaagatttacttgtgaactaaanaaattaanaaaagggggg

SEQ ID NO: 43470 - DNA, 1456 bp, Zea mays
  Clone ID: MRT4577_139651C.1
tcgtaggacgttacaagcctctaccggaatccccaatctatccgacgccacacgaaacgaaacacaagagaagagaatagagagaaggtcggagggctagacccggtcccccaattccaattcgcccctctcgcggccggcctcgcgagacgccgattcggatcccatctcctgctcagagcctcgattcgaccggcgggggcgacgattcgaccgggtcggtagccaggcagaggcagcggaaggagaggatgagcttccaggacctggaggcggggcacgtccggggggcgccgctcggcggcggccggaggaacggcaggggccccgcgggggcggggggcgccggcgccggcgcgtcgcaggccgtggcgtcgggcgtcttccagatcaacaccgcggttgccacgttccagcgcctcgtcaacacgctcggcacgcccaaggatacccccgacctccgcgacaggatacataaaacacggcaacacataacacaactagtgaaggatacatcagacaagcttaaacaagctagcgaggcggatcatcgcgttgaagtcagcgctaccaaaaagattgctgatgcaaagctagctaaagatttccaagcagtcctaaaagaattccagaaagctcaacgattagcagtagagagagaagctgcatatgcaccttttattactcaagcgggcctgccacagagctacaactcaagtgaagtgaacaatggtgctgataagttggcagagcagcgcacgcagcttctagaatctagaaggcaggagttggtcttcttggacaatgaaatagtgttcaatgaggccatcattgaggagagggatcagggaatacaagagattcaacaccaaatcactgaagtaaatgaaatcttcaaagatcttgctgtgctagtccatgatcaaggagcaatgatagatgacattgattcccatatagagaatgctgttgtagcgacttcgcaggctaaaggtcagctttcaaaagctgccaagactcagaagtcgaactcttcgctgatatgcttgttactggttatcttcggcgtggtcctgctcatagtgataatagtacttgcagcataaaagcttggaaggcagctgaggttccgatgatcgagcttattgcgatgaattccttattattattttttttgctgtgcagccaggaatggatcctggcatccgcctggatgtatccaggcggtgattggtgatgtgcttgtggtatggctgtgtatttggtgatgatgtatctggaatgcatgggtggtttcacataaaagtatactctttcctgccagtgtagttcctcttgtctcatatgcacgctttgtttatatattgtaatgtatgagtgcgtgctgtagaacaaggttggattatctgtggtatgaatttcctcgattccatgagaaacgcttttctattatgtg

SEQ ID NO: 43471 - DNA, 272 bp, Zea mays
  Clone ID: MRT4577_139652C.1
ccctgttgttggtgagattgataaactgttttagaagctgccggtttgatagatcttcggcttaaattaatgaagaaactgaaaataaactatgccaaacaggaccaatgaatgctatttgcgacacccagcagccctaaaaaataagtcttatatccgtcaaaaataaactatttgtcgatggtataaggattatttcccgggggctcatgactgccagaaaaaacccgaaaatactgtgttcgtgacggcacatgtgcacctgaaattaa

SEQ ID NO: 43472 - DNA, 361 bp, Zea mays
  Clone ID: MRT4577_139653C.1
tctgaatgtactgctgaacaagcatatacctggactcagggtcgtgcagtatttgccagtggcagtccatttgcccccgtggagtatgatgggaagacttttgtacctgggcagtcgaacaatgcctacatcttccctggactcggcctcggtcttgttatttctggagccgtccgtgtccacgaggacatgcttcttgccgcctcggctgcactagctgatcaggccacagaggagaactttgtcacgggatcgatcttcccacccttcaccaacatcagaaagatctctgcgtacattgctgcagccgttgctgcaaaagcttatgaactcggtttggcgacccgtctgcctcccccca

SEQ ID NO: 43473 - DNA, 843 bp, Zea mays
  Clone ID: MRT4577_139654C.1
atcttgctgtgctagtccatgatcaaggagcaatgatagatgacattgattcccatatagagaatgctgttgtagcgacttcgcaggctaaaggtcagctttcaaaagctgccaagactcagaagtcgaactcttcgctgatatgcttgttactggttatcttcggcgtggtcctgctcatagtgataatagtacttgcagcataaaagcttggaaggcagctgaggttccaatgatcgagcttattgcgatgaattccttattattattttttttgctgtgcagccaggaatggatcctggcatccgcctggatgtatccaggcggtgattggtgatgtgcttgtggtatggctgtgtatttggtgatgatgtatctggaatgcatgggtggtttcacataaggccccgttcggtttggcctgaacgacctggaatacagcatattccagctgaaattatgtcacttggattaaaactggatcaatcctaaatatctgttcggatagatttaaccctgaacgaaaccagagcgttttcagccttttaacctctcttccactcggattggagccacacctatgaacacctggaatcaaaccagaccaggatttagtaaataaccagaatccactccatcccggcgtggaacggttcctgagcaggaactgatcttggactggcgaacggcccctaaaagtatactctttcctgccagtgtagttcctcttgtctcatatgcacgctttgtttatatattgtaatgtatgagtgcgtgctgtagaacaaggttggattatctgtggtatgaatttcctcgattccatgagaaacgcttttctat

SEQ ID NO: 43474 - DNA, 1486 bp, Zea mays
  Clone ID: MRT4577_139655C.1
cccgcgacaagcttattgctcctttcggtccttcccctgcgcgccgcgagtgaattcgcatgccgctaccccaatcaatccgacgccagagagagtgtgggcgactggcgacgcggtccggtccccccaattcccaacggccggcggcgcgacaccccgatccggatcccatcgcctgcccggagcctcgattcgggcggcggggacgacgattcgaccgcgtcggtaaccaggcagagaggaaaggaggggatgagcttccaggacctggaggcgggccacgtccgtggggcgccgcccggcggcggccggaggagcggccgggggggcctcgccggcgccggcgccggcgccggcgcgtcgcaggccgtggcgtcgggcgtcttccagatcaacaccgccgtcgccacgttccagcgccttgtcaacacgctcggcacgcccaaggacacccccgacctccgcgacaggatacataaaacacggcaacacataacacagctagtgaaggatacatcagacaagcttaaacaagctagcgaggcggatcatcgcgttgaagtcagcgctaccaaaaagattgctgatgcaaagctagctaaagatttccaagcagtcctaaaagaattccagaaagctcaacgattagcagtagagagagaagctgcatatgcaccttttattactcaagcgggcctgccacagagctacaactcaagtgaagtgaataatggtgctgataagttggcagagcagcgcacgcagcttctagaatctagaaggcaggagttggtcttcttggacaatgaaatagtgttcaatgaggccatcattgaggagagggatcagggaatacaagagattcaacaccaaatcactgaagtaaatgaaatcttcaaagatcttgctgtgctagtccatgatcaaggagcaatgatagatgacattgattcccatatagagaacgccgttgtagcgacttcgcaggctaaaggccagctttcaaaggctgctaaaactcagaagtcgaactcttctctgatatgcttgttgctcgttattttcggagtggtcctgctcatagtgataatagtacttgcagcctaaaagcttggaaggcagctggggttccgaaatctgatcgagagcttattgcgacaaattccttcataagttatttttgctgtgctgctaggaatgattcctggtacccaggcggtgattggcgctctgcttgtggtgtggcggtatatgtggtgatgatgaaatctgatgcataaaagtactctttcctgcaagtgtagtgcctcatgcacgtttttgtttatatattgtgatgtatgagtgcgtgctgtagaacaaggttggattatccgtggcatgaagtttctcgatctcatgagaaacgcttttctataaaaaaaaaaaaaaaaaaaaaaaaaaaaaaaaaaaaaaaaactcgaaactagttccctcgtgccgaatt

SEQ ID NO: 43475 - DNA, 1959 bp, Zea mays
  Clone ID: MRT4577_139656C.1
atgccaaaggaagctgctgccgagtctagccaaggtggactagtttactttaaatacacctttagatatagagaccgatttgacgagctgaatgatgagtggttgagcaatatagaggcaaccagcgacgaattgcttgaggcatacacaagggctgaagatgatgcaatgaccttggccttcggaggacggggcaagaaaaggttgaacagagtttttgatgtcattggctttgtgtatccggactacacctatccctcgcgaaagcagggaaagaaaaggaaaattgccgcttcggccatctctgttgtgccgaagggcaaaaagatcatggtcttaacgcaccggccaagatacattgaaacggcaacagtgccaaagcttggcaaagggacatcttccactgctaaggcagaacagactgctcgtgccgcttcttgggaagaactgactgaattgtcgaaggttcctgcagccgggccagtcgaaacgccaaaacatggtgccaaagccaaagaaaaggcagtcaaagagccagagctagagaaagcaataatgctgccagaaatcttgagcccaccagtagaggtggaattgccgaaggttgcaaaggctcccgcaacaactcccaagaggaggagaatggctagtgtgctagacgctgttatggagtcgacaagggcattgactcctgcccctacaaaaaaggttgccgaagctgttacaacttgtgctgaaaccaaagctgggccctcagtgcccaccgagacagagcatgttgcaactgagcagagagctgagcaagaatctacagatgttggcatggctttggagaagaaagacgcacccgaaaaagctaaatctcctattcccgaagcaccgtccgaagatcttgactttattatttgtcatgcttcggggaaaaagctatctgaagaagaaatcgtggaagccaaacactacacccgggaactgaaataccagaagggggccttggtgtacaatggcacggacgaatatgatttcctatactgcctcccagacaacaaggaaatatccgtctgccgggagatggccaaaaatatgggatttccgaagcttgaagctggcctctctgccatgtcaaaggatgacctcgcagacagccttgcgtacaatagtctgaagggtttaattcttagcaatgctttgagggcgcaaaagaatgttgaagatgaaagctgccagatagccctcagcaacctttgttcagaagttatcaagctgagaaatgaagccatggagaaagataaaattctgctttcattggtggacaaagctggagaaaatgttgaggagcttcatgaatccaaggagaaaagctttgagaaatccttggattgcgtaagaaaattgaaaaccagctttgccaaggtgggtgcatattcttccgaagaaaatttcattcgaggtgaccctgagggaatcattgattggataagcggagaagtcgaagcttttgaagatatcctcagtgatcgcggggacatttgtgccttcgccgacgctcgaggggttgcagcaattctggagaaggctggttgtgaccatgttaaagctgcagcccagaccgaagccgccttctccacagacgacacgagagacccctcgatcgaagctactttagtgggcggaaaattttactccaatgtttgggtgaacggtggccgagaattggccaacgaaatcataaagaaaaataaaaaagaaacccacgatgctcaagaagaagctaaacgggccgaagaagctgccgagcgcgcaaggcgtatagctgaactatcaccgctgcccgagccatacgacccccaggccgatcctgtcatgaaagaggcgctagatgtaatgagtgtcgctaattccatcgtcgacgaagtcatcgataagctgctgaatgaggccaccgagaaatttttttaa

SEQ ID NO: 43476 - DNA, 227 bp, Zea mays
  Clone ID: MRT4577_139657C.1
cgaaactacgtcagtcagaccacagggcggacgatttgaaaaggatctgactgcttgctctgctgtgcagccgcagagggcccccacgctcaatgaaaggcgcctccctcactctgtccaggacgtccgaagctgctcatgcatggcacgagctgacgaccggctacgacgctcactgctgcccacaacggcgagatggagactcacaaacggatgcagcatgcaca

SEQ ID NO: 43477 - DNA, 390 bp, Zea mays
  Clone ID: MRT4577_139658C.1
ctggccagcccagcttatcttttttaaaaaaatttttttttttttcccttgttttttttttttttttttttttttttttttgaaaaaaccacgggaacaaaatgcttaaaccgggagggaaaaaataaaccaaacattttaacaacgctcaaaaattttttttcgggggggttaaaagggaaccagggggaaaaaaccaaaaaaactttgtgataggcattcgggggaggggtttttcccaacgaaaaagcccacattgggggccaaccccagggaaaaaaaacaaaccccccaggaaaaaaggcccgggggggaaaaccagctagattcacacaaaaagggtctccccccgcgggaaggaaacaccgcgccgaaggcccggaaacggga

SEQ ID NO: 43478 - DNA, 371 bp, Zea mays
  Clone ID: MRT4577_139659C.1
caatcatcctactcatttcttataataattcatggttgagtgcgaggacaactggaactgccaactttaaaacattatctttaatggaaatgacggtaaggtgtctcatctggagcacgtttttatcatggggagcatggtcaggtttatgattatacccgacatgctcaaaaacgccccaaagttcaagctcctttaggtcatgatttagggttaaggcttaaattttggatttattccaagccactccgtactcatgcgatctagggctgatgattatcttggcatttggtccttgttggactatgtgttgcaatccctgtgaggaggttgatatatggttgcttttgtgtaatataaaagcttttttg

SEQ ID NO: 43479 - DNA, 1824 bp, Zea mays
  unsure (1)..(1824): unsure at all n locations
  Clone ID: MRT4577_13965C.1
atttaggtgacactatagaagagctatgacgtcgcatgcacgcgtacgtaagctcggaattcggcgcgcacagaaacacaagcgagtaccagagcagctaggagtggtcagtaatggcgcagcttagagcagccgccgacgagcagcaggaggcggcgatgcacggcgtcgcctccggcgacgggaacgagagcaacaagaaggcgcgcgcggggctctgtggcctgctccgcgagcgcaaggtggtggacctggcgcgggccaagcggcggctggtggaggttccctacaccgcgacgctggcgcacacggccaacgcgctcctggcagcgcgcgtctctgccgtggccgtggctgcgccaccgggccactggatcggcgccggcggctccatgatcctcgagtccgacccggccaccggcgccgtccgcaagcactacatcggcatggtgaacatgctcgacatccttgcccacatcgccgaggccagcgacgacgacgaggcggccgacctcgaccgccggatggccgtgccggtgtcctccgtcatcggacactccctcgagggcctcactctgtggacgctccacccgagcaccagcgtggtggactgcatggagacgttcagcaagggtgtgcaccgcgcgctggtgcccctggagagctcggcggacaacgtggtggcgctggagctggtggagtcggcgccggggtaccggatgctcacccagatggacgtggtgaggttcctcagggcgcacggcgcggagctcaggggcgtgctgttgcgcaccgtgcgcgagctcggcgccgtgaacgacaccgtgttcgccgtctctggcgttaccaaggtgatcgacgtcatcaaggcgatgcgggcggcgtcgctgaccgccgtgcccgtcgtggacgccgtcggtagcggtacagagacccttcaatacgggagcgggcaaagggcggtcgagacgttctcggcgacggacctgcgggactgcccggtggcgcggctgcaggcttggctggggatcagcgtgatggagttcaagaggaaggtggctgagtaccgcgccagcaccaggcttgtggtccccggcgccgacgccacggacactggcacccctgtcgccgggtacgccgacacccccgcggctgccgccgccactgacgaagagcagagcgagcagcaggagtcggcgctggtgacgtgctcccaggagagcaccctcggcgaggcgatcgaggcggcgacatcgaggcacgtgcaccggctgtgggtggtcgacgaggaagggctcttgcgtggggtcgtgtcgctcaccgacatcctccgggcagtgcgggaggccgcgctcggcgaggacctggagctgcacagcatcgtgccgtgagcccgtgggccgtgagtcgtgacgtccaagaacaagctcgtagctgtttctgcccatagtgtccgtccacctgtcgtgctcctgcagaggagggggaaaagggcgatcgagacgtgttggcgacggccgaccggcgaccgccgccgagctcgttttgccttgttgctttgtttgttatatggccctggctccgatccgggcttcgtatttcgttgacaggccttcatcgtgacgccttattttgcatcgttttattgatcaaccaaaaaaaaaaaaaaaaaaaaaaaaaaaaaaaaaaaaaaaaaaaaaaaaaaaaaaaaaaaaaaaaaaaaaaaaaaaaaaaaaaaaaaaaaaaaaaaaaaaaaaaaaaaaannnnnngggggggggggcgccgggccccaattcccctttaagggggggtttttacccccc

SEQ ID NO: 43480 - DNA, 435 bp, Zea mays
  unsure (1)..(435): unsure at all n locations
  Clone ID: MRT4577_139660C.1
tttctctttttttacatcttttttcttttttttaagcctggttttttttcttgcgnaccaacctatcccttacttactcacaaacccttaaaaaaaatacaaattccccctttaaacccaaaacatcacattatttcacgtaatttggcagcatttaaccttcttccttttatcatgcatccatatcccacacctatagtttacccatccacatttttacatcctttatttaacttaacctattttaaccttcagctttacatttatatcccccatttcaaatttttacggatcaacatttacatccaactttcttttgtcccttaatcctttccaacattttccgattattctttaacccaccaaacgaaacttcccttttttacaagtttaacctttttcttttaaaatggaaaaccccccctttcttttttt

SEQ ID NO: 43481 - DNA, 185 bp, Zea mays
  Clone ID: MRT4577_139661C.1
cctccgcttccatcgggttcgacgacttcacctatggaatctgtcgacaatccacgacgacgaggcaaactgctttggacgcaacgtcaaagggtcccacgctcgcagggcgtcgaggctttacatgccccagatccatcaagaacctcaccccacaaaaattttcactgctcggtgactctccg

SEQ ID NO: 43482 - DNA, 1098 bp, Zea mays
  Clone ID: MRT4577_139662C.1
atttcatcgccatcggcatcgccgtcggcgtctgtcgccgcatccacccacgggcccaccaaacgacctcgctgcgcccacccgtccgcccccatctagctcagcggccccgcacaagcgaccactcggcagaatgccgccgcttcggcctccgccgccgcggctcctgctcaacaacgtctcgtgcatgcggaacgcgcagacggtgctccgcgacatcaacctcagcgtccacgacggcacagccctcgtcctgaccggtgcgaacggctccggcaagaccaccctcctccgcatgctggcgggcttttcgcgtccctcggcgggggagatcctctggaatggtcacgacatcacctccccgggcgttttccagcagtacaagctgcagctcaactggatgtcgctcaaggacgccgtcaaagagaagctcacggtgctcgagaacgtccagtggttcgagctcctcgaggggaaggacggcagcaggtcgggcccagccatcgagctcatgggcctcggcaggctcatgaacgagaaggccaggatgctctccatggggcagaggaagcggctgcagctcgccaggctgctcgctatcgaccgacccatctggctgctggacgagccctcagtcgcgctggacgcagagggtaccaggctgcttgaatacattatcgcagagcatcggaagaagggtggcatcgtgtttgtggccacacatctgcccattcagattgaggattctatgtcgcttcggcttccgcagaggtttccccggaggaagacgctggttgatcttgtccgctgatgtcaatgtgagattgtgagcacaggaatttagctgtatctctctaattcctctccagctatctgtctgattgctgttggagcaattactctggtgctgcatttgtcatcctatttttgacaacatggcaacacattgtcgatgttgataatctgtaggggtctttgtgatcaccgattcgatgcattggcccatgtatttggggacactagaaagcatttgccatggctgatatatgtatggctgttctttgtgatcatggttttgatgcattgacccacttatat

SEQ ID NO: 43483 - DNA, 464 bp, Zea mays
  unsure (1)..(464): unsure at all n locations
  Clone ID: MRT4577_139663C.1
ctagctgatccctgctgcagcactaaagcttagctttgagagcttctcccttgtttgcagcgttgctaagtgctaacacccttctctctcccctcctgtctgctcttcctgtcggtgcccactgctgctgttcagctgatacagtcttaagctcagttactgccgccggtttccagcaaaggctctcgcagcgcacttgtgcctgaaccttcaggcctgtggcaggagagtgtggggaagcagcacaagaagaaacagtggaatcggaggggaagcaaagctccaagagggnggagccgtcttcagcccgctcccagcagcctcggctcgcggtcgtccgccgctcgatcgagctcgcaaccggcggccagcctcctcctcctttggcaagaaggatttccacctttttttttctttttgcaaaagaggcttttttcccctccttttcctccggttgcttcccc

SEQ ID NO: 43484 - DNA, 344 bp, Zea mays
  Clone ID: MRT4577_139664C.1
aagataatcaaactgtgtgtagaagcccaagggattacctgagccccctcaccgtgttaagctcgaccgccattcagtcccttccttttcgaaggacaaaacgagggcctccaaacgaaaggctacctattgttctttaaaagctacccacacctgcgtgcctacaccaccaaacaaggcttctatttggtgcctacctattgggaaaatgggggagaaaaagcttaaaccctccaattaaggggggaaaattatgaattctcccatggagcctacgcccacattggtgagcacgccataccaaaaccaaaactctcgatttggtaaggtagacaatcattttg

SEQ ID NO: 43485 - DNA, 938 bp, Zea mays
  Clone ID: MRT4577_139665C.1
tccagcgtccggcggccgcggccgggcagggcacgaggcgacgtgtacagcttcggcatcgtgctgctggagctcctgacgggccggcgccccggcatcttcgccggggaggtggatgacatcgtgaagtgggtgatgcggcactgcagcgcggcgccgtggcggactgctggatccgggcctgctggagctggacccggagtcctccgattgggaggagttcctgctgggcatcaaggtcgggctgctctgcaccgcgtcggacccgctggaccgcccggccatgggcgacgtggtgttcatgctggagggctgccgcgtcggcccggacatcccgtcctccgccgaccccacctcccagccgtcgccggcctgatgtcccgtcggcccacggccggcactgccgcctgtcagattcaattcggtagcttgttccatttttttctctctctttcgatgattgtttttttccccttgattagttcagataattagtggtagtgtcatctatgcctgccggcgtgcggccgtcgacggacgaactgatccgtgaggccgggaaccgtttcccgccaaggaaggaactagccgttgggcgtctcgtttggttagcggaggtgtagggcaccgggcatggggggagcaaggaaccatgtggcgcactgctgcagaggcgcttggcacggcctgatggcaggcccctgccatgccaagcccaaagcgtgtcgtggtgctgcgcatgtggggtttccctcctggccaggcatcggcaacggctactgatgccggacatggctgtcgcctcctggccactgatctcggccgatctgtaccacgaccacgacccatgtactctctagaggggcctgcttggcttcctgggatcctgtctttaatcttgtttcaccaaagcaaaaaaaaaaaaaaaaaaaaaaaag

SEQ ID NO: 43486 - DNA, 154 bp, Zea mays
  Clone ID: MRT4577_139666C.1
gtgcggcggaggcaactgtgcaactttcttcggtcgtcccgaatccgggttcatccgacatcagccacctccaccatgccgcccaagttcgagcccaacgagatctcagtcgtgtacttgatgtgcatcgtaggcgatgtcggcgccacatccg

SEQ ID NO: 43487 - DNA, 271 bp, Zea mays
  Clone ID: MRT4577_139667C.1
acgtcatcatccactccgggctgccatggcctgctccttctccgccgacatcaccgtctcttccgcccctacaccggccgccagacccctcgctgctgctacgcactccgtccgtatcgcacgctcggctgtcgctaccaatgccaggccgcaccgcctcgccgcctcaaagttcgcgcaggctatcatactcgttgcacgcgctagtctactcgatgacttgctgctggtcgggaacaaggtgcctgacttcgaagttgacgctgtattc

SEQ ID NO: 43488 - DNA, 3286 bp, Zea mays
  Clone ID: MRT4577_139668C.1
gccggccgggtcgaaagcgaagcgcgccgcgcaggcgcatcgcaacaaaggaaaaccccagccggaggagcaaaagctagcaagcgtgtccctccccctccccctccccctcactcccgtttcattccattccccccccagacgccgctaccgccgccgcccgcacgcacgcacgtttgccccgggatctggagatctggtagcgccagggggatggaggccagcgccgggctggtcgccggctcgcacaaccggaacgagctcgtcgtcatccgccgcgatggcgagccggggcccaagcccatggaccagcggaacggccaggtgtgccagatttgcggcgacgacgtggggcgcaaccccgacggggagccgttcgtggcctgcaacgagtgcgccttccccatctgccgggactgctacgagtacgagcgccgcgagggcacgcagaactgcccccagtgcaagacccgcttcaagcgcctcaaggggtgcgcgcgcgtgcccggggacgaggaggaggacggcgtcgacgacctggagaacgagttcaactggaccgacaagcacgactcccagtacctcgccgagtccatgctccacgcccacatgagctacggccgcggcgccgacctcgacggcgtgccgcagccattccagcccatccccaatgttcccctcctcaccaacggacagatggtcgatgacatcccgcccgaccagcacgcccttgtgccctcgttcgtgggtggcgggggggaagaggattcaccctctcccgtacgcggatcccaaccttcctgtgcaaccgaggtctatggacccttccaaggatctcgccgcatatggctacgggagcgtagcatggaaggagaggatggagagctggaagcagaagcaggagaggatgcaccagacgaggaacgatggcggcggcgatgatggtgatgatgcagatctaccactaatggatgaagctagacagccattgtccagaaagatcccgcttccttcaagccaaatcaacccctataggatgattataataattcggctagtggttttgtgtttcttcttccactaccgagtgatgcatccggtgcctgatgcatttgctctatggctcatatctgtgatctgtgaaatttggtttgccatgtcttggattcttgaccagtttccaaagtggtttccgatcgagagggaaacctatcttgaccggctgagtttaaggtttgacaaggaagggcatccttctcaactcgcccctgttgatttctttgtcagtacggttgatcccacaaaggaacctcccttggtcacagcgaacactgtcctttccatcctttccgtggattatccggttgagaaggtctcctgctatgtttctgatgatggtgctgcaatgcttacgtttgaagcattgtctgaaacatctgaatttgcaaagaaatgggttcctttctccaaaaagtttaatattgagcctcgtgctcctgagtggtacttccaacagaagatagactacctgaaagacaaggttgccgcttcatttgttagggagaggagggcgatgaagagagaatatgaggaattcaaggtaaggatcaatgccttggttgcaaaagcccaaaaggtacccgaggaaggatggacaatgcaagatggaagcctctggcctggaaacaatgtacgcgatcatcctggaatgattcaggtattccttggccaaagtggtggtcgcgatgtggaaggaaatgagttgcctcgccttgtttatgtctcgagagaaaagaggccaggttataaccatcacaagaaggctggtgccatgaatgcactggtacgtgtctctgctgtcttatcaaatgctccatacctattgaacttggactgtgatcactacataaacaatagcaaggccataaaagaggctatgtgtttcatgatggatcctttggtggggaagaaagtgtgctatgtacagttccctcagaggttcgatggtattgaccgtcatgatcgatatgctaacaggaacgtcgtcttttttgatatcaacatgaaaggtttggatggtattcaagggcccatctatgtgggtactggatgtgttttcagacggcaggcactatatggttatgatgctcctaaaacaaagaagccaccatcaagaacttgcaactgctggcccaagtggtgcctctcttgctgctgcagcaggaacaagaataaaaagaagactacaaaaccaaagacggagaagaagaaaaggttatttttcaagaaagcagaaaacccatctcctgcatatgctctgggtgaaattgaggaaggcgctccaggtgcagatattgagaaggctggaattgtaaatcaacagaaactagaaaagaaatttgggcagtcttctgtttttgttgcatcgacacttcttgagaatggtgggaccctgaagagcgcaagcccagcttctcttctaaaggaagctatacatgttatcagctgcggctatgaagacaagactgactggggaaaagagattggctggatctatggatcaattacggaggatatcttgactggatttaagatgcactgccatggttggcgggctatttactgcatcccgaagcggcctgcattcaaaggttccgcacctcttaacctttcggaccgtcttcaccaggtccttcgttgggctcttgggtctgtcgaaatcttcttcagcaagcactgcccactctggtacggatatggcggcgggctaaaatttctggagaggttttcttatatcaactctatcgtatatccctggacatccattcctctcttggcttactgtaccttgccagccatctgcctgctgacggggaaatttatcacaccagagcttaccaatgtggccagtatctggttcatggcgcttttcatctgcatctcagtgaccggcatcctggaaatgagatggagcggcgtggccatcgacgactggtggagaaacgagcagttctgggtcatcgggggcgtttccgcgcacctcttcgcggtgttccaaggccttctcaaggtcctcgctggcatcgacacgagcttcacggtgacatccaagggcggggacgacgaggagttctcggagctgtacacgttcaaatggaccaccctgttgataccaccgaccacccttctcctgctgaacttcatcggggtggtggctgggatctcgaacgcgatcaacaacgggtacgagtcgtggggccccctcttcgggaagctcttcttcgcg

SEQ ID NO: 43489 - DNA, 265 bp, Zea mays
  unsure (1)..(265): unsure at all n locations
  Clone ID: MRT4577_139669C.1
gggcgcagccacaacccaagagcagcgatctgcctccgctccgaatcacctcccgccctgtctccgccttccattccgccgcgcggagctgccgagggacgacgncgaccccgccggagatactaggtattgaataggatcactcggagaccgaacgagctaggatgggcgaagaagaaggngaagccacagggctcggagagcccctggtgcaagaaaaggctcaggcgcaacgacctaggagccacacgctgccgacaggacc

SEQ ID NO: 43490 - DNA, 348 bp, Zea mays
  Clone ID: MRT4577_13966C.1
acgacagcattcatatcccgggagctctctctttctcgcacctaactctgccttcaagggcgaccctacctcaccagctgcataaccgaaggccagataccgctctcgccagccacctgctggcaaagtcgcctacataaaccactaatcgaccacttctctgaccaaaccacacaccctggaatacccaatagcatgcaagcttcattacgccaaggctgaacactactacgtgaaaggcacctgaatgggcttgcctatgtctaccgcaagacactcaaagctcaccgtatctgcgggctttaccgtcgatttaacatctgctgtgttcgaatcattggttatcgc

SEQ ID NO: 43491 - DNA, 443 bp, Zea mays
  Clone ID: MRT4577_139670C.1
atcgaaaaaaaaaatcgaaagagtccagccgggcggagaaagcaacgaacacacactgacccgacccattagggttgggggaagaacccactccggaaaaaaaaagcaggcgcgaccgggacagacgcataatacattttgacgcggaagactagggggcccaccccccagcggggacaaatatttttcgcacaacctgttgacccccaaaaggccaaatccggcttagggttcggacagccaaaaaccccccccgaggtgggccggaaaaggtgctttttttgggggaaagcccggcaaggccctccaggataacccccccaccattgccgagaaatttgccctccgtatcaatcttgccggcggaccgtctagtcacggggggggggagccccgccgactccacacctgtgggggagggggggcagtccaaccctggggcc

SEQ ID NO: 43492 - DNA, 556 bp, Zea mays
  unsure (1)..(556): unsure at all n locations
  Clone ID: MRT4577_139671C.1
tcgccccgcgtccgcacgatcgcgagggggcgcgcgtaagcacgttgtcggaagctcaagttagaagaagcaccagtgcctgatcgatggcggcccaggctctcctctccggccggcagctgctgggccgccccgngcagncggccgtcnctaggtttttttttttttaaggcgcccgggggcggcagggccttttttttttttttttccacccaccgcgccggcggggagctgnggnncgcggacaagcagacccncnccaaccnnnnaggnannnngncnggtgacaatggctacaacctcttttttcttttggaccctgaggtctctttgggcnacatttaacccaagaggcnggncaaagagaaggtgataaacttttttttttttttgttgggctctgtgggctccaacgttaaaaaaatattttttttttttttcanaaacccaccagacaccgcgctggcgtggttcaagacgggcgtttttccgccctggggcacctacaactactggggccgactcctacacgcttnttttgttttaacatggcggc

SEQ ID NO: 43493 - DNA, 607 bp, Zea mays
  Clone ID: MRT4577_139672C.1
aatataggcataattagtagcagtaattcagtaaaagtgtaaaacagaaactgaaagtaatataggcataaaactaaaactgaaaacagtagttactgaacttagtagcagcagaagtgcagaactgaaagcagaagttcagatgacgaactcatctcgactcagggtgactgatgttggtctgctggactggagagtggagacgccggcacgccgccggtgggctacagacgctgccagagaagatgactggagcttggagcagccgccggtgactggaccactggacgccgatgactggagctggacggcaccagagagcaatagggtttacgcctgaacaaaggctggtggctggcaggttttgtgttaggctggggtagggtttcggctgaccaggggcaacatatatgttgcaactgtagatgggctgaaaaaatgagttaagcccattagcccagtataaacgcctctgttcttaaggcgtcgcctaggcgtccaagcggtggtccaacgccttggaccgccttaccgctttcaaaaccatgttaaacgcgcagacatcagtgggcgaccagattcctaacgatcggatgattaatcgctc

SEQ ID NO: 43494 - DNA, 348 bp, Zea mays
  Clone ID: MRT4577_139673C.1
ttcccttctcttttcaccaattcctttatatacccaacataatcattatcaatacgaatatttaaaaactcaccatccccatcaacattaccaccacaatatccaccaacttctatcatattcaaccttaattaccatacacatcctactcccatcactcatctttacaactacctcatacactcacacttaacatctttctacttcttctaccataacatcaacatcaaccacctctatccttccatcactaaattctttctatctctactcttcatcaaacctcatccccacttctcccataacatctacaaacttatccacaccctcatccttatccaaatcctt

SEQ ID NO: 43495 - DNA, 324 bp, Zea mays
  Clone ID: MRT4577_139674C.1
cccaagcgtccgcggcaactccgcctcacaagtcacacccacactcccacgctcaccagaggagctagcggaccagacaaagccaaaccgcaaccgcgaagatgtatccgaggcgtccagtttccgagagtcgatcactagtgaccgcaaggtggactaaactcacggtcagcccaaccagtaatccgtcgagccaaagaccaccaacaccccggtggggcagtgtgcagaggcagcatcctctggggtatcgtggcgcagtccggggtggctgcggctgcagctacgaccaaaaaggagcagcaagcgcggagccgtgtaagt

SEQ ID NO: 43496 - DNA, 2231 bp, Zea mays
  Clone ID: MRT4577_139675C.1
cccacttgttcccttggaaggggtgcggaaaagcttaagtgcaattcaaaaacaaacaaatgtttttgggaaggcaccatcacaattggatagctatttgcaatcaaaggttgatgaatcagaagaaccacctcaatctcttgagattcaagaaagttcacaaggaattgctcttacccctttatcggataaagatggagggaacactgaagataataataggactgagaaaataaatgcatctgaagcaggggggtctaaacgctggagcagggtaccttctttgccttcatatgtgccatttggtgagctttacctattgggagattcatcagtcaatacactttcagattcagaatactccaagatgacgtcggcatgtgcaggtgcagtctgttatatcggagttaagagagcgtttgcagtcgcactcaatgaagtcctatagggctagatttcaaaaaatatatgattcatgcatgtgtgcaaatgctcccatttttactggcattgagcaattgccacaattttcacatctacaagaattaattggtctaacagctactgattctgttgaacttggagatatcgtggaccctcctgttatccgaactgctacttctatccttcctcttggatggactggactccctggtggtaaaaatgctgagccactgaaagttgatataattgggcatgacctacaaatgtgcactcttttccaggcacaaataaatggaaactggtattccacagtaatagagactctaccatcagctacttcatactcaccaaatggagaactgcaacccacattacagaaaatgcggattcttgttggacaaccactaaagcagcctccaaattacattagtggggatttcatgattcctgtgatggcaggtgctgattcaacacccgactttggatttgaatcattttttgaagataaagattgctgcaagggtttgagtggatttctaatatatgggacaagtgattttgtaactgtacgtaaagaggtccacgttaggactcggagagtgcgattgcttggattagagggggcaggcaaaacatccctgcttaaagcaatgttaggacaagttaaagaaagaaatagcactgttcttgaatgcatacatgtcgatttgcatggcaagggaatatcaaatggattgtgctacatagattcgacaacggtaaacttgcaggagctacctttggaggttgggcggttcaaagaagaactgttgttaggactccatgatatcagcaggaagactgaccttgttattgcggtgcataacctagcacaccgaattccacagtatcaacggtccaatacttctcagcctcagcctgctctttcacttctcttggatgaagctaaggcgctaagcattccttggattcttgcaataaccaacaaattctctgttagtgcgcatgagcagaacagattgatcagctcagctatggaagcatatcaagtttctcctgagatgacaaaagttgttaactcttccccatttctgatgccaagtgctagaaacagtttgcagcagatcagatcagctactgggaagttgaagaaggatccagcaaatagatctggttatcttcctgtaaactttggattgtcatcatttcagaggaaggacattgttatgcatgtggagggtgttagttcccttcgtcaacttgtacatcaagtagtcctcaacaatgaagaaacagcatttgaggaacttgctcgtgagagattgttgaaggagctagcgtcagagaaagcagcgtccctgcaagtgaagcagaagccccggaaaagagatggctctgttacagctgctgctgtaggtgcatctctgggcgcgggcctgggaattgtaatggctgtgataatgggggcagcatcagcccttcgaaagccgtgattcatgtattcttttgatccattatttacttcttgatttaaggatgtctgaacaaaagcactagtgtaggcatgaaaaatgaaattttagggcagaatagttagctgataccgtagtgccacattttggctgtgtatagaatgtaggttgagccttttttttgctgatctgaattttgttgtgttactggagtatggcttggatatgttctacatcatgttttaatttagttataaatctgtatcatgtctagaaaaaaaaaaaaaaaaaagcggcccgaagaggggcgccagt

SEQ ID NO: 43497 - DNA, 397 bp, Zea mays
  Clone ID: MRT4577_139676C.1
gcgaccacgcgtccgcagacgcatgctgtttcgtatacacttcaacgaagacttgaaccgagacacgcatgcacgaggacctggggcgaccgtactcacggctgttgccgaaatccacggcagactgtgcaggatatcctccatcatcagaagctacacgcagattatttcttatttgctgagtgcctgacacgaggggtcgctttgctgttagcgacccgtgtgtccagcgacgacagtcgaggccgatgctggtagggcgaccatccggcgcgcccttgcgtcgctgaaacgaaggcatctcgccgaggaaagggcgcacaggcatgacatagaggcgctaacccgtcccttatactgccacgctttggagtgtaaggagaacgctcaaaagcat

SEQ ID NO: 43498 - DNA, 299 bp, Zea mays
  Clone ID: MRT4577_139677C.1
attcccggatggacgcactcatccgcaagctgtccccctacacactcctttcttctctccaatcactgctccctccatctccgcattctttaatacgaggggggccgatctccccactgctccgataacggtctccccaggaggtgcaaggcttcttctggcaggacattaaacacctcacaaattccgcttgtctcgagccatccacatgtgtatgacccatgtgatgattcctttacccttgttagattcactactctcaaacaaggcacaactcttgacactacatctcaaggtta

SEQ ID NO: 43499 - DNA, 121 bp, Zea mays
  unsure (1)..(121): unsure at all n locations
  Clone ID: MRT4577_139678C.1
ggcccngttgggcctttngtgngtcgtnnttccctttcctggccgtcgttttccnncgtcgtgnctgggnnncccctggcggttcccnncttnntcgccttgcntctctttcccctttcgc

SEQ ID NO: 43500 - DNA, 424 bp, Zea mays
  unsure (1)..(424): unsure at all n locations
  Clone ID: MRT4577_139679C.1
ccttttccccgtccccccctctgctcgccatggaaggccggcgccgccatccgaaatctccgtgcccacccgcacgaccgcgcgatcgactcccccacgcccgatctgctctccatggaaggtcgtccccgcgttctgctctccatggaagcccaacgccgtcctttagaaatctctgcgcccacctgcgcaaccacgcgatccactcccccacactctgctcttcaacgacatggccgccgtcgcgctcctcctctcgccggggagtatctctttcccacctcatccaagcctcgccccaggcttcaccaagagaccaccgccctaccttccnggcggtcatggcgccgcggcgaggtttcggggccgtcggggacgggcccggcgcggggctgccacccgagcaggccaccgatctacgacg

SEQ ID NO: 43501 - DNA, 290 bp, Zea mays
  Clone ID: MRT4577_13967C.1
gccgagagaagctaatgctaggagccagatgcgagaagctcctagcatcatccatgagtagcagtacgaagcaaaaccctgaagtaaagaacaggctcacaacaattcaggctgctacagctggggctcccaggtctggggcaagctgtcccgagccgacctttccacaagaagaggccaggcctctatgatgacagagaggttttacgtgaaaaatgactagaaatctccagatgatctaaagagtatcattatgcgccccatttggtaaagcttcggcctgcgcaggc

SEQ ID NO: 43502 - DNA, 334 bp, Zea mays
  Clone ID: MRT4577_139680C.1
ggggccacactaatattcaggaactatccatatccatttcggtcccttttaaaaaaaaaaaaaaaaatgtgatgtgacaggtgccggccggggccaacactaatatgtaggaactatccatatccatttcggtcccttttaaaaaaaaaaagaaagagtttggtgtctaggtgccggccggggccaaatctaatacttgaggaactatgcgtatcgcttggggtgccttttgaaaaaaaaaaacaaacattatgtgagttgggccgactgggggctacacaatagtgaaagaagtattgccatctgctttggtgccttttaaaaaaaacaaaaa

SEQ ID NO: 43503 - DNA, 374 bp, Zea mays
  Clone ID: MRT4577_139681C.1
aaaagcaacaaaccattgttgtgttgttcgacaccaaccaagaaaaatgctgattatctttccaggctaccagcctttaaacactaaaatttccaaggccaaaacaagggaacattatgccaataacaaattgacaagaactcccaggttaatccaagcttttccctaaaccgtgcaccactggagcacaataggagaccagatgaggttaatacaactggcccagggagaactgatcctccagctatctgcaaatgcttcgcgaagttctggccagagtcccaaatattcacacgatcagttcatggagggaccccaacgggttggatgttactttccaggcctatcacgccaaagagaactaagggcgcgca

SEQ ID NO: 43504 - DNA, 182 bp, Zea mays
  Clone ID: MRT4577_139682C.1
atgcctgcacgtctactttagatgatccatctcggctcagagctcatctcacattctcaaatacataaagcgcgcaaaaatgcagatatgcggacatggactctagcgcatcttataacgcctatactgcaaacaaaggcactgacatccgcaaggctcgcggaattcaaaagacatatttt

SEQ ID NO: 43505 - DNA, 529 bp, Zea mays
  Clone ID: MRT4577_139683C.1
gccggccgggccgggctcttccagcatcaccctaagaagctttagaaatggtcactcctgccgtaaagcataccatcgtgaagaagcgtactgctcacttcaagcgccatcaatctaaccgttttatgcgtgttggtgaatcttggagaaagcccaagggtattgattgtaacatgcgtagacgttttaagggacaagctcccatgcccaagattggttacggctctgccaagaagacccgtaatctcttgcctaacggtttccgcaaattcactgtttccaacgttcgtgaactcaacttgttgttgatgcacaaccgttcttatgctgctgaaattgctcacaatgtctcttccaagaagcgtgttgctctccttgaacgtgccgctcaactcaacgtcaaggttatcaacgctggtgctcgtctcagatctcaagagtaattttaaagattattcatcaatttgtattaatcttttgtttataaaaaaactttttatctcaaaaaaaaaaaaaaaaaaggccccta

SEQ ID NO: 43506 - DNA, 199 bp, Zea mays
  Clone ID: MRT4577_139684C.1
tttcctctcgtgcgaccgcattaactgccctgtcacaggtgtttatcaggagagcatgatgaggcagttacaacacagtacacgatgaaccgtatgatactggctcactggtccacctaacacagacaaatccctgagcacaagaggcgcccatgtaggcgcatcaagagcgctggcatacgcgatctaaacaaactat

SEQ ID NO: 43507 - DNA, 1833 bp, Zea mays
  Clone ID: MRT4577_139685C.1
ccggccgggagtttttgctccacccacccgacccattgctatcctacctgccagcgaacctgtctcgtctccttgttgcccacgtggcctcgccgtcgccgcgagctccaccttcctcagctctgccccgagcgcgatgtggcgagcgacgaggcggtctccgccgttcctgcgatggctatcgtcggacgcagcctcctctaaggcgccgcggcagcgcgtagcggcgctgtgggggaacggtgactacgggcggctggggctgggctcgctggagtcgcggtggagccccacggtttgccccttcttcctcgcccgcgccgccgacccgcccgcctccctcgcctgcggcggcgcacataccctctttctcacccagaatgggcgagtgttcgctacagggctgaacgactttgggcagctggggataggaacctctgttacacatatgctggagcctgttgaaatttctggatttcacgaaagagttgtagaagtttcagctggcaaccatcattcttgtgcagtcaccgcggatggtaagctctttgtttggggcagaaactcaggtggccagcttggccttggtaaaggggcaggtaaagtagtttctaccccaacaaaggttgattgtttgactgacctcagagtaaaaacggttgctctgggatcagagcattcaattgctgttacagaggaaggtgaagtcttgagttggggagctgctggttctggtaggctcggacatggccgtcaatctagcatcctgggattttctctgacctcaactgaatatactccaagattgatcaaaaactttgatggtatcaagattaaaaagatagctgcaggaatgttgcactcagcttgcattgatgaaaaagggatttggaagaccgaacgaagaattcagaccaaatattgttgaagagataccattttcagaagaagttgcttgtggaggttaccatacttgtgttgtaacagatagcggtgatctgtattcttggggttcaaatgaaaatggctgccttggtctgggaggtacggatatggtccgctctccggaaattttgaaaagttctctatttaaacttcctgtatctaaggtatcttgtggttggaagcacacagctgtagtttcaggtgatgacatctacacatggggttggggaggcgccaatgggacttttttcgaagagggccattcttccggtggacagctgggacatggaaacgacgtagactattttgagcctatgatggttccctttggcacgaatgcaagagccgtccatgtatcgtgtggcttcaatcatactggtgcaatttacgagtgctccgaggactttgactgacgtgccacctgcagacagcagatccgcatgtcttggagacttaggttagttatcaaattatactcgctagaagtgcatataaacagcataaataagctctgatgttggacctgcatttatgtgaagagaaatatagaacaagtgataacacccctgagagggggatgtaaattaaacagaataagggatgaactggatgcattttgtgatgcatcagagttacttgccagtgtatagcatttcttcatttattggctggttctgtattattttgccaggtactaagaaatccattgcctgatgtctcagcaggctgtttgtgtacattatgattgcttgactgcttggtgtcgatgcttgctgtgttttttgtgtgtaaataatacatgaatcagttaatcgtgcttgtacaattaaatatgtacatatatcagtgcatcacttattatatgtaagaaatttaaaaaaaaaaaaa

SEQ ID NO: 43508 - DNA, 296 bp, Zea mays
  Clone ID: MRT4577_139686C.1
cgcggcggaaataattggcgggacgagcagtcctcaagtcggcggccgcccggtcaacattgggggggtttacaatacttttggtggggctggcacgcacaccatgccgatgaaatggtcgtgatgcaaaaagagatcctagtggacctcatgactggaccagagcacgtccgtcccgtgctgacaggaacaggagggtgtactataggttacgaatcatacatgtggacacagtgctcacacaagcggttcacagatctcagcacggcactgatcactctggctgatcccagagg

SEQ ID NO: 43509 - DNA, 392 bp, Zea mays
  Clone ID: MRT4577_139687C.1
gggttttaatataaatgataaacaaaatgacttatctaaatgtcttctaaagacttacagctccagctccacggttttctggagcacttaatgacctgctccaccaactccaccaaattttctggagctggagctgtcccaaatagggtcttagagagccggatagattggcgagttggatggctagtctgttagagagatattttgctattaagtagctaaaatttagcttgacaagtcatttggctagtctcttagagatgctctaactggattactttttgcacatcgccttttattttcatgttattgtgtgtggaatacctgacatttttttaaatttatcaccttttttttactttgactgtcttaggtgatgagctgtaaatgcc

SEQ ID NO: 43510 - DNA, 657 bp, Zea mays
  Clone ID: MRT4577_139688C.1
acagaatggtttgctctccagaaattttgaaaagctcgctatttaaacttcctgtatctaaggtatcttgtggttggaagcacacagctgtaatttcaggtgatgacatttacacatggggttggggaggcgccaatggaactttttttgaagaggggcattcttccggtggacagctaggacatggaaatgacgtagactattttgaacctatgatggttccctttggcaagaatgcaagagccgtccatgtatcgtgtggcttcaatcatactggtgcaatttacgagtactccgaggactgattgatgtgccacctgcagacagcagatcagcatgtcttggagacttggactaattatcgaattatactcagtagaagtgcacataaacagcagaaagaagctctgatattggacctgcacctatgtgaagagaaatatagtctatagaacagagtgataccacccccctgattgagcgagggggatgtaaatcaaacagaataagagataaactggatgcattttatgatgcatcagagttacaggtcagtgtatagcgttccagtcgttccttcatttattgggtggttatgtattattttgccagctaataagaaatccattgcctgaggtctcagcaggctgttcgtgt

SEQ ID NO: 43511 - DNA, 731 bp, Zea mays
  Clone ID: MRT4577_139689C.1
acacccgccccccagatcctgaaccagaggccgcggcgcggcggctaccaccatatctgctctactgggatttcgctgtcagcaggagctctgctattgcattgagtagaaggaaagactgtacatcagctgttaccagcttacagagtagccaagggtctagagaaaggagaaagaaataacacaaaaaaactatcctcaggctcattagttagccttccactactacactactgaggggaactattccctcgcaagttggcttacttgtctagcagagagacaagaattctgaaacacccttgtgttcctctccttccaaatatgccagcccatgtagcatgcaactgaaaggcattcaatttggagtgacgctgttgagcttgtgccaccgaggtcgaagacgaaccaatcacagacacttgaggatcagaaactgataaatcagcccagatttgcctagcaaagggaaaggggcaaaggagcagaagatgcaccgcagtttccggttgctgatcgcaaagcttgcaaattgggtcgtcaaaagcctgtcagccgtccaattttttgttttggagagcaagaaaataataaagtcgcacctttccctcagtttgcatcttccaaactctgttcagatccggctcccgaatcctaccaatgaactgagcatcataagcagattttgtcgccagctgcccaacgccaggagatggaaccggcatcagagg

SEQ ID NO: 43512 - DNA, 115 bp, Zea mays
  Clone ID: MRT4577_13968C.1
caacatctactatacttcaccctggtagcaagggcaccacccgccttggagccaagaagcttgcattggtcgctctcctaactctttgtgcaagcgccactagtgcgacccatat

SEQ ID NO: 43513 - DNA, 1887 bp, Zea mays
  Clone ID: MRT4577_139690C.1
gccgcgagctccaccttcctcagctctgccccgagcgcgatgtggcgagcgacgaggcggtctccgccgttcctgcgatggctatcgtcggacgcagcctcctctaaggcgccgcggcagcgcgtagcggcgctgtgggggaacggtgactacgggcggctggggctgggctcgctggagtcgcggtggagccccacggtttgccccttcttcctcgcccgcgccgccgacccgcccgcctccctcgcctgcggcggcgcacataccctctttctcacccagaatgggcgagtgttcgctacagggctgaacgactttgggcagctggggataggaacctctgttacacatatgctggagcctgttgaaatttctggatttcacgaaagagttgtagaagtttcagctggcaaccatcattcttgtgcagtcaccgcggatggtaagctctttgtttggggcagaaactcaggtggccagcttggccttggtaaaggtaaagtagtttctaccccaacaaaggttgattgtttgactgacctcagagtaaaaacggttgctctgggatcagagcattcaattgctgttacagaggaaggtgaagtcttgagttggggagctgctggttctggtaggctcggacatggccgtcaatctagcatcctgggattttctctgacctcaacgtatgataatatatatttcataaaaatattctctaaaaaacatatgttggaacttaattgtgtatgtactctatgtcaattcattgttatctatttagaagatataagaaaattcttaaccataaaggatgaaaatttttctactgctagctggcatgcctaagtacacaagggagctatgtgcatgattttaagagggaataggccctctaaatatctcaaacagttaaagcttgtggcaaatgaactagtgtggcatatatgggtattgtttgtgctttccttaaactgaacaaggttgctcaattatgtggtattgtaatgtgagttttgggtaaaatgctgaatggcatagatatagaagttcgaaaatttgaaggcttctgcttatcttacgtgaatatactccaagattgatcaaaaactttgatggtatcaagattaaaaagatagctgcaggaatgttgcactcagcttgcattgatgaaaaagaccgaacgaagaattcagaccaaatattgttgaagagataccattttcagaagaagttgcttgtggaggttaccatacttgtgttgtaacagatagcggtgatctgtattcttggggttcaaatgaaaatggctgccttggtctgggaggtacggatatggtccgctctccggaaattttgaaaagttctctatttaaacttcctgtatctaaggtatcttgtggttggaagcacacagctgtagtttcaggtgatgacatctacacatggggttggggaggcgccaatgggacttttttcgaagagggccattcttccggtggacagctgggacatggaaacgacgtagactattttgagcctatgatggttccctttggcacgaatgcaagagccgtccatgtatcgtgtggcttcaatcatactggtgcaatttacgagtgctccgaggactttgactgacgtgccacctgcagacagcagatccgcatgtcttggagacttaggttagttatcaaattatactcgctagaagtgcatataaacagcataaataagctctgatgttggacctgcatttatgtgaagagaaatatagaacaagtgataacacccctgagagggggatgtaaattaaacagaataagggatgaactggatgcattttgtgatgcatcagagttacttgccagtgtatagcatttcttc

SEQ ID NO: 43514 - DNA, 659 bp, Zea mays
  Clone ID: MRT4577_139691C.1
cctcgaggccggccgggaccatattctcttgcaattcaattacacttagctctcaatctcaccgacaacgacgaataacatatctctgcccctcgagcacggagtcaagaaccactgcctcacccaaggatgagttatacgtccacatgaccaatggccaccgaaggcgagcatacatggcggctttctacttcaatgccgcctggtgcctctctgccgcgccatctgcacactgctcttcaaacgcacgaagaacttacactacattgcactgcatacactgaatgcggacctatacaaaatgatcgaacaccacgcagtggccaggagcgacgcatggtgatgcacgactcgttccacatgccatgagaacggccagacggctatcgtaccatcgtgggtgccactgatgcactagctcactgacactgagcaaaaagcatgccgagactgctgcactagcgtctgagtctgtgtacatgacagctgaatccaactgtcaccgctctataacggatcaggcgtatgcgttgtaaacgtatgtcggtatgctgttctgaattagtcattagtggacgaatgggaacaagcattatgtgagtgtctatacaattcagaagctatacttgaccatgaatacgtgatataagttccacaac

SEQ ID NO: 43515 - DNA, 625 bp, Zea mays
  Clone ID: MRT4577_139692C.1
ccggccgggatcttgtctatgatcctctggtccgtggtcatggcgtcgtgcatgctctccgataccacgcgtgccactccagtaggggaggctggctctgcccgagttttccgggctcacgagctccggggctctgtccatgcggcggaatagtcacctccgacgacttcatgtgcgacgtctccttcaggacccacgcgagccccacgaacggcgggccgcggcgggcgaccacggaggcgaatctgaaggtggccatcaatgggttccggcgcatcgggcgcaactttctgcgtgggtggcacgggcgcggtgacgcctcccccctcaacgtcatcgacatcaacgagacgggaggggtccagtacgcgtgccccctgctcaaggacgactccacgcgtcggcatcttagatgtcgacggcaagcccgtcggggacaacgacgtctccgtggacggggagggcatcacagatcgtgtccgacggcaaccccggactacctgtggagaggcgagctcgagctcgacctcagcatccacggcaccggcggctgccacgaccggcaggtggcgggcaaggacatctacgcgagtgcccagaaggcgctcatcacagggcccggaaa

SEQ ID NO: 43516 - DNA, 277 bp, Zea mays
  unsure (1)..(277): unsure at all n locations
  Clone ID: MRT4577_139693C.1
nnnnnnttattattttntnnagccggccaaccgtcaaacaagcatttatgtttaagtttggaaatctgaagagactcacggcgctgagaggtaacttgcatgggacgcaacaccggacaaggcacgccccattttggaggccaaaagcccacgcactgtaagaaacaacaatctagccaatgctgccacactgcgaatgcatacaaggtattgaagactgactcaattacggacacaccaaatggacagaagggggatctgatatgaacactgtggg

SEQ ID NO: 43517 - DNA, 316 bp, Zea mays
  Clone ID: MRT4577_139694C.1
gattgacagagccatctctactagctatgcacaagaaacgacgacacctagtttgaggactgagcctcggcggaagcatatcaatatagcactctagaacatgttttgtgtggcatatagaccaaaaaaacctggacaggcattatccgaagagtgcgcaaccgattgcgcaaacaagacagacctaatggagggcaggccgtgggcatgtatctaccagaagccctgacccccaatgtacgctggaacctgcacgcactccaagttcgtttgtacaacgaatacaatggcatcaagtcccagaggaacatacact

SEQ ID NO: 43518 - DNA, 580 bp, Zea mays
  unsure (1)..(580): unsure at all n locations
  Clone ID: MRT4577_139695C.1
ccggtaccggacacttcccggngtcgnacccacgccgctccgatctcggnacgaactcacctaaagcacgtagaagcgcagttagnaaaatggngattcctnatttgagagnagtggccgtaaccgcatggnatgaagcgtcacattaactccgtgcaatgntttggagtcctaattcggggagtttttctttggggaagtgttcggggagagaaattgggagataatatcgattcataccagaggagaaaagtgtgtgtatgtgagtgcaaacgtctgtactctagaggagtagggatagnnaggaagagnnggaaaaatcgaaatgnagaataaatagaagaatgaaagcgcaagaaaaataaggtcgtaagatatgaagtagcccagtattctaaaattgaagtaaatgggaaactttcgaaaagggatccgttctgatttctcaagagaagtgaggggcgaagggggatttgatactctgagaaagaatttcttctttattattaagacgtagattttgatcctgcatatggtttggtaaaagaacaatgcttctgctttaaagataaaatggaaa

SEQ ID NO: 43519 - DNA, 474 bp, Zea mays
  Clone ID: MRT4577_139696C.1
cacctgttgtatttcattttaggtttcgacgctggttcacgctcgaccggaacacactgggatgcaaccctgcgtgctgcaaactggcgcacgctaaaaaacatacatgttcaaacagaaaagacgggggaaaacctcactgagacactgtatagtagtacatattataggtactgtaaacagcctggcaggagacaagtggtggtgctgcactccaaacggagagagcatattacgactaacgtcgacagctgggagtctgtttgtatcctcgggggggtaaccggaatttccgtccagaccgaacagacgcgtgtttgaaccacaaaccgctgaggagtttcagctgcatgggaggctggtacagctctagcaggtgagcgtggagtcattctatagaaatcaaaggcataccgagcgaagctataacccgggagatgacgcttaagcccggatcttggcatataccgccca

SEQ ID NO: 43520 - DNA, 783 bp, Zea mays
  unsure (1)..(783): unsure at all n locations
  Clone ID: MRT4577_139697C.1
aggaagaatggcataaacacagattgcacaaacaggcagccaaactaactttcgtgcaacaagaattcaaatcacagatggccatgtacaagcagagattgacagacagaaagccagggtatatttagaatgcaatgtacggggtagataccagacatagcaaagtagtcaaaatttcaagcacttgaaaggagcaaagtctcgaatcttctattacataagtcatcggcagtagataacaataatctgaagcagcattcttaaatttgctctcatggtatccattaagtgctagacaattgaaccatcgaggacttaatcctcatcctcaacaaccttagttcccaaacctttgagaccctccggagggatctcagcaactgtgaccaaggagtagagttcctccttagcgtcttcctcgtcgttcctcttgcgggcaattctgacacggactcgcctcggcacactacggataccactgctccagatgtgcttgttgagcttcacatcaatcctgacatctgtagtacccatggccttctgagcaaatttcctgatctccttgatggcatttggggccttcttcttgaaggtgcatccgtggaggcgcttgtggaggttgatggtgtactcgcgggtcaccacctcatccttgcgggtgccggcgccgcgcttcctctccgccatctccgctccgccgccggcgccgcgtccgcctttctcctttgctcgggctcaaagggaaggttgcggcgtaaagcggacggcgtgggtcgacnccgg

SEQ ID NO: 43521 - DNA, 292 bp, Zea mays
  Clone ID: MRT4577_139698C.1
aaaaaggcgaaaaatccaagggcgcattttggcacaaaaaaaacgggttttaaaagaaattttaatgggtcacggaaacccaaaaccttaaatttggggctaaaagtctaaacgggggaaaaaccccaagaaaaaattcccccggccaaaaacgtttttttggggcaggggccccaggatccaagccccactaaagggggggcctgggaaacaccctaaatttggccctttttttggaggggcaacctggtggaaaacccctgggcagggttgatcaaccctttgggagggc

SEQ ID NO: 43522 - DNA, 419 bp, Zea mays
  Clone ID: MRT4577_139699C.1
cgaaacaaaaaaacctgttttttttccccccaggggggggggaaggggggatcgggtgaaatttttacattgtttttaccccgaaaaaaagggggaatgaatacaagggccgcgggaccgccccgggcgacccaaattattgggccgtttcataacgcggtgaaatgaagggcaaagcaaatgacgcccccctttgaaacgcgcgggtgggttgggtgggctcaatcccggcagaggggggccactttttaggggtagtcctggggggggccctggtggtgggggccccccttgaaaaccttcccgtaaacgggggccggggggccgcccctctttagggggcccccccctttttctccgttggcggggaattttgccgtgtggtttggggggcccgtgggggggtctggggttttttg

SEQ ID NO: 43523 - DNA, 771 bp, Zea mays
  Clone ID: MRT4577_13969C.1
cgcgtcccgctacgggaacgccttctcctactgcatcccggccacggctagtgactccggcttcttcaccctcggcgtgcccaggcgagcctcctccaggcacgtcgtcacgcccatggtcaggttcaggcaggcggccacgttctacggcgtgctcctccgcaccatcaccgtcggcggccagcggctcggcgtggcccccgcggtgttcgccgcgggctcggtactagactcccgcacggccatcacgcgcctgccgccgacggcgtaccaggccctgcgctccgcgttcaggagcagcatgaccatgtaccgctccgccccacccaaggggtatctggacacgtgctacgacttcactggcgtcgtcaacatcaggctgcccaagatctccctggtgttcgaccggaacgccgtgctgccgctcgacccgtcgggcatcctcttcaacgactgcctcgccttcacctcgaatgccgacgatcgcatgccgggcgtcctaggcagcgtgcagcagcagaccatcgaggtgctatacgacgtcggcggcggcgccgtgggattccgccaaggcgcgtgctaagagatccatgtgaaggagacaataagctatactatatatatatatatatactatactatctagtgctaatttgcttggcaaccgagaacaaataaatcactatcccaagacatggtaaaaggacatttgaagtatgtcaagaaattaagaaactctggagtgataccttaaaaaaaaaaaaaaaaaaa

SEQ ID NO: 43524 - DNA, 859 bp, Zea mays
  Clone ID: MRT4577_1396C.1
gcccatctcctatgccgaggcctcccaactctctctccctcagccggcgctttgcccaatccccaaactcgtcgcgcccctgctcctccaggctggccgcacgcccatcttcctaccgtgctcgcccagctcggatctcttcttgccggcgctcttccctgccatggccgcgccccccctcagctcgcctccctcaagcacgccacgctcctccctgctcgaccatggaagccacgccgtcgaccctgcttgaaccccctctgccgcgtccctctctctgacttccgagcttcagccatggtgtacgccgggatggggctcaggtacatgtacccctgcatcaccatggggagatcgctagggcctctggtgccatcggtctcttctacggcacacaccttatcttctccctccagacccaactctccaccggccgtgcttgcctgcactgctcatggccggtatgcgttcgcgcccgcacagagcatctggagttctggcacgacgaacgggggaaagaagcagccaacatcgctcgcccaaatccggggagcacttgatgtccggccgtcacatccccggtcacgttctggttttcctctcttcgcctcggtgtccatgtccaagcgcactcgcctcggccagcaatggttccgagttccttctatccatgccgcacatttccctcagatctgtcgcgcccaggatcgttttggtatgcgtgtcattttcttggctctcctcacggcgatggtcgctgctccccatcattgccgagctcctcactgtcgtgcgtcgctacaggcttgctttcggacgcggctgtctccgtcacttgcgtcagcttgcttgccctgca

SEQ ID NO: 43525 - DNA, 825 bp, Zea mays
  Clone ID: MRT4577_139700C.1
tgacaacactatcggacacatcatatttactaagatacaagcacagatgtacgattggcacgacataataacaacattgtcagaaaatgcgtaggaccatgaaataccatgtggatatttggacttgacgaagcacttgaaaggagacaagtctcgaagcttctattacatgagtcattggcagtagataacaataagctgaagcaacattctcaaatttatctcatggtatacagggcttaatcctcatcctcaacaaccttagttcccaaacctttgagaccctccggtgggatctcagcaactgtgaccagggagtagagttcctccttggcgtcttcctcatcgttccggttgcgggcaattctgacacggacacgcctcggcacactgcggataccactgctccagatgtgcttgttgagcttcacgtcaatccggacatcagtagtacccatggccttctgagcgaacttcctgatctccttgatggcatttggtgccttcttcttgaaggtgcatccgtggaggcgtttgtggaggttgatggtgtactcgcgtgtcaccacctcatccttgcgagtgccggcgcctcgcttcttctccgccatctccgctccgccgccggctccgcgtccgcccttgtttgctcgggctcgagggaggttgcggcgtgagatattctggcatcgagctattttgccgcaggacctcccctacagtatcgtcaccgcagtagagtttaaccaccaaattcgggatggattggtgtggttcctctacgcctaggacaccagaatacccggccggcctcgaggtacccaa

SEQ ID NO: 43526 - DNA, 722 bp, Zea mays
  Clone ID: MRT4577_139701C.1
aaaaaaacacggtcgccgccacctgccctagccgcaggagggagcgttcgccgtcccgccccgccctcagtctcccgacatctcccccccctgactccgactgccgcccctctccgaagaaatgactgagcatctcttcgaggacaccttctacgctgctacacttgaccctgatgctgaacagagtgatagagtatctcgcgttgcatgtcgaagagagtagttaaatatgtatatgcaactaaatggtgccacacatgtgtagtccgatgcatgttgtcgacacatatagcatgcatatagtgcctactgtgaatcaggatcgaaccctcgacatactggctactagtactcatctctggagaaaaactctgaccagacaatcatcgaaacgctatgcgaggcgaagatgatacaaccatctcacaagacacatcctacagccaccacgctatagtgccactgtatgtatccctggtggcgcttcttatgctgatcatgggagagcctatccactgccgatagcttctcagctagatcagaaggtctttctgctcatccgcaaagcgtagaactgtgcccgctgaccacttaagtgttagccttgctcgtcacttattaaatttccatccgtggcccgaagctcgctatatactggtgtaagtactgctttctatatcgccatggatttatgtgacacgagctcatgtatcttgctaaaa

SEQ ID NO: 43527 - DNA, 595 bp, Zea mays
  Clone ID: MRT4577_139702C.1
gaaaaaacgggccttatgggatcaaaaataaaattttttgtacaaccccgacaacagaaacagcagcccctcaattatatactaaaggagtcaacatcgaaaaaatatgccccaggttcggcgggccctgggaaaaaggggatttcgggatctaccccccaaaccctttaagggggcgaccaggcagctaaagttctccaaacagcacgggcgcaacagggtaagggacaacttgcccaaaaaatcccgggtgtaaggttataagggggcaaaaaggggcttttgaaaacctgtaaaaaccagccaaagcttcctgcaggggctaatgtcccattgttcagggaatattttaaatctgaacacacgggttccctctttcctgatcggaaaagggccccaaaaacttggggggccaaaaaaaaaaacggggggctcacaagaaacaatcatccgcattgttcacccagggttaaaccaccatacgggctctaagcttgaaatccaagcagggggcgttaatcaggtttttcactggggggaccactccagctttttgcagtctgacagccctaccaaatgaggcttcacattgggg

SEQ ID NO: 43528 - DNA, 488 bp, Zea mays
  unsure (1)..(488): unsure at all n locations
  Clone ID: MRT4577_139703C.1
gtgggggttttttttttttttttttttttttttttttttttttttttttttttttttttttttttttttttggaccccctaaagaaaaatttgccttataaaacgtccttagttttaaaaccgggctgacccacaacaggccatttggggggggggaccacaggtccccaggaaaccacatttttttttttttttgggagccggaagacaacttcatccaaacatagtcgtttaggcggggaccattatagctggggcttggcactggggggaacaaaggtgacgatgaatgggggggtttccattggccccagctcaacgacgggctttgaagggtccacagggcccccccgaaccccctttttggaagccggaaaaccttgggccttccatttaaaacgctttttctccatgggtgggcgtttttgggttgcccgaaagcttntctcgatgacctngccatattttttttccgggaacactctttt

SEQ ID NO: 43529 - DNA, 269 bp, Zea mays
  Clone ID: MRT4577_139704C.1
cagaggagaccccagccagtcgatcgttcaagacaaataccagcttaccaacagcagcagcagcaagcccacccgttcgacgacatggcccgcctcggagccggcgccgtgggggcactcctagtggcagtcgccgctgtatccgcgttcctcgcggtgccggcctcggctaagtccggggaactgagcacgatagggttgctggcagcgaaaggcagcagaggcaccggcacgcagaaatgcacgggagccctgtgctactgctacgt

SEQ ID NO: 43530 - DNA, 615 bp, Zea mays
  Clone ID: MRT4577_139705C.1
aattcggcacgagggcgagtggttttttttttttttttttttttttttttcctttttttttttttttgccacacccgggagccgtagctccggaggccggacggatgttcgttcaacaagccagagggcgttcgatcccaaccacccggacggagcctactccatcgtcagtggggggggggaaggaagggtagggcggacaaacctcagaagggtaaagaaaaactatctcatcaggcctgcctagctggagcttgcataacctaactgtaaaaagcaaaaaaacaagctcaaactggaacaaacaaacatgcaccttgttgaacaaacaaaatgcctgcttattaagccaaacccatgactgtcttcttgcccccaaccatgcctaacgaatggccaccgacggcgtaaaacgtccgttccatgagatcctcgtacttcacatcgcaaaccttctggaaactgtacattctttgctggagcgccccatccttccctagatccccgggcaggccttcgaagacactggaatggttttgctcggacaaccgaaagctttgttgcctggctgactgcactcatgccctccctagtgagcatctccctaccaaagat

SEQ ID NO: 43531 - DNA, 2281 bp, Zea mays
  Clone ID: MRT4577_139706C.1
ccggccggagtgggccggccgggccgggatcgaacccacttgccactcacttccgcctgaactttgccctgccttctctcgacgactcccctgtccccgccgccgccgccgccgcaaattccccttccgcgtctgtctggcctctggggcttctaggttagcgcgtgccaccaccatggccgaggaggtccaggctccactttccgccaccatggccgaggaggtccaggctccactttccgccaccatggcgaaggaggcccagtcgccgccgtccgcaaccatagcggaggcgacggcgccgccgcagctcgtattatttaactcctttacgaagagggaggagccattccagccccgggtagaggggaaggtagggatgtacgtctgtggcgtcactccctacgactttagccacatcggccacgcgcgtgcctacgtcgccttcgacgtcctctacaggtaccttaaattcttggggtatgaagttgaatatgtccgtaatttcacggatattgatgacaagattattaagcgtgccaatgaacgcggtgaaacagtaacaagcttgagtagccagtttatcaatgaatttcttcttgacatgactgagctccagtgcttgcctcctacctgcgagccacgggtaacagaacacattgagcatattataaagttgataacacagataatggacaatggcaaagcctatgctattgaaggagatgtttacttttcagttgaaagttttcctgaatatctcagtttatctggaagaaaatttgatcaaaatcaggcaggtgcacgggttgcttttgatacaagaaagcgcaatcctgcagacttcgcactctggaaagctgcaaaggagggtgaacctttttgggatagcccttggggccgtggaagaccaggctggcatattgaatgcagcgcaatgagtgctcactatttaggacatgtattcgatattcatggtggggggaaagatttgatttttcctcatcatgagaatgagcttgcacaaagccgcgcagcttatcctgagagcgaggtcaagtgctggatgcacaatggctttgttaacaaggatgataaaaaaatggcaaaatcagataataactttttcacgattagagatatcactgctctttaccatccaatggctttaagatttttcttgatgcgcactcattatagatcagatgtgaaccattctgatcaagcacttgagattgcatctgatcgtgtctattacatttttcagactctatatgactgcgaggaagtattagctacatatcgtgaagagggtatttctctcccagtgccgttcgaggagcaaaatctgattgataagcaccattcagaattcttgaaatatatgtcgaatgatcttaaaaccacagatgttctggatcgttgcttcatggagctgctgaaggccataaacagcagtttgaatgatttgaagaaactgcaacagaaaatagaacagcaaaagaagaaacagcaacagcagaagaagcagcaacagaagcaacagcaattgcaaaaacagccagaacattatattcaagctctgattgcactggaaatagaacttaaaaataaactgtctatacttggtctgatgccatcttcatctttggcagaggtactgaagcaattgaaggacaaatcactaaagcgagcagggctgactgaagaacaattgcaagagcagattgagcagagaaatgtcgcaaggaagaataagcagtttgagatatctgatggaatcaggaaaaaccttgctaccaaaggcatcgccctgatggacgagccttctggtacagtatggagaccatgcgaaccagagcggtctgaagagtcatgattagctcactgactcaacaagtgatggtggtgtaaaatgagatttttgcctgagggcagttatcacattttgaagactaacaaaaatcgccatctctggatgtggtattctagagggtaggggttccaggttgactcaccagttaaaacatgcatttctggttgtataacaagcaatgaaccccgtatatatacttgacagtttgactccttgcgaggtttgagttttggttttggatataagacttggcaattccatttcaatgaaacagatgaaattttgcttggtttgcttgtgttggtggttaaggctctgtttggttcctttagttactgaagtttagtcgcttaggcaaaaaaaaaaaaaaaaaaaaaaaaaaaaaaaaaaaaaaagggcggccgc

SEQ ID NO: 43532 - DNA, 669 bp, Zea mays
  Clone ID: MRT4577_139707C.1
ccggccgggaatgtttgtcttcttccttcatgtggatatgcctgctggtgctactattggtgcggttccgcagattgaccgtccatttcatgttggctgacgtgcatgaactaccgtctgaacgaacagcggatacccaccacccaaacacagacgacgcgaggatttgtgacctgatctacaatacagagctctttcacgccaacatggcattcaccggcctatgggacaagagccaagcctgcgaaaaaacgaaccactacctcaatatgctcaccgccaacacaatatcgtaccactaaacctgcttattatgctacctatgcatattattcatctctacatatacatactctctcgtggatatggcactcaatcgtctaacttcctctaaacaaatcttccttgatacatttaactacatattaaaaattcactatatacgtgcatgatcttcaaatcaaaactatactttataagatccaaacaaggtgtcatctgcattctctggaactcatttgcgatgctcaagctgccacaatagctcgcattcattggagaagattacgctgtaaggcgaatcataccacaaggtctgcttcgagtgacatagcgatccctgcatcctgaccacctcctcctaagccgcgatcatagagatcctctact

SEQ ID NO: 43533 - DNA, 559 bp, Zea mays
  Clone ID: MRT4577_139708C.1
ctgccgcgcccgctgctggttccccctgctcgccgtggagcctcaccgtcgcagctcctgctcggatttcccttcccagccgaaattcctccctctgccctctcccggccgaccgcacggctccctgatgcacacgtctctgccccagctcgcttggacctcgccgtggcctaccctctgcgccgtgcccctggtcccggcctcagtccgcccactccccatggcgcgcccgccttgcttctccagcgtcgcgtccctccccatctcctctgctccctccagctcgcagaagctcctagccgagcccctctccagccgtggccgcgtctttcgtgctccggctcgctggcgagcgccgctgctccctcttctgtggtccctggctcgtctttggtgctcgcctggctgcgccccttagctctcgaccatggtggtcgcccatggccgtgttctgtttttctccccgcagcgctcgacgccttagaacctgcatagctctgttcgtctcgtcattaccttgctactgcctccggtgtggagcgatttgcgtgtgtcgttg

SEQ ID NO: 43534 - DNA, 2164 bp, Zea mays
  Clone ID: MRT4577_139709C.1
ggaaaccgtgtttcgacgggccgcagtgagcagtggcggggcccatcgaacccacttgccactcacttccacctgaactttgccctgccttctctcgacgactcccctgtccccgccgccgccgccgccgcaaatccccttccgcgtctgtctggcctctggggcttctaggttagcgcgtgcgaccaccatggccgaggaggtccaggctccactttccgccaccatggcgaaggaggcccagtcgccgccgtccgcaaccatagcggaggcgacggcgccgccgcagctcttattatttaactcctttacgaagagggaggagccattccagccccgggtagaggggaaggtagggatgtacgtctgtggcgtcactccctacgactttagccacatcggccacgcgcgtgcctacgtcgccttcgacgtcctctacaggtaccttaaattcttggggtatgaagttgaatatgtccgtaatttcacggatattgatgacaagattattaagcgtgccaatgaacgcggtgaaacagtaacaagcttgagtagccagtttatcaatgaatttcttcttgacatgactgagctccagtgcttgcctcctacctgcgagccacgggtaacagaacacattgagcatattataaagttgataacacagataatggagaatggcaaagcctatgctattgaaggagatgtttacttttcagttgaaagttttcctgaatatctcagtttatctggaagaaaatttgatcaaaatcaggcaggtgcacgggttgcttttgatacaagaaagcgtaatcctgcagacttcgcactctggaaagctgcaaaggagggtgaacctttttgggatagcccttggggccgtggaagaccaggatggcatattgaatgcagcgcaatgagtgctcactatttaggacatgtattcgatattcatggtggggggaaagatttgatttttcctcatcatgagaatgagcttgcacaaagccgcgcagcttatcctgagagtgaggtcaagtgctggatgcacaatggctttgttaacaaggatgataaaaaaatggcaaaatcagataataactttttcacgattagagatatcactgctctttaccatccattggctttaagatttttcttgatgcgcacacattatagatcagatgttaaccattctgatcaagcgcttgagattgcatctgatcgtgtctactacatttatcagactctatatgactgtgaggaagtgttagctacatatcgtgaagagggtacctctctcccagtgccgtctgaggagcaaaatctgattggtaagcaccattcagaattcttgaaacatatgtcgaatgatcttaaaaccacagatgttctggaccgttgcttcatggagctgctaaaggccataaacagcagtctgaatgatttgaagaaactgcagcaaaaaatagaacagcaaaagaagaaacagcaacagcagaagaagcagcaacagcagaagcagcagcaacagaagcaacagcaattgcaaaaacagccagaagattatattcaagctctgattgcactggaaacagaacttaaaaacaaattgtctatacttggtctgatgccatcttcatctttggcagaggtactgaagcaattgaaggacaaatcattaaagcgagcagggctgactgaagaacaattgcaagagcagattgagcagagaaatgtcgcaaggaagaataagcagtttgagatatctgatggaatcaggaaaaaccttgctaccaaaggcatcgccctgatggacgagccttctggtacagtatggagaccatgcgaaccagagcggtctgaagagtcatgattagctcactgactcaacaagtgatggtggtgtaaaatgagatttttgcctgagggcagttatcacattttgaagactaacaaaaatcgccatctctggatgtggtattctacagggtaggggttccaggttgactcaccagttaaaacatgcatttctggttgtataacaagcaatgaaccccatatatatacttgacagttgactcctttggaggtttgatttttagttttggataagacattggtactctttaagacattgataaaaaaaaaaaaaaggccccta

SEQ ID NO: 43535 - DNA, 258 bp, Zea mays
  Clone ID: MRT4577_13970C.1
tgctttaaacaaaacacggggcctccaggctgtgttttagtcataccacgctgctctctttaattattgtttatgtgaatcaaccaagcataaacacccacacagatacatcaatcaacaccccattaaatgtggctgctaactctgatctcaaatatatgtcgctcgctagatcatctttgaactaaaacacaacagataaaaaagacattggcataaaacatggaaagatatgagcacttcaccggtgcccatcga

SEQ ID NO: 43536 - DNA, 860 bp, Zea mays
  Clone ID: MRT4577_139710C.1
tcgagcaggccgggccgcgaggccgctcgacgatcccccagtcccctcccctcacggctgcatgcccgttgcccgcatccggtccatccggcagccagacgctgccgccgtaaattccccttccgcgtctgtctggccggtggccgctgtggttttgtaggctagcgcgtgccgtcctcggacctctcccctcgtcctccaccaccatgactgaggcccagtctccactatccgccaccatggcgaaggaggcccagtcgtcgccgtccgccaccgtagcgcaggcgacggctctgccgcagctcgtactattcaactccttgacgaagagggaggagcccttccagccccgggtggaggggaaggtagggatgtacgtctgtggcgtcactccctacgactttagccacatcggccacgcgcgtgcctacgtcgccttcgacgtcctctacaggtacctgaaattcttggggtatgaagttgaatatgtccgtaatttcacggatatcgacgacaagattattaagcgtgcaaatgaacgcggtgaaacagttacaagtttgagtagccggtttatcaatgaatttcttcttgatatgactgagctccagtgtttacctcctacctgtgagccacgtgtaacagagcacattgagcatattatagagttgataaccaagataatggagaatgacaaagcctatgctatggaaagatgtttacttttcagtcgaaagttttcctgaatatctcagtttatctggaagaaaattcgatcaaaatcaggcagcgggcacgggttgcttttgatacacgaaagcgtaatcctgcagactttgcactctggaaggctgcaagga

SEQ ID NO: 43537 - DNA, 399 bp, Zea mays
  Clone ID: MRT4577_139711C.1
atttcccggtccgaccaacccttccgcggattcttaatatttccttagccttatcttatttaatttaaggatttgcgtcaagtccgtgtgtgatcattccatgaaatatatgatatgggtttccatttgtttgaaaaaaaataaaaataatacaaaaacaaaaaaataaaaataaaaaaacaaaaaaaaaaaaaaaaaatacaaaaaataaacaaaaaaaataaaaaataaaaaggggggcccctttttaaggtccaaagtttctaacccctgcattaaaagttaaaaccttttctttagcggccccaaattcaattaattggtcggcgttttaaaaccaccggacttggaaaaacccggggttccccaaattaataagtctggagaaaaatccccttt

SEQ ID NO: 43538 - DNA, 705 bp, Zea mays
  Clone ID: MRT4577_139712C.1
atggcgggcggcgtgtacgatgtcaacctagtcatgaggctggttagggtgttcgtggcctccgaagaggacacagatgcgccgtcagagaggatgtggaaggtggggcgcctggtcgacaagtacctcgatgaaatctcgcaggaccaggggctgaaggtgtccaagttcctcgccgtcgccgagagcctgccggactcggccagggactgctacgacagcgtgtaccgggtgctggacatctacctcgagatggcatatcccaaaaccgctctacttacaaggatggcaaacatgctcatccaaatgagtcttcagaacccccttactttggctcatcctgagcttaactgtcagacttttgatagacacttatccaatatactaatgccccaacttctcttgaagttaaaaagtcattggatggaggattacaccaatcctgacctttttgtcaaccaaataataattgaggggattatgcagcttgagaaggacctcaaggaacaagttgtgcatggtgcagtggaaaacactttaggggctggttctatcaatttactattagagaatccaataccaaagatggacggcaatgacatgcatgttggcatggcaaaatcgaaatggggggcatacagtgcagtgctgggctgcgtatggtgcttgctatgtgctgatgaaatctggtcgaagccatcctaa

SEQ ID NO: 43539 - DNA, 803 bp, Zea mays
  Clone ID: MRT4577_139713C.1
agcaacagcagaagaagcagcaacagaagcaacagcaattgcaaaaacagccagaacattatattcaagctctgattgcactggaaatagaacttaaaaataaactgtctatacttggtctgatgccatcttcatctttggcagaggtactgaagcaattgaaggacaaagcactaaagagagcggggctgactgaagaaaaattgcaagagcagattgagcagagaaacgttgcaaggaagaataaacagtttgagatatctgatggaatcaggaaaaaccttgctaccaagggcatcgccctgatggatgaaccttctggtacagtgtggagaccatgcgaaccagagggatctgaagagtcatgattatacgccgcacccactcaacaaatgatggtaaaatgagatttttgcctgagggcagctacacattttgaactaacaaaatcaccatctctggatgcagtattcttcactcaggggtagggggtccaggttgactcgccagtcgccagttgaaacttgcatttctggttgtgtaagaagcaatggaccccatatatatactttactccttgcgaggtttgagttttggttttggatataagacttggcaattccatttcaatgaaacagatgaaattttgcttggtaaaaatcgcgtgtgttagtggtttagtttgttgtgcaccggtggtgcttgagatgaagtcattgctttattttaaggtaatgaaaactgttctagcagaatttggttagccccctcgggtcatgaaaatgtcatctttttggatgttg

SEQ ID NO: 43540 - DNA, 396 bp, Zea mays
  Clone ID: MRT4577_139714C.1
ataagctgcgaactgcggagacaggtggctgcgttctccactatctccgagacccaaagcgatcccccctctcccattcttctctcatgtctgaccccgacggcgataccccctttcgacgacactatagagggagtgcatctcgagcccatcggccaggccggtatccgggccgcaaacgagtgatgggagctgtgctgctgcgaccatggcattcaagctgatggttgcatgaccggtgacaacaccattgcatggacgcgatgatgcttccaacaccttgtttagagagactggcggtgggaaccacgacccccgagctgcatttggcgaacttgagaccaatgccatccataaatggaggactgccacgtatcgcctgctcttccttcctga

SEQ ID NO: 43541 - DNA, 797 bp, Zea mays
  unsure (1)..(797): unsure at all n locations
  Clone ID: MRT4577_139715C.1
ttctgaccgggtgagatatccatcgatacttggagtcagagaacacatatttacgggcagtgtgtcactcccttgcatggttcactgtcaaatcaggaaactagtttcgtaacaattggacaacgagtgcttgccaatccgttgagggttcgttttcacttactggtcactcctgatactcttcgatcgccttttccacacttacgaggggtggtgtgagtaaagcatccaaaaattatcaatctcagtgaggacaatatttgcaggattcaattccacaattgcgtgaaggcaatgttactcaccacaagtacatgcaagttggcaagggaagggatgtgggtctcaatcaaatatctctgtttgaggcaaagatagcaaatggcaatggcgaacagacgctgagccgtgacatctaccggctgggtcatcgctttgatttcttcagaatgctatcttgctgctatacaacaattggtttctacttcagtacaatggntattttggtgaacctgagtttttgaactgttcttgtccgttcattggttaacctttctcgcattttctgacttgtttcgttgtttcaccttaacacctctgttatttctgcatgcacttagattacagtgtggactgtatatgttttcctctatgggcggttatatcttgtacttagtggacttgatgaagcgctggctctggaaagaaggtttgtgcacaatgcacctctccaggttgcgcttgcattcgaagtcttttgtgcagctttgggttttttgatggcgctacccatgatg

SEQ ID NO: 43542 - DNA, 2271 bp, Zea mays
  Clone ID: MRT4577_139716C.1
acgagcactctatggagcgtatccatgtggttcatggtgggcacttggctctttgcaccattcctgttcaatccttctggatttgagtggcagaagattgtggatgactggactgattggcacaagtggatcagcaatcgtggaggtattggtgtggcaccagagaaaagctgggagtcatggtgggaaaaagagcaggagccccttcgttactctgggaagcgtggtactattgttgaaatactgcttgcattgcgtttctttatctatcaatatggactcgtgtatcatctgaatataacgaagaagataaccaaggataaccagagtgtgctggtttattgcttctcatgggttgtaattttcgttgttttactcgttatgaagaccgtatcagtggggaggaggaggttcagtgcagagttccagctagtgttccggctgatcaagggtctcatatttataacttttacagccatcgtggtaatcctaatagcaatccctggcatgacggttctggacatctttgtttgcatccttgccttcatgcccactggatggggtttgctcctgattgcccaagctatcaggcctgtgattcaaaagatcgggctgtgggggtcgatcaaggctcttgcccggggctacgagatcctaatggggcttctcctgttcacgcccattgctttccttgcctggttcccgttcgtgtccgagttccagaccaggatgctgttcaaccaggccttcagcagaggtctgcagatctcccgtatcctgggaggacacaagaaagaccgagggacgcggagcaaggagtagtagggctgctgattgaaggtccgtctatcgggagttatgtcgtcctggagcggtctatcaggttcagagaatattagggtccgtatgtatgtatgtgtgtgtcgcacctagcaccagtagtatgtatgtatgtatgcgtatgtaggttcagagaatattagggtccctatgtatatgtatgtatcaggattgctatggtcttttggattggaagatctgagatttgctggtgcaatggccagtatctgacatagaggggctgtaacttacatcttcatcaccgtgtccatgtggttcatggtgggcacttggctctttgcaccattcctgttcaatccttctggatttgagtggcagaagattgtggacgactggaccgattggcacaagtggatcagcaatcgtggaggtatcggtgtagcaccagagaaaagctgggagtcatggtgggaaaaggagcaagagccccttcgatactccgggaagcgcggtactgttgttgaaatactgcttgcgctgcgtttctttatctaccagtacggacttgtgtatcatctgaatataacgaagaagataactaaggacaaccagagtgtgctggtttattgcttctcatgggttgtaatttttgtgattttgctcgttatgaagaccgtatcagtgggcaggagaaggttcagtgcagagttccagctagtgttccggttgatcaagggtctgatatttataacatttacagccatcgtggtaatcctaatagcgatccctggcatgacggtgctggacatatttgtttgcatccttgctttcatgcccactggatggggtttgctgctgattgcccaagcgatccggcctgtgatccacaagactgggctctggggctcgatcaaggctcttgcccggggctacgagatcctgatgggacttctcctgttcacgcccatcgccttcctcgcctggttcccgttcgtgtcggaattccagaccaggatgctgttcaaccaggcgttcagcagaggtctgcagatctcccgtatcctgggaggacacaagaaagaccgagggacccggaacaaagaatagggctgggctgctgctgattcaaggtttgtgtgcgccactagtatttatgtgtgaatgggtgggtagcatatggctcgagagtatctcctgaatggagattgattgatcctgaagagtagaagagactcgagtgatgtaagatgctgcaggcttgttgctttgttacctaggcgttaggcagaacagatgttttcaggatctctggcctgttaaccacatcttcccctgttcagagtgaattaattcctaatggaaactgatttgtgaattacttcctaatagaggagtgcttccaaactgaattcatgtgtgtgctgtgatattgtttagcatatagtattttaaatgtagctttgaattttc

SEQ ID NO: 43543 - DNA, 1206 bp, Zea mays
  Clone ID: MRT4577_139717C.1
ttggatctgtgtatcttggtacgctgcctgatggcagccgcatcgctgtaaagaagctagagggcataggacaagggaagaaagaattccgttctgaggtgaccatcattggcagcatacatcacatccatcttgttaaactccgaggcttttgcgctgaaggagcgcacaggctccttgcatacgagtacatggcaaaggggtctctagatagatggattttccaaaggaacgaggattcctccctgcttgactgggacacgaggtttagcatcgcccttggaacagccaaggggttggcgtacctccaccatgactgtgagtcgaagatcattcactgtgacatcaagcctgagaatgttctccttgacgacaacttcctcgcgaaggtgtcagacttcggcctcgccaagctgatgaccagggagcagagccatgtgttcacgacgctcaagggcactcggggctaccttgcacccgaatggatcaccaactatgccatctcagagaagtgcgacgtgtacagctacgggatggttctcctcgagataattagtgggaggaagagctatgatcctgtggaaggttcggagaaggctcacttcccctcctacgcttttaagaagctggaagaaggtgacctccgcgatatctccgactccaagctaaaatacaagggccaggatagccggattgagatggcaatcaaggtcgccttgtggtgcatccaggaggacttctatcagaggccatccatgtccaaggttgtccagatgctggaaggcgtctgcgacgtgccccagccaccaatgtcttcgcatattggataccggctgtacgcgaatgccttcaaatctagcagcgaagagggcacgtcgtctgggatgtcagactacaatagtgatgccttgctttctgctgtgcggctctccgggcccaggtgatatggttatgtacattgctctgctttagttagcatggcgaatcgatgatgtccaatttttggggaaggccattcgtttgttcgtagtcatgacatatatgttgaaagcttgaggtgtttagttcgaattttctgaaatgccctaaatggggcacaatttcacaccttagaaaagtcagtttgcaatttcacaaaacaccaaaaaaaaatctatctggaagccccggccaggtgtataaacccccccttggaaattgcaaaaa

SEQ ID NO: 43544 - DNA, 557 bp, Zea mays
  unsure (1)..(557): unsure at all n locations
  Clone ID: MRT4577_139719C.1
gggtacccggttccccccnctcggttttttttttttttttttttttttttttttttttttttttttttttttttttttttttttttaaaaaaaataaaaaaattttaacctttaaaaaaaaaagggcctaaaatttgggaaaaggggggaaaccaggcaaattttcccccccttttttttccccggggcccaaaaaaaaaacccctaaaaaaaccaaaagggccaaacccccacaaaaaaaccaccaaaaccaagcccacctttacctaaccccccccttttttggcccaaaaaaaatccaccaaaataaagggccaattaaacccacccgttacccggcaagtttttttcccggtcggcccggtaaccccgaaaccctttttcccctttggaaaggggggccgcgggcttccctccgcccccgaaaagattggggggggaaaatccaacttggggaggaaataattgaaaaatttttttcttaaccggtttaatggttccctgggcccccccaaacccgtttttggggggaaaagggccggcccccgggggggccc

SEQ ID NO: 43545 - DNA, 464 bp, Zea mays
  Clone ID: MRT4577_13971C.1
ggaggaatcgggtttcagccagatcggttggcatcacgggccctttccaaaagttcattgttttcggggggtcgccgggggtaaccaaacctttttcatgggaaacccctattcggggttaaaagaaaaaccgggttaaaagaaaaacccccctaaagcaaccgcaaaatttcgggataccctatttccctggcagttttgggggggccatgagggccggggttcaatccctatgggacccccacaaaatttccccccaaggggcaaatagcaaaaacaacccccccttggtaaacacaccggcccccgaagggaatttcccgctacctccccctggtcttgcggggggcctcccatcccgatcccaaaaagcccagcccccggcccgtaaccttgggggggtcaaaagggagaccccccaatagcccccaacccattccaacggggaaaaaaccccccaaggg

SEQ ID NO: 43546 - DNA, 172 bp, Zea mays
  Clone ID: MRT4577_139720C.1
atcgattatttttttactggaactagaatcgaattggtattgaggtatccaatcacggagtggggttcaccatacaggaatatcgtttgagtttacaccatttggcttgcaagtgggaaacagaggttgctacaatagggttggtgagtcttcgacgtgagttgatcgtggg

SEQ ID NO: 43547 - DNA, 232 bp, Zea mays
  Clone ID: MRT4577_139721C.1
tcggtcgcagcctttatattgttcagttcttagaaggtccaaaaaggcacgcagcgctctatatatatctcagctatacgtacgcgaccattgcgaacgcttatgttgcgtaagaatgtaggcaagaatagatggacgtgcggggtagcacaacacgcctaaactgagaaaacaggtccctaacataacccaatggaagatcaacacgtttgaccctggcttgaacgagggc

SEQ ID NO: 43548 - DNA, 157 bp, Zea mays
  Clone ID: MRT4577_139722C.1
gggggtgtggttcttttcatcagaacccaaaagaataataccgtatacaataaggttggcgagaagacaaaataacgttgaatccacccgcgatggcccaggccaaaaaagtaacctccacaaaagtaccaccctaacaccaactatgtttttttcg

SEQ ID NO: 43549 - DNA, 608 bp, Zea mays
  Clone ID: MRT4577_139723C.1
cacaaacggactcaaacaacctctacaagctgctggtgctcaacatacataagctctactacggctgattcgatatatggtggaaatagaggaaacaaatgcgaagacactcgtgcggagaccggggtgatacaagctcgtaccgactgacatcccgtaagtatgagggtatacggtgagcgcagcatgcaccatgataaaataccgtcttccaccaaaaaccgatccaagtgtaaccatgatgaccgtggaggaaaagacactatgctaccatcaatgatgttgggggaagcaaggaccagactaagaaagtgacaccaagaaggctgaactacctatgttcgactcacaaaagtccgacaagcacgccaatgatcctccaaaacgagtgctttattaacgcccacaagctactggcaagacactacttgcaagagatacgaggagaacgtactgaagctccgatcatcacgggtgaccggaagtgagagagatcagaagtattctgcgcgagagtgctgccatggcaacggaactaagccagatggcctcgacaaagaaagcgagcatcgcattcttctatgaaggctatgctattgctggtgctc

SEQ ID NO: 43550 - DNA, 355 bp, Zea mays
  Clone ID: MRT4577_139724C.1
ccctcgagccggccgtgaaaaattcacaaaaaacccgagagccgcgacgacctttccgtcctaggcttcgattccgccctcctctaacccgcgctttgtttccgccagatattccaacacccgaaatcgcacccgccgacaaggcgatacggcagagagaggactcacgtgtcgccaggctgatcgggcggctgttcactcagaaagagatgaggatcctgacggagggactccagaccgacggaaagaccaccatcctctacgaggtgaagctcagtgagaatgtccccaccatccccagcatgggattcactgataaaactgtggagtagtggaacatcagcttcactgtctg

SEQ ID NO: 43551 - DNA, 824 bp, Zea mays
  unsure (1)..(824): unsure at all n locations
  Clone ID: MRT4577_139725C.1
acgtcgtcactcttccccatcactggctggccatggcttccaccatggctatcgccccgtccctgccctccgacgatcaccctcctccccagaccctctgacggacgaggaggagggatgagcgtgcgttgccggccttccggcctccccttttcgtcgtcaccagcgttgcatcccttcctcccccgtcagatccggcgacgttgagcacgggttgcctccctccaacgccgttgcgacctcccccttctccaccaagaacaccccccacgatgggatctagccggtgacctcgagcttgcccagatgcggccaagatccaccgctagcgcgggcttgggctctcttccttccgatgctcgtgggcaccaggtagcccgcgcgcgcgtgctcttcttccttccggtcctcgtggtcgccacactaggccctccctcagttctccagccagcaaccgatcttccccacctccaccttcctcacaccggagctggccttggcgctccacttcgacgacggccaacctcccccaactagacgcagcgcggtggccacgcacgccacctgctcatcgccgtgtgccccgtcctcgtgcgatacgctgtgtaccttcttcggcccgtctctttctctcctctcctgcaagctctccctcccattgtgatgctctcttccccgcactactaccagccggnaggtggtcgggatccggncgaggaggggctgcgccgttcactccaagcgcgtcggtggctggagctcgacgagtggacgacggcgtcgcaggggagaaaagcccactctccacagcggagcagcagcag

SEQ ID NO: 43552 - DNA, 984 bp, Zea mays
  unsure (1)..(984): unsure at all n locations
  Clone ID: MRT4577_139726C.1
agttgtgcctattcggttgttctctcttgctctccactcgctatatcctctcttgtgtcgagtgtgcgcggaccgtgaagtgaagttgcgtgcggacagtccgacagcttgctgcaccattccctcaacatgtcttcatcacgtggtcttggtggtctacgcaagaaacttgcaggtcgctttaaatccaagcgccctcgaggaaatgatgatgattatgtaccaaccactgattcagaagcccaatcctcagctgggggcactgaatccatggatgcggaagattttcctcatgttcatcctgattatcccattgatatccaaggatggactttcccaaagcggagattttctatgactgagtactgctctcgacggactgtgaatcagtatgctctgccatcagataccaacatccagtttttccacacgcagctgcagtttgatgttttctggggcaccctggtggatactaatttccataagcatcaggtgattgattggtcattcctgctcagtcaatcagtcatggagggtttgatccctaagtttgaggcatgcggactatatcagtttatggggcagcgcacagattttaatgaaatggctgttaagcaattcttggctacctcagagattgatattgcagaagaatccatcacctggatgactggcttcaagcgctactctgcttcttttgctgactttgcagctgccaacagtctgaactatggcaccatttctgctggagtggatctttatactgaagacaattttgaggattttgtgcagttttatgagccagccagacttggtatacccaggagatttggtgagacagcaggactcagacatcatcctgctgtcatcaacaagattgccagagtcaccatccttcccagnagtggtgataagagtaaaatcaggnagaaagtctggaacataattcatcacattatgaatggnagaagtcatgaacattgt

SEQ ID NO: 43553 - DNA, 194 bp, Zea mays
  Clone ID: MRT4577_139727C.1
ttcatcccgtccccgtccgcgccggcggacgcctccttttcgtccgggcgtcagcgtcgcggctccactgaacctgcgtgtcacccgccggaggcaagggccagccgttgttgccattgcctccggttacccccgctttgccgggatcggcttcttcatccggggcattcccgaatttcccaaaccaaggatcc

SEQ ID NO: 43554 - DNA, 1033 bp, Zea mays
  Clone ID: MRT4577_139728C.1
agcatcaaagcaatggacagtccgagcagcctcgcagactgtctgaggtcatcaggacgcggaccgtccgccgcccccgcgcggaccgtccgcgacagggcagaaaaaggaccagagcccgcagacttgccagttgtgcctattcggttgttctctcttgctctccactcgctatatcctctcttgtgtcgagtgtgcgcggaccgtgaagtgaagttgcgtgcggacagtccgacagcttgctgcaccattccctcaacatgtcttcatcacggtatcttcaaatcttgtggatttaatcaaatttcatcaactttgagattatttgggtttcttctctgatctgaaattgagcagtgggtttcaaaatctgattggtgggattgttagttcttctcaatatcaatgctatgcaaaattttcaacttatttggctgggtattatctgcaaaaccatcaaattgaacacttgtggcggctagggttcttggagtcgcccctggtcggtcgcggaccgtccgcctggtggacgcggaccgtccgggcctctggcgcggaccgtccggccccctagcgcggacagtccggaccctggcagagcattacagttccattccttttataaatggtgattggtttcaattattcatctatggatgtttgtcacattgttgcagtggtcttggtggtctacgcaagaaacttgcaggtcgctttaaatccaagcgccctcgaggaaatgatgatgattatgtaccaaccactgattcagaagcccaatcctcagctgggggcactgaatccatggatgcggaagattttcctcatgttcatcctgattatcccattgatatccaaggatggactttcccaaagcggagattttctatgactgagtactgctctcgacggactgtgaatcagtatgctctgccatcagataccaacatccagtttttccacacgcagctgcagtttgatgttttctggggcaccctggtggatactaatttccataagcagaggtattgcc

SEQ ID NO: 43555 - DNA, 698 bp, Zea mays
  Clone ID: MRT4577_139729C.1
cctcgaagccggccgggacatcatctttgagtacactacgccatccgtaccagagacgatgctcacctgcctccgccgtcatgctatattccatctcgcgccaactgcgtcactgaacaattactccgcggtgtctaggggtggacaggtatgcactacgcctcacgcatcgtctggagagcccctcctcccgtcgtgtgcagagggatcgcgcagatacgcaaggcatgacgtctccttcttctgctgattagagaaggaggaatcactcatatgtcaataaggaaacatggcaatcgaagacacaaaagataggatcgcactcacatgcttactagtattctgacgtcaagtactagtgtgagtgtctgtgcactgactcgttcgtactccgccgggaacacctgcaacatggtggttgcctgtgatgcaacctaagtacgtgcaaccgttatggatcactatggacctgagcgctgtgaccacctaaaaccatacaaagtatgaggcaatccctgcatccagcagttatgacggtcatggcattataagtaaggacgatgcacgatgcaattgatatcatagtccactgtgttaatgagaactagcttctgattactccattgtttgagcccgaatgaagatggcctctgccgtgcctgcgaatcatctggcgaaatatatccatcttgacgatg

SEQ ID NO: 43556 - DNA, 148 bp, Zea mays
  Clone ID: MRT4577_13972C.1
gcgacctgtttttttttttttttattaaatagcgcaagcaatcctgatttactggcaaccgcagaaactctagaacacaggctttatgatatatagatgggatcaaatcttatatattgagcgagaatccttcttagatttattacaa

SEQ ID NO: 43557 - DNA, 769 bp, Zea mays
  Clone ID: MRT4577_139730C.1
ctcctgtacgtcctgagtctcctgacctcgccgttctctcttcttccctgccgatccccgctcgcatcacctcgctccagcctccatggcagccatcaccagcaaggacaaggaggaggcggcggcggctccccagccgaagcaaggggagagcaaggtgttctccaggctgttcaccagggagagctccgcggcggcgccgtccttgcgggtgtactacggcgtcgcctcggcgggctccgtgcccttcctgtgggagtcgcagccgggcacgcccaagcacgacgacgccacggccaaggtggccaccctgcagccgccgctcacgccgccgccgtcgtcctactacaccgccaggcagcagcgccggcagacctcctcctcttcctcctccgccacggccgccaccggcaagaacaagaagctgtccaagcattattacaccagcgtcttcagcgccatcctgcccaagatgatcctgcacaggcggtcgtccaggccggcctcgtcgcgctccgcgtcctcccgctcctcctcctcctcctcctcgtggtctgcggcgctcgcctcctcggccgcgtcgtcgctgtcgttccgcagcgcgcggtcgcccgccgcgtgcagctcgtcgtcgaggcggagccgggtgttcgcgttctcggccgcgtgcttcgacggcagcgaggaggaggaggagtagcaggcggcggcgccggactgcgacagcgtgcgggaggaggaggagcaggcgccggcgccgatgtgcttc

SEQ ID NO: 43558 - DNA, 795 bp, Zea mays
  unsure (1)..(795): unsure at all n locations
  Clone ID: MRT4577_139731C.1
cctcgaggccggccgggactgcactacacattgcaatggcagcggctggaggcggggtaggagatggcgagctgcggctgctgggcaagtcgtcgagcccttgggtgttccgggtgagagtggcgctgggactcagggggctgagctacgagtacatagaggaggacctcggcaacaagagcgagctcctgctccggtccaacccggtgcacaagaaggtgccggtcctcatccacggccgcccggtgtgcgagtcgctcgtgatcctccagtacgtcgacgagatctggcggggcaccggccctccgctccttccgtccgacccctacgaccgcgccacggcacggttctgggcggcctacgtcgacgacaagttcttcccggcgttcagcgcgctgttcaggtcgaggacggacgggcagagagcggaggcgctccagaacgccctcctcgtggcggagacgttggagcgggcgttcacggagtgctccagggggaaggcgttcttcggcggcgacgccgtcgggctcgtggacgtcacgctcgggagccacccgatttggatcaaagcggtggaccagacggcgggcaccaaccttccggacggggcaaggttccctgacctggcggcgggngcggagcggttcatggctctcggcgccgtcaacgaggtggtgccggacgccgggaagcttttggagcagtacagggcgtctcgggccaaatggactgcctctgctgattctagctgaactgatgaacacactggacgcctgctgcttgcattggctactt

SEQ ID NO: 43559 - DNA, 963 bp, Zea mays
  Clone ID: MRT4577_139732C.1
aaaaacagactcaccagtgacacagtcatatatatagtatgtagaaattttcttacataatttcacaaagaaaagcataaatatatgtagataagatttaatagatgaaattcacagatatcacaactggacaacagatgtcaagtaataacaccgaagctaattaccagagctaagtgctaacacaccatcctcacaaacgacatcaacccagttgtactaaatgatccttgcactacaaaagccccacattaaacagaaaagatcaggcactcaacccagttggtccgcgcaccactgtaaccgggcatgttgcattgttgactacatagttgctgacactcccaaggagagcccttttcagtggccctaagcccctgcaaccaagcacaaaggagtccaccttgagatcatctaccgcctcacagagtttctcccttgcatcgccccagtaaacctttgctagtacttccacctgcttggacttggatacagctcgcaggatctccagtgtctccttatcagggttgagcccgtacctcgcctgcaggttcatctccatgaactccgacagaggaatcaaaggtgagccggtggtcttccagagctccttgtggctggagtccacgcccttggggaggacgtggacgaggacgaggcggtccccggccttgatcaggttgtcgaccgcccacctcgcggcggccttgctggacggcgagtagtccatgcccatgccaatggtgcgcttctcggctgccatgcctggcggacctgctgcaggtttcttgcggggttctccggtgtacgaaggctgtgaaaaggaaggtggtgccccggccggcaggcggagaggcagctatatatataggggtattcctgggaagagttcgggttctgttctgaggttgtgaaaagatcgtcatgctgaaatgaaatcccggccggcctcgaggtacccaa

SEQ ID NO: 43560 - DNA, 1013 bp, Zea mays
  Clone ID: MRT4577_139733C.1
gggacggatgaatcagcttttaaaaaaaataaacatgtccagcctttttttaacttcggtcagtacctaacccttgtgtgctaacagcctaaaatcatttcacggcacgttcacgctgtatatggcgtgttggttgctgcctgacaggcagctttttatcaaaccaaggcgatcaaaatcctacgcctagccctaatggcaaaatgtggcagcgagtaaaaaagacagccccccacggccccaccccatcagatcgcgggcttcgctctgtcggggccgtccggcctgtacgccgcgatgctcatgggctccacgagcagcgtcagcagctcgtcctggatgcacttgtacatctccccgcacagccgctccacggtcttggtgagcgtgatcgccgtctgcttctgcttcacgatctccgcgtccggagcccccgccaggtcggccgactccgcgagcgacctggacaggtgctctacgtgccgctccagctgctcctgctggtgctcgaacaggttacgcgccacgcccaggttcgcccgctcggccgggcgcgtccgcagctcgtggccgccgaacatgtagtatgcgaacacgtacgaccgcgacagcacctgccgagaaaccagcagccgccggtgcgcccgggtcagccagtcgccgtcgcggatggcgagcgggcgctcgcggtccgactcaagaagccgcacccgctcctcgatggccgccccaagcttctgcttctccacgccgtacgacgagtcgccgtggatcttgaaccggtcgtggtagtgcttgtaccgctgcatctgctgcctgccggtgtgcacggtctctacacagatctcctcctcgtagcggttgcagctgtggccggtaatgctgttccacgtgtgatcttggccggtacctccgccgcagagccaacacatacactgtccgcacttgcagcggacaaggttgcagccgccgttcttctcgatggccttgaagcatttgcccggccggcctcg

SEQ ID NO: 43561 - DNA, 548 bp, Zea mays
  Clone ID: MRT4577_139734C.1
aaaagcacagaattttttttatcaccacgggcccactgttttgcttgcgggagggacagtcccaggaccgaaaaaacaccctcccgtacaggtgggcattggggttttttacaatcacaaaaaaaccccagggggccggtaaaaaaggccccagggccccagggggggttatcactcctgcccaaaaagcgggaggagcttgctttcgaatccccgggaggggccccccggaacggcccgttcaaggggaacgctgttccttttgggggacccctccttaataagtttaaggcccacctaaggggggggggggaaaacccggggaagggagttttaattggggcctacccccgttttggccggcctaaccaccttttaaaagtcccggggggggcaactgaacccccggttgatcccccccagggttctgaggaacccgcccggggggcaacccttaaaatccttggggtttggggggccaaaggcctctttggaaggatggaagggaccaaccagcggaggtttgctcctaggggggaggattcgga

SEQ ID NO: 43562 - DNA, 1409 bp, Zea mays
  Clone ID: MRT4577_139735C.1
attgggacctcgagccggccgggactcgcattctcactgtcaccttgatactacaatggctgggctagccggcgtggtgtgcctcctcctcgctgccagctctgtcaccgccgcggcggcggcagcggccgaggaggagtccctgtcctcctacatcgtgcacgtcgcggcggagcacgcgccacggtcgacacgcccgcgcttgctctcccgctcatacacctctttcctgcacgacagcctgccggcgcacctgctgcgcccggcgccgctggtgttctacgggtacgcgcacgccgcgactggcttcgcggcgcggctcacggagcgccaggccgcgcacctcgcgtcccagcactccgtcctcgccgtcgtccccgacgagacgctgcagccgcacaccacgctgacgccgtccttcctcggcctctccccgtcgtcggggctcctcccgaggtccaacggcgccgcggacgtcgtcattggcgtcatcgacagcggcatctaccccatggaccgcccgtccttcgccgcagacgcgtcgctgccgccaccgccaagcaagttccgtggcacctgcgtctccacgccgtctttcaacggctccgcgtactgcaacaacaagctcgtcggcgccaggttcttccaccagggcatgcagcagcgcatgggcgtggccgcctttagtgaggcgggggagtccttgtcgccgctggacacccaaggccacggttcgcacaccgcctctaccgctgccggctccggccggggtggacgcttccttcttcaactacgccaagggcaagggccatcggcgtggccccgggcgcgcgcattgccgcctacaaggcatgctgggaacacgggtgctctgattccgacatcctcatggcgtttgaggcggccatcactgacggggtcgatgtcatctccgtctcgctcggcgcctcaaagcccaagccgagaaagttctacaaagatggcattgccgtcggttcgttcaaagccgtgcgcaacggcatcaccgtctctgtatcttcgggaaacttcggcccaggagagttcaccaccgtcaacgtcgcgccctggttcttgacggttggcgcgtcaaccataaaccgcaggttcccagcgagcgtcgtcctcggcaacggcgagacattcaccggcacttcgatctacgccggcgcgccgcttggcaaagccaagataccgctagtatacggcaaggacgtgggctcgcaagtctgcgaagccggcaagctcaatgctagcttggtcgccgggaaaattgtggtgtgcgaccccggcgtgaatggccgagcagcgaaaggcgagaccgtcaaacaagccggtggcgccggagcaatcctcgtgagcgacgaatccttcggcgagcaggccctgac

SEQ ID NO: 43563 - DNA, 399 bp, Zea mays
  Clone ID: MRT4577_139736C.1
gaagcatgatctgatcaccgtaacgcaaacgctgacacccgatgaggtcctctttcgagcaggtccatcagagatgactgcatactctcattactgtggatcactactattcgaacattaaccagagtactcgcatcagaccagtctcttacgtgacttatttatccgctaggggtaccaactagatcatgtatgtgactgcaccattatgaaatatcctcaacttagagatgaattctgacttcactctagctacaatatgaatcggtttgcaatccctcatgcagaaaggactgatcgatctgcatctcaagctttgttcagaacgactggatctggatctggtcacaatcgagagcactccaagcacaccagtcttctggagtcactgatgccatc

SEQ ID NO: 43564 - DNA, 695 bp, Zea mays
  unsure (1)..(695): unsure at all n locations
  Clone ID: MRT4577_139737C.1
gccaactgaattcgggatgttttacaatattctcttttgatattcctctatcaactcatttaggttgaaaaatcttttgaaggccccctcgtaactatacgaaatcaatctgctatctttttcttttcctttaattattgagctaacgtaacactgcgtgtcggtaaaaagaaaaggaaagaaaaaaaaagtacgtagtactgatccatcagttgtgcccctgcccggtgagcgcggcgtaaaagaggacgttccaggtgtcggggaggccggcgacgcaccagtgcgtgcagtcgccgccgaagatgccgccgtcgtacttggtggggtgcgcgtccttgcgcagctgcgagaggtaggtgaagtcgagcaggtagactggcttggccatggccgccagcacgccgcgcaggatcgcctgctgcgggatcgggccgcccgggtagggccccgtggcgttgagcggccgcgtctcccccatgcacgtcttcttcggcgaggcgccccagtcctggcccctgtagtgggaaggcgagatcccctggaagaagaccttggtgtcggtctggacaaggttggcgtcgacccacctggcccaggtgtgcagcgccttggcgaaggcctgcgtgcggtccatgtccttcaccagcgtgtcgnccacctgcatgtaatcccagggctgcgtggcgccggtg

SEQ ID NO: 43565 - DNA, 706 bp, Zea mays
  Clone ID: MRT4577_139738C.1
attgtgacagaagaggagttggagtccccgccctctgcgaccggttaacccacatcacttcccctgccgcctcgccgacggtcgccggccgccggccgccgactcggacgaaccgaccggaccaaaggaagaacacgaggcggggtctctccgcgtcgcgcccacatggacatactcgagaaaattcgcggaggcggcgacgaaccggccgcgatggagacgccccggaggacggagtcgtgggtggagatttcagagtccgactcgcggatctgcagcttcgacgccggcgggggcggcgtggtatctgtaaaacttatccaggataacaggatggtacatgataagatagttgattctttcttgaacaagtattttccatctgatgtatccatacagagtgaatgacggttacctgacatataccaaattccgagcactccagcatttttctagagctatgctgcatgtgctatcgacccagtctttattatttgctgcaaggctacgaactacccctgcgcaagcaacggctgcaagttggattgtagaagatggaatgcagtgacgcactgaaaggtcatctgtagcgacatgagggcaagaatggattcaaaggcagagagttggaggatatttgctgatgatcactatgattttggtactgccttggacttcatttcaccactgtgtacacaagtttttc

SEQ ID NO: 43566 - DNA, 163 bp, Zea mays
  Clone ID: MRT4577_139739C.1
ttccacgcgttcgcccacgcgtccgtccacgcgtccggcttgaccctttcagtttagcagctaatagccagttctgctgtaatatctgtttatcatagaagtagatgttaggtaggaccagacagctggcttgtgtaggtgtgtccttccatcagattttttt

SEQ ID NO: 43567 - DNA, 270 bp, Zea mays
  Clone ID: MRT4577_13973C.1
tttctatttttaaatatatttaaggcgtcgcctcgccttacgctttacagcttaaaaggtaaaaagggggtcagtcgccttacctcgccttaccgccttaacaactatagatctggataaggctccaagggggatgcgcgtcctggacattaggtccaacttgaattgtcattaacagttctgatgggagaatttagaccgcttccttttctttactccacaggtgtcatcattgaatatattggacacagagagtattgatttacaaat

SEQ ID NO: 43568 - DNA, 225 bp, Zea mays
  Clone ID: MRT4577_139740C.1
aaattcattgaggtagttccttctattttttttctaatttttgatgcctgataagaaacacccaaaacaaaggggcacagggggaagggtcagctgatcctaacaaactgaacaaacaccgcagacagcactagcccccgcgacaccaacaacggcacgaaccggacaaacccacagccaggactaattattgtcacgaattgcctccaaacccaaccccccaca

SEQ ID NO: 43569 - DNA, 1615 bp, Zea mays
  Clone ID: MRT4577_139741C.1
tatgcttacttccatcctaatgttgaaagatggatggagaagctggaagaatctgagactaaggttggctttctatggtatgaacatatatacaagctagacaaagaagccccgtgcaggtccgctcaggcttcttatgtttcagattctcctgcaaccgtttggtgttgtttttggctgtgttagaagctcttgtccaggataaacgatgctccataaattatgaagcagatgcccccgccacctaaggatttggagattgctatagttcggagctcgagctgcccttcgatcgaaccaagaacaaccctgctgccctcacaacatcaaagtttggtatcagcaagatggagcttctcaaggcatgcttttgtagggagtgactgctgatgtagaggaactcatggatgaagatcattgatccctttcatgtcatggtctattcaaaaggaaaatccacttctgagattaacagttgaggcccacgcgtccgccagtattggtgtgattatacttctggagtgcctcacaaatgcgaagcaactccttgatgtgctatctattgcagacaatcatctagggagttctgtggcagctgcattggccagattcttgggttcacatgtacgggctttaaatgctacagatatcggcttgggaacagtaggcttccaaatacttgaggaaacattgccaacagaagtagctctttcccacatcaacatcagtaagaatcgtggtgggatcagagcagcatattttgtttccagattaatatgtcgagcaccagaccttgtctcagtcaatgcagcagggaaccttttaccacctgaatcattggaagtcatctgtaactccttgaagcaagggacttgtaatttggagcgagtggacctgactggcaacatgcatttatcaagcaatatttttcctgcattccttgaattcaagaagcatggaaagccaattctggtagtaccaccaaacttgagcacttctgctccatatgatgatgacccatgactactatgtaccgtataagccctagtgctgctcaagtcacttcagttggaactaaataaatagtgatagtatttttttggatcattcccaagaatcctaaccactagatcaaaacacaacacaaattgtacatctgtttagattcgacacggctttcgtcggtgaagctttgcgctagggcagcgacggtcgggaaagcgagcttgatgtcgacggtggactttctgttgctgacagacttccctctagatcggttaaggtttgaggtggagatcgaaaatgattgtgaatcttgtacctttaggtgtcggcctccacctctttatttatagggctacgcaacagatgctcaacaaccttgatgctctcgatcagggcgtgaggtcaggggtctagttttcggttgggtcaagttgggtcaactagtggagatcaattctaacattttcccctttaatctcattttataccttcagctttatacctttaatttttttgatattccattatagataagtgcatagagcatgtttcatcgtcacgattaatcaccgatagacttaccaaaaaaaaaaaaaaaaaatttgcggcc

SEQ ID NO: 43570 - DNA, 618 bp, Zea mays
  Clone ID: MRT4577_139742C.1
gtttgttttttttcaaggatttgtatccaaaccaacaggatttttgtgattcgcaaggggtaaatgcgggacaagaactaatgttaaaatgtcattacagtgcaagactcgagctgggtggaaacaaatttctctgttccacatcttacaggggggggggggggatcaaccttattccgaacagcctcgaaatgatctcagaatgggccacaaaggatgattaaactcaggaccctacatggtgtcacgatgctgccaaatggatatactccatgaccattcacgcatatatactcctactgtgtaaacaccactattctccattggctgaccaatgaatggatatggcaattggaagttctttatttcctctgggttaaaccatccataatcaaacaggtgggtaaatttttcttccaatttttagttttcaagaacttgtgccatattaagttcagttgaaaacagaggctgaaataaagaacataaatgccacattcatgaccattttgctgtggcactttgggaaactcgaggcagattatgtttatgaactgctagctttcttgccgctcctgagcctgtgcaatgccaataatgaattttctgattgctgat

SEQ ID NO: 43571 - DNA, 404 bp, Zea mays
  Clone ID: MRT4577_139743C.1
actcgaggaccgtatagcaccgcttgggccgcccattatctctagatatggcatcgttcgggctatcagtacaatgaatccatccggacctaggcgcgcttcaactctgcagaatacaagcgtggttgcattatagggaaaagcgcgagtgatccccatgaggagaggcttgggaggttactggaagcgagaggatgaggacctactgcagtagtacaaagctgaacgagggcttgatgacgatgagtaggccagcgaggggctgctgacagctgcattaagggggcggtggcagcaaatgcgggccgagagcgaggagagcaacaaaccaggattgcaaggaacggagggggaacggacgaatgcaggaggagcatttggttgggggctgcatccgcccccgc

SEQ ID NO: 43572 - DNA, 264 bp, Zea mays
  Clone ID: MRT4577_139744C.1
ctcgcatctacctctagcacattgtacgagggaaaggttcagaggtagtacaatgggtatgtgccactcatcaaagaagtcggcggttaaacctctttttcttttgggggttgggggaagattcattttgagatgaaaataattcctttgcagaagatacatacaaatttggactgggaattttagcagtctaaccagatacatctggatagatattgtaaaagagatacagctggatcaatgagcattctttctttcacattt

SEQ ID NO: 43573 - DNA, 383 bp, Zea mays
  Clone ID: MRT4577_139745C.1
aaactaaagtagactcagtgctcaatgacaatcctggagagcatcctaaagagatatatgcaatgaaggcagctgttaacataccttctcaggatttctcctgcggtgccatatctagtgaagatccaacacaagggccagcagatcatgtgaacagtaaagatgcacctatagtgaactgtggtaaagttcatgtatcgagggagagtaatgatgatgagcagtcgaatggtttacaatccagggacaccagcattattaattccaatgtgtcaagaagaccgtcgggccaatttaactcccagaatgaggttcttgaggaaagtgtttcgcttaatgaaggaagtcaagacaaccaaagttttagtggcgctcctaagaag

SEQ ID NO: 43574 - DNA, 166 bp, Zea mays
  Clone ID: MRT4577_139746C.1
ttacatcccccaccatcccttttattattcccattaataactacaaaattttctttctaattactaacttttccaaaactaatataccatatcatatcacttctcccttatatcctatcatatacaataatcaaacattcaaatcctatttaatccaccttttaac

SEQ ID NO: 43575 - DNA, 454 bp, Zea mays
  Clone ID: MRT4577_139747C.1
ttttcggcacgaggagctctgacaacagaactgccaacagctcattccacagtacctaaagctagaccaccggcgatggtgttcatcatctcctgcttcccgctttgcccgacgtgctagacaacacctggaatgcacccctttatgcctacgtagatctcaagacgcagaccgtgctggggtcgtacaaaaacattttttcctggtcattgattgaccctatccatgagattctcagtcttggcgcaaccttactcaccttatgataatgcccgttgcttaccttaacagaggctaactattttaagctaaataacggtagtgattctgaactattgtgtcataaatgcaactaccattatgtccatcattgaacatatgaactgaagctttatttggaatgcggaaaaccattatattcagttctgcactttattaaaaaaacatctactca

SEQ ID NO: 43576 - DNA, 708 bp, Zea mays
  Clone ID: MRT4577_139748C.1
cctcgaggccggccgggccgggacaccgcgctcccgctcggccgctcctgcctgcgcgctgcagcagttcggctgctcgcggtcgcttgtcccgtgcgcccggcggccggctgcttgccccgccgacctattcggctgcttcctgcttgagtgcttgtcccatccggcggcccggctgcttctgcttgtgagtttgtcccgcgcttgcacggctgcttgtcccgctctgcacttgatttccaccgcgataaaggtgttctatgaaccacctgcagaactactgaaggactcagaggttctgggcaagcatgtttgttgcgttgggtgcttgtgcatttgttctgattccagtataatatttcctattcggattagctgctgggaagcttctggagcgcgtacgatcacttgattttcaaaacgatcaaagtttaatttgttctctaagtttgatgtggataagcttgcccgactcgcggatatatatcctgatgatttttcttttaatgattgcaagactataaaagattagataagaacttttattattcatgtacgaagaattgaagagtacaaagcttattgtgatcttgctacaaattgttttaaactatgtcataattttttttaaactgtgacataatttttttttcttcgtggatcagcaacactttaaattatttggcggacctccgccaatgaggacga

SEQ ID NO: 43577 - DNA, 193 bp, Zea mays
  Clone ID: MRT4577_139749C.1
gtctgggacaccatggctccgatgaagctgtccgaggcggtgatgtcgtgggtcgtgccgacgtgcgcaacggagatgtaagagaggctagctcagactacgcaatcgtgcccatctacttactcaccgcagagtcactgagccccgagctcctcgtcgggtacccgattggtcaggttcctgctctgcaaga

SEQ ID NO: 43578 - DNA, 347 bp, Zea mays
  Clone ID: MRT4577_13974C.1
tcgctgcactgtttctgatggaatatgaactgaaaatgaaagagaagggtgagcaactgattgtgttcaggtgaggtttactgatatactatgctttgattctatattcagccaatatgtttttttccttgtagccatcttgcttatgcagacagtctccctaggttgaaaaaaacataaaatattaaaaaaatgcaagtctggatttctgaaatcaaaataccctttcggttcttaacaataagattggtatgtatccctaagctgtcttttctttatgcttccctaacctttgaccagagccacattaagccttcttgcacaacagaaaaaaattccagtttgac

SEQ ID NO: 43579 - DNA, 643 bp, Zea mays
  Clone ID: MRT4577_139750C.1
gtgcaggcgctcgatgccggccgttccgacatctgcgcctctacattgcgtctctctctgctcctccgcctccgcctgatccatccgagacaggaatcgccatgacggactctcgaggagcaccacttcagaatcgaaggccgacgctgcccgaggcacgacctacccgcagaacgatggcaccgcccggaataacggattcctcgacatcaataaccgaccctgccaagctgtggaggggtccacctcacccactgccacccatggcgcacgccaaatgccactttgccctgatagacatattccatgggaaagagcgtgaaaatattgttccttcctcacatcaactgtgacagttccgcatgcgaactctgtcactgagtatcagatgattgatatattctgacgatggatttgcgacccttcttacttcaaatgtgaacgctaaaggtgatctgaaactcccaactgatgagactcttgcgggccagattaatgaaaggtccgatcagctgtatatgatcttgttgcgactgcccagactgccctgatagatgagcagatctgaccgatataggatggagtgcccaaccaacttccttggatatgcagacattaccctactggatctccacttacatcg

SEQ ID NO: 43580 - DNA, 2102 bp, Zea mays
  Clone ID: MRT4577_139751C.1
gagtgacactcagcaaacgagccgtctgcctgtctcttctgtcttctcccaatcctgtccatttcaattcaagcacgcacccgaggagaagcgccccgttgaacagaagcaaccaacccaggccaacccgaaccccagaccaaactgcccccttccgcctcgccgccggcgatcgcctgagatgtcgtggctcgcccgctctctcgccacatccctcaacatccccgacaactccggcgctgacgatgacccggatgcctcccacaccccttctccctccgcgcgcatcccgccgtcgccgccgctacccactcaccctccgcattcgggcgcggcggagggcgtcaaggaggaccttaccgagctctccaaaaccctaacgcgccagttctggggcgtcgccaacttcctcgcgccaccgcccggggagacgttgccgtcaccctcgcactctccccaatcagcggggggtcaatccgccgatgcgaggacaccacccgagatcgccgggatccggaacgacttcgctgagatcggtgggaggttcagaagcgggatctcccggatctcaggtcacaaggccgtctctgggttctctaagatggcctctagtttcttcgctcctgatgacggcgaggaggacgagtgggaagaggagcggagacgacagattaggcatgagatgggagaggaggcggtatggcacgaggaggcggagggcgacgaggagtggcatcagtgggaggagagggtaagacttagggtggaggatggcgatacaaggcatgagttggagatggagagagcgagggatgaagaagatgacgaattggaagagcagagagcgaggcatggggatggtggcgaatcaggggagcagacaacaaggcctggtgaggatggcgaactggaggagctgaggataaggcatgaggaggaagtggaggaggaatgggatgtgattggaatcactgaggaggttcttgcattcgccacaaacattgccaggcacccggagacctggctcgatttcccgttgctgcctgatgatgatgagtctgatggaccattctcatattttgatatgtccgatgctcaacaagaacactccttggctattgagcatcttgctcccagattagcggctttgcggattgaactatgcccaatacatatgagtcaagaatgtttttggaaaatttactttgttcttctacatcctagactgaacaaacatgatgctgagcttctatctaccccacagatcgtggaagctagagcaatgcttatgcaacgtttgcaataccagtccaaacttgaaactgagcatctaggtcatcataaggatgaccttggagttcaattacgaggagacaccttgaaagatgctacagaagcattcccattcacgcgatgggaagcagcttctgttatgcccataacagaaattgagattgagaagcatcctatccaagtaactgaagttgcagttgtggacaaatcggtcatcgaagaggagctgcccaagggtcatgctgagacctcaaatgttttgcaagaggcctttgatgatgacatagacgattggttcgaggaggctgatcttgctggccacccaactatccacataggtgacgaggaagacgtgtcttttagtgacttggaagaggatgacgtgaaatgatttatagttgcaattgcaatttgcaaagggagaaatcgacctgtgtattggaaactggacacctctgctgtaaaagaaaatggaggtgaaagttgttcgtagacacctctgctgtgcaagaaaatggagaggtgaaagtttttcgtgaatgggattgggtgtacattgaaaactgagcggtgttgttcgcgaaaagggtgtacattgaaaactgagcggctttgttttgcactcaagctgctagggtgaacgcaatgtgatccactcaagatatgatggggtgctacattttactagctttacagtttgtaatttgattcatactcttgtgtacataagcattcgtgatgttctaaggtcagacaataaagttccatgtgttacaataaaatttttaaaataattggcccctagggcc

SEQ ID NO: 43581 - DNA, 629 bp, Zea mays
  Clone ID: MRT4577_139752C.1
cttccccccccccccccccccccccccccccccccccccccccccccccccccccccccccccctctcaacggggaaaaaaatcacaaaaaaaaaatatcctggggggttttaaactttgcccggggggttttttcccccttttaattaaaaatgaaaacccctttcccttgggaagggcccccttggagggagggaaaaaaatttttcccccttttcattatggaaaacccttttaattttggttaaaaaaatttaacccccccttttttttgctaaaaaaaaacaacccgggtaaatttgggaacctttgcccccccttgacctttgaaaggtggaaaccctttttaaaaatttgggggagggcaaaaaacatgccctttgggttgggtccctaaaaaaaaaggttggggggggtacccctttaatttccacaaaccccaattttaaatttttaaaaaatggtttttatttgggccttccttgggggctttaaaaacatggactttttttggttttaagacccgaactcaaaagccgttacatttttgccttttggggaaaaactttaaaaaaaaaaaaaaccatccttgaacggttaaattacgggggggggggtggactttttaa

SEQ ID NO: 43582 - DNA, 571 bp, Zea mays
  Clone ID: MRT4577_139753C.1
gcgtttgcagcactcgtttccgagaagaggctgtgctggccacggctctgatggcactagccgggggatcctgcacatggtgcggctggggcggaatagccatctactggggccagagctgctactaggggacactggcacaaacctgcgcaatgaggaactacacgatcatcaacgggggctagctcccaactttcaggaaagggcagaccccgcctctgaacctggcgggtcactgccacccatggagcggtgacagcacagtcttgtgctcagacgtctaagggtactagcgcatgtgtgtgaaggtgctgctgtgcatcggacggggcgtcggaagttactggctctgattccgggccgaccccctgagcgtcgcggtgtacactgtgggacaactacataagcgggcgttccgagtccatgcccctgggggacgccgtccttgacggcgtcgacttatacatcgagagcggtggagtcatgtactgtgacgacctgtcacggtttctcaagtcctactatctatgcggacgcatgcgaaggcccgtgtacctgtcggcggcgccgc

SEQ ID NO: 43583 - DNA, 388 bp, Zea mays
  Clone ID: MRT4577_139754C.1
accccatggtgaccgttctttatttttgaaaccccacccaattccaaaaaaaaaacccccaaaagatttcgaaaactaccgacaacggcgaacggaaagcccactgcccccgggggtaaagggcttccgcacacaaaaaatccaaaaaaccggcccccatgggggggaaggcacatcccccttaaagagacaaaggcccaatgggcccccaaaaaaaaagggtgggcaggccccaagaaacaggcgggcctcccccatcgggggcccccagctgggttaattttgaaagaacaaaaagcctggtcagaaaagaaaccccgaggggccccaccggtatcccaaaaaagctctgggtcaccaaaccgaaaggggggaaaaacccccccgg

SEQ ID NO: 43584 - DNA, 510 bp, Zea mays
  Clone ID: MRT4577_139755C.1
cgggctgagcatccgagactgaggacgattgaggatttaggcacagacgtctctcgcaccctataaccgtggccttcgactctgctactcatcgcgggccctgcgagaccggccaacaggaccacgggcgcatataggataccccacgggcgcgcgatggaatctatcactcaacgcgcgggagtgcatgtgctcagcactaaggaaattctgtgaggggggagctgggaacttgatcaataataccttgtgaggcaatatgacatgactaggtctactatcataaggatatgaagcaagtaccaggggcaccagtgatcgattgccagatgagatgaacgggatgagtataagggacgaaaaggaagtggaagccgttgttgataatggccatgggatggacgctggccatactattgtgacaaatgctggcggaagaaatccacaggagaggcaaactataagtgaggtggtagaccgcatagcggggcaaggatcattaggagaagc

SEQ ID NO: 43585 - DNA, 778 bp, Zea mays
  Clone ID: MRT4577_139756C.1
gccggccggttcgagcccttttattcattcattgacaatgagcaaagttagtgcttctgccgtcagagacattgtgaacgccatccaagccggtgctcaagaaaagcaacgtaagtttgtccaaactgttgaactccaaattggtttgaagaactacgatccccaacgtgataagcgtttctctggtaccaccaagctccctcacgttgcccgtccccgtatgaccgtctgtgttctcggtgatgccttccactgtgaccaagccaagggtgctggtatggaattccaatctgttgatgacttgaagaagctcaacaagaacaagaagctcatcaagaagcttgccaagaagtacgatgctttccttgcctctgaagctttgatcaagcaaatccctcgtcttttgggtcctggtctccacaaggtcggtaagttccctactcccgtctctcacaacgactccttgaccgataaggccaacgaaatccgtgctaccatcaagttccaattgaagaaggttctctgtcttggtgtcgctgtcggtcacctcgacatgactgaagatcaattggttgccaacatcatgttgtccgtcaacttcctcgtctccttgttgaagaagaactggcaaaacgtcaagtctttgtacttgaagtccaccatgggtaagcctcaccgtttgttctaaggcactttcttttttaaaaaataaatgattgtaccatattgaataataaaaaagtttgattttccgaaaaaaaaaaaaaaaaggccccta

SEQ ID NO: 43586 - DNA, 706 bp, Zea mays
  Clone ID: MRT4577_139757C.1
gccggccaggccgggcctcttttctatctgtatctaatatgagcaaggttagcgcttctgccgtcagagagattgtcaaccaaatccaaactgcctctgctgaaaagcaacgcaagttcactgaaactgttgaactccaaattggtttgaagaactacgatccccaacgtgataagcgtttctctggtaccatcaagcttcccaacgtcgctcgtccccgtatgaccgtctgtgttctcggtgatgctttccactgtgatcaagccaagggtgctggtatggaattccaatccgttgatgatcttaagaagctcaacaagaacaagaagctcatcaagaagctcgccaagaagtacgatgctttccttgcttccgaagctttgatcaagcaaattcctcgtctcttgggtcctggtctccacaaggtcggtaagttccctactcccgtctcccacaacgattccttgaccgataaggccaacgaactccgtgccaccatcaagttccaattgaagaaggttctctgtctcggtgttgctgtcggtcacgtcggtatgactgaagatcaattgattgccaacatcatgttgtctgtcaacttcctcgttttccttgttgaagaagcactggcaaaacgtcaagtctttgtacttgaagtcttccatgggtaagcctcaccgtctcttctaaagtgtcgacttttttt

SEQ ID NO: 43587 - DNA, 1224 bp, Zea mays
  Clone ID: MRT4577_139758C.1
aaaaaaaacatactcccttccgggctttttagttggcgctggatattgcaaaattaaactattcagcgacaactaaaaagaaccagagggagtatataatatgatatagccaagaacatgttacatgtaagcggcgacagaaacaagccatacatacacggccaatcataagaaactggaaatagcagatgcaaccctggtagtgtcatgcaaggatgggtacattactgtcctctccgtactaacattgtgtttaaaacattgaaacacgcccgtgaatagaagttctacactaagtaataacctaactactatcaatccagacagaacagagcaatccgaccaaaccaccgacttcatgctcacctaacagtgacaatgtcatcaatcttcaagatcatcctgacacactcgcaggccagcgtaatggcacttgtgctcaccagcaaaggctgcacgacattctcctccaagatgtttgtgatctgccctttcctcacattgatgccagtgttcttctcacctctggcgtggcgattcctgagttcggtgacaatggagattgggttgagcccagcattctcagccagtgtgtaagggatgacctcaagtgcgtcagcaaactccttaatgcagtaactctccatccctcgaagctcctttgcccaagcagccagctgcattgacatctctatttctggagcaccaccaccagcaatcaaaaacctcttgttgaccaagcaccttatgacacagagggcatcatggagactgcgttcagcttcatcaataaccaactggttcgagcccctgacaactacagtggcggtcctacccatgtccctgataccagtgatcttcacaaccttgccctccccaacagagacttcctcaacaacatctgcatacccaagcttatccgtgcggaagtgctcaatgttggcaataggaagacagtttagggtcttggtgatgaactccatctcatccctctccacgtccttcaccaccagaatctttgctttagcaagatagtgcagagacaagtcagtgaccgcgtcgcgcaagatgctcttctgaatgagcaaaacattgcacccagcagctttgatcttcttgaccatcccgaggatataattgcgctcctcacgtagtatgcggtccatctgtgcatagtccgatacaaagacactctgctcaatgtcagtcgtaggtggtgagccc

SEQ ID NO: 43588 - DNA, 2148 bp, Zea mays
  Clone ID: MRT4577_139759C.1
ttttttttttttttttttttttttttttctcaaaaagaaaatatataagctgaatagctgataaagccaagaacagattacaacacaaccggctcaaaaaaatcccatgggcgtaagcggccgaccgaaacgaaggcatacacggccaatgtaaagaaaatagagatcgcagatgcaaccctggtagtagtttcatgtcaaggatagtactaacatcaaaaccaagtgtagaaacacgcccatgaaccaagttttacattaagcagtaacctaactaataatcaatccagacagaacagagcaggctgacatgaccccaacttcacgctcttacctaacagtgacaatgtcatcaatcttcaagatcattctgacacactcgcaggctaacgtaatggcacttgtgctcaccagcaacggctgcacgacattctcctccaggatgtttgtgatctgccctttcctcacattgatgccagtgttcttctcacctctggcatggcgattcctgagttcggtgacaatggagattgggttgagcccagcattctcagccaatgtgtaagggatgacctcaagcgcctcagcaaactccttgatgcagtaactctccatccctcgaagctcctttgcccaagcagccagctgcattgacatctctatttctggagcaccaccaccagcaatcaaaaatctcttgctgaccaagcaccttatgacacagagtgcatcatggagactgcgttcagcttcatcaataaccaattggttagatcccctgacaagtacagttgcggtcctacccatgtccttgattccagtgatcttcacaaccttgccctctccaacagagacttcctcaacaacatctgcatacccaaacttatccgtgcggaagtgctcaatgttggcaatgggaaggcagtttagggtcttggtgatgaactccatctcatccctctccacgtccttcaccaccagaatctttgccttagcaagatagtgcagagacaagtcagtgactgcatcacgcaagatgctcttctgaatgagcaaaacattgcatccagccgccttgatctttttgaccatcccaaggatataattgcgctcctcacgtaggatgcggtccatctgtgcgtagtcggatacaatgacactctgctcaatgtcagtcttaggtggtgagatttggaactgtatgacagcgatcttagcattctctacccgagttggccccccagcagcatggctagccttcttgtcaaaaatgaggccagggacaagctcagtatcgtccacggtgccaccaagcttcttgacgatgcggatgtcacggagatcgagaaggtcagggtgagcgggatccaccacggagagggcggcgtcgacggcgaggggcgagagaagggtggagtactgggagacgaccttagagttgagagcagtggacgcggacttcacgagggattcccggtcagatagctcaatggggatggccatgccgtggaggatctcaacagcgcgtgtcgcgaggcggtggagggcgtcggcggcggcggttgggtgggccccggcggagaggagcgactgggcgcggcggaggagggatccagcgaggacgacaacagtcgtggtgccgtccccagcggcggcgtcctgggagcgggatagctcggcgagcatgcgcgcggcgggctggaggagcgccatgcgggagaggatggtggcaccgtcgttggtgatgatgacctcctgcgcctggtcgcccgaagcgatcatcttatccatgccacgggggcccagcgaggtgcgcacggcgtcagcgacggcgcgcgcagcggcgatgttggcgccgcgcacgtcatcgcggcgcttggtgtcggtgtaggtctccgtcttgcgggatggcgcgggggcggcgacggcggcggccatggatcgaagggaaaggagatttgcgagggcggtgctgtttagggcttggtcaggactcagatcacgctggaggctggagtaggcggcggcgcgagggttcgggaagggaaatggagacttggagagagctacgctacgcctaggcgcctagctcgctggggcttatcctaatcgtctcctccggccggtttttttttttttttttttccc

SEQ ID NO: 43589 - DNA, 294 bp, Zea mays
  unsure (1)..(294): unsure at all n locations
  Clone ID: MRT4577_13975C.1
ccgcccanaaaaacctaaccgcccaccacccatacccagcccccgccttatcctcctccaccgccgccgcccccgccccccaactactcgacctcacctccacccttatcgccgcccgcccccaggatctagatctgagcctgccgagaccgaggccgtgggtagacagggatacgatggccgatgagccttcaccgccgtcggtagcgaggaagagcgcgccggcgcatacctgggtgagcgtggagaccacgcgcgtgttgtgcgcgtgcaaggagcgctggacggcgctgc

SEQ ID NO: 43590 - DNA, 656 bp, Zea mays
  unsure (1)..(656): unsure at all n locations
  Clone ID: MRT4577_139760C.1
gancgggcgtaccagcctaccgatgtgttcagcatgagggagagtttgtcctaacgttccctcgggcataccatgctggtttcaactgtggcttcaattgtgcagaagctgttaatgtggcaccaattgattgggtaccaattggacaggatgcagtcgagctttatcgtaagcaagctcggaaaattactgtttcccatgataagctgttgctaggggctgcaagagaagcaataagagctcattgggatattctgttccttaagaaaaatactgctgataacttgaggtggaaaagcatgtgtggacttgacagcactatatgcaaatcgcttaaggcaagaatcgatttggagttggcgcaaagacaaaatatatgctctccatctcaatctagaaaaatggatgctgaatttgattcaactgatagagagtgtgcattgtgctgttatgatctgcatctttctgcttctggctgtccatgttgcccagggaaatatacctgccttgtacatgcaaagcagctttgctcatgtgactgggacaaaagatttttccttttccgttatgatatcaatgagttaaatatgtttggcttaagcaggagatgattcttgattgtggtgttttggtgaaacaataaacaaaaattcttt

SEQ ID NO: 43591 - DNA, 317 bp, Zea mays
  Clone ID: MRT4577_139761C.1
cggacgcgtgggctgacacatgaacatgctctcgggtgcagtcatcggaataacaaataggacgcgtcaacaacagccagctcgcgaaaataatgaagagccgcaacatggctatcatctgccgcgctcttggtgctagccctcgcgctagtggcggccaccgaccgcacaggtagcgtaggcatagaagatgagagcggcggacagcggcgaggcggcggatgcgaagaagatccaagactacttctgctggacgctgtgcgaaggcaagaaggcgacggacccggtcgtgtgcaaggagttctgcgcgctctacc

SEQ ID NO: 43592 - DNA, 602 bp, Zea mays
  Clone ID: MRT4577_139762C.1
tttctcgctgagttctccttctccgcgagtgctcccaatttgtttgccaacgcctggcgggagatcgtcgccatccgcctctcctaatcctcgacgcctcgccgcgcgccgccctggtaagaatctcatccatctccgacacgggcgctgcctcctctctcttgattactactcatgcgaccgacaagtgacgacccaccgcaaggctagcaccgctacggattcccacctgaaggactgggaggtctacgacagcgtcttcgctctgcaaatatgccacacttggtgaccaggaccgggttcaacagatctcggttccttccgaccgaggacgagtatcgccgaggcctaatctatcatgctgatgctatgaaaccctttgatgatctgcttcaatgcagagaggagcatttaactcaggctagaccatctcatcccgatcattaccctttcgcgctagtgcgccaccgagccgctgatcatggtgcgcacactggagagacatctcgaaacctggatcaggcatgtcgggctcttccagggaacctatcgcactatgagactcctgctatcgccggagcccccgtggaacatgacttaca

SEQ ID NO: 43593 - DNA, 330 bp, Zea mays
  Clone ID: MRT4577_139763C.1
ggtcaaccaacgagctgtggcgggcaacaagctcatctattcgcaatgcacttcttctcaaaaaaacaatggcccacgtgggccgtgatgtactccaggtgcgcggaacacaaactcatcaggtggcatgtcaagaccatggagcgagtcgtgtactgaaaatggagacctcacgctccgcatcgctgatggggacacagtttttcggataacgggctcaggcatgaatgccttccacctgtgcgtccggatacctgcaaggctcaggcctgggcacaatccgaaatcctgggcatgcttgcacccatgaagccaactaaggataccatg

SEQ ID NO: 43594 - DNA, 408 bp, Zea mays
  unsure (1)..(408): unsure at all n locations
  Clone ID: MRT4577_139764C.1
acttctacacacattcccaccctctctcttcactcccccaccntctatnacccctcctaaactttcccttaacccaaacanccctcttaaaagaaagagttccacattttttttttctcaccactacttactttcaaacaaacacccaactgataagtgctcccccccttcttaactccacccttntttnatcccaancccctttcttcaaccaatccatattcanccttgagccttcccccatctctcccacatgaattcctttatcttaatacctcccggacactaaaatcccttccttgctccaccatcatgagccccaaaacctactactcccaacggaaaaccccccctaaatacacctttgacctgactcattccaaccctattggatggctcatgcaaaaa

SEQ ID NO: 43595 - DNA, 270 bp, Zea mays
  Clone ID: MRT4577_139765C.1
ccggccggaagcccatcgcctgatcttcctgggcagaattaatgcagcaaccttgagcattctctggtgcttggaccgacaggaactcttcgaccatgacacgttcaccaaggacgacagcatgggcaacgccgagttctccatcctcaacttcgtggagatcgccaagcaggacctgagcgacgtccccgacggcacggtgatgaagacgatccacacggagaagggcagctgcctcgccaccgacagccacatcacgtgcaaggacgg

SEQ ID NO: 43596 - DNA, 337 bp, Zea mays
  Clone ID: MRT4577_139766C.1
aaaaaaaacacccccttaaaattgcaccaaatttgaacttttccaaacttagcatttttttaagggttgttattcccccaagataaaatggcccttccttgacacaaagtcagcacagggaactttgcgtaagatcacacagttaagcccttttttttcgaacaggttaaaaaaacctagttattttttttttttggggtaacgctacttggccatcctaactcctaatcctaatggccagaatcgccgccaccgtttgcctttttttgatttttttttttaacccttcctggggggcctccaccaaatgggcttgacaggaaaaagtaaatgtgtt

SEQ ID NO: 43597 - DNA, 614 bp, Zea mays
  unsure (1)..(614): unsure at all n locations
  Clone ID: MRT4577_139767C.1
atgagaaaagattcttaatacatttgtgatcatatccatacataaattttgttattttaatctagttgtttcaccactacattacaaccatcagtaccatacagacttttatatatgatatttaggtacacatgtgttactacgatttttaaatgaattaccttgtaattgattcaaaagatccatagcgatagtacgcaagcttaccaaagtttaagagaacttacccgacaaccagctgcccgtattttcttggaagaacagaatggttggacttgcatcttgtggagaaatgctatggcagctctctgtagcagcatgtggtcttcagcagagagagaaaatttggtgctacacttcagcaggtcatgcatttctcctacaaagtgtgaccttatcaatatctttagccaatacggtcatgtcaatgaagtgaagacagatgttgcaaacagtgccagctctgcccaggtgatcttcaagaggcgcatggatgctgaggcagcgtttgcaggtgctgggaagatcagtacccttggacctgcccttgtgagctttcgtatcactgacttcccagctagtgcttcaggaaataaagcttnccatgttgcatc

SEQ ID NO: 43598 - DNA, 404 bp, Zea mays
  Clone ID: MRT4577_139768C.1
ggtagttgcacactgccatagccatggtgtccttcaccggttggatttctcttgtctaatttatatttctgaactcatcagatgagtataacatcacatttttccacttttatggtccatgctcaaatttatttatagggatttaaagccacaaaacctgctggtggacaaggagaagggtatactgaagattgctgatctgggactcggtagggctttcactgtgcccatgaaaagctacacccatgagattgtgaccctttggtacagagctcctgaagttttgcttggagcaacacattactcaactggcgttgatatgtggtctgttggatgcatctttgctgaactggcccgacggcaggctctttttcctggcgcctcggtgttgcctcagttgcctc

SEQ ID NO: 43599 - DNA, 252 bp, Zea mays
  Clone ID: MRT4577_13976C.1
gcagcaggtgggccccaggaccaccttccaccgtcttcgaatcgccgacgccctgggaatgccgtttctttcttcacctgttctgatgacaccggcgatataaacattcggaccaaagttcgtcaagacttccttttgccatctcaagtaaccaaacgtgcttcaccgaggcgcctgtctcccacacaaccgacgagtacaaaaaaaaagttgatgaatacactgctttgccttgacgatgcggagaagccg

SEQ ID NO: 43600 - DNA, 477 bp, Zea mays
  unsure (1)..(477): unsure at all n locations
  Clone ID: MRT4577_139770C.1
gcatgcctagcagtgtcgactctagnaggatccccctgttagtggttagtcgaatggaactgtgaaaacatatatacgaagaacgtttgaactgactcttatgtggtttccaccaaagcagtttttaggctttttaaccggcttactagcctacagctagcgtgttaccacagactcacagcgccaacagtaactatttattcacaagccacagcgccaaccagaacagactccatatattagatgacancagtgcactgacagtgaacaagataatcaaacattgaagattattatctccatatanttctcaagccaaagacgtacttcacatgcatgcctgcgtctgcgtgtatgtatatgcttacgtcgtgacggcatatgcaaatgtgcatcaaattaaagagctagcgcatgcagtgacatccgcatccaccaagacttccgaacggcacggcgggaacttaaaccgcacgg

SEQ ID NO: 43601 - DNA, 619 bp, Zea mays
  Clone ID: MRT4577_139771C.1
ccggccgggctccttgtgcgtcgtctttacaagcttttcagcttgtttgtttgtttgtttgttctggatgaacggagtttcagcgcagtaaacaattcaaataacctaggtgttgtgtgctcacaaaaaataaaggataaaaaaaaaaaaagccatctttttgttcctcgggccggcgccgccggcgctgtgacggaaggaagaggaggagcatggagcactacacgatgggccactcaaacgggtggaactcacaccctaagaactacggtcctggttcccgtgtctggcgattttgctccaaccctcacggtctgatcaggaagtacgggcttatgtgctgaaggacagagcttacgcagaaacgccaaggacattggtttcatcaagaaccgttaaagaggccactgagctgctgaggagaactttctacatcaaagaaatggggccttaattagaaggactaatttatgcgctttaactttttggtcacaacttgaaactgatgtgttaaactccacttgctaaaggtctgaggggtactttgagctggttggaccaattataatcagaggattgaaattttctcaagatggaagcgacactgggttttcagatg

SEQ ID NO: 43602 - DNA, 242 bp, Zea mays
  unsure (1)..(242): unsure at all n locations
  Clone ID: MRT4577_139772C.1
ggcgcccacgcgnacganncaccacgaggcgncaagggcaacggcaagggccaaagcggccgnggaagcagcaggngggacaggaaggcgggggcacgacaacaaacagggacnccaggcacgccagaaaccggagcggacagagaagaaaggccgccggccaccaaaagcagcaaggccaacacgccaagcagcgagacaagggcgagagcaacggccgacagcccgcgccgacaaagcca

SEQ ID NO: 43603 - DNA, 591 bp, Zea mays
  Clone ID: MRT4577_139773C.1
atatcttgagcccataaaacgatgtttcgcttatgctggaaaagtagacgataaacgattgatcggaaatgcaatgagtgaagtatgtaaattgatgccattgcacggattaaaccatttgaaaagagtacatcaatcgaaattgcttctatgtaccctgaatcaaatattagattttattcgggaaaattacgacgatgaaatcattaaaaatattttaacaacaattgtgtcagaatcacaactgccaaccgaaaacgatttacggacagccaacaaacaaatgacctcatcactattaaaattatacatgataaaacgtggtctatctttaccggtggtaacatttttaattaaaacaatcgaaatagcaccggtagctgcgcaagcacctctgcttagttggcaacattccgatgtgaatggtgattggccaaccaaattccatccaaataaagatttggaaaaattgtacaatggaacatggtttactgaaaaagaaaagttatttcatttacaaattatggaaatttgtggacttttgcgaaccaaaataaagcgagacgtatgtggcattgtgatagatccgcg

SEQ ID NO: 43604 - DNA, 527 bp, Zea mays
  Clone ID: MRT4577_139774C.1
attgcggaaaccaatcgcttcatgtttttctgtgagcaatgttataactgtcagctgaagataagcaacaacctatacaacaaaaaaaagcaaatagtctccaaataacttagatgaacggttacattaatgtacaaggatagtacactgaccaccatggttcactagtaaaacacttttgaaggccctccacaaattgtcactttcctatcttgaagcagccacagcttagcttacgatgaagacggtttatatttgcttttatgatcaatctggatggagtgttaatcctgcaacaaaatttctatgatgggccacaaggagaaaccttatccactcaaaccggcaccaagcctgctaaagaacactatcagtcgctgctagacaccgagaagatgtgatacttcatgtccatggcacctcacctcagaagacatctgacctcgtggattcagggtgaagcataacagttagtacggacaggaatccaatcaagtactcttagttcagccaaaaagcccacggtt

SEQ ID NO: 43605 - DNA, 3051 bp, Zea mays
  Clone ID: MRT4577_139775C.1
gttggttaacgcattgcttgagttagaagtaagtagtaggttcttgttcctcagcgccaaatggtttagtacttgttcaggaaacaatttttaagacgagtgtggaatagcaggaggatagctgttatcaagataagtccagcactggaatcatcgtatgttattgagcagttggtcatatatgtgaccaattgtttaagaacaataggtgacatgcatgatgatgacctgttgttttggcctgttgttgcttgtgcacgtgcacgcagtttttctggtagccgtgagtccgtgactgggagattgcttttctgtttcttgttagcttatgattattccatcattatgtaatcttcaattgggtatagttagctacttatttattccactcaagagctcagagtttgtgaaactcactacgattgttgtataacacgtctgcagctaagctgtggctgcttcaagataggaagcttgatggctgtcagcttattgtacctaagtgactaaattttgtggagggccttcaaaagtgttcatctcttactagtgaaccatggtggtcagtgtactatccttccttgtacattactataaccattcgtctaagtgttttttggagactatttgcctgtatttttgttgtataggttgttctttctcttcagctgacagttatataacattgcttacagaaaaaccacccgtccgcgggcgtgggttcacctgcagactcctctgtaccaggtcaggaaacgagcaagcccagaacctggtgaagtctctggaggaagggcaatgtctaggtcatctgattcagggaaaataggtaatgatgagaaagaagattccgaggtcgataaagatgactatatggatgttgacagggagcatgctagtgacagtggtacagaaaactgtatgtcggatactgactcagacaatgaaatgtgcaggcctgaaacccctgaaccagagagagccaccacacaggtgtatcaatatgcttcaaggttgcagaagtgttgatagtttgagaggctcaacaaaattaatgagggaacatatggtgttgtatacagagcaagggataagaagacaagtgagattgttgcattgaagaaggtaaagatggagagggagcgagaaggtttcccattaacctctcttagggaaataaatatcctcttgtctttccacaatccttcaattgtggatgttaaggaagtagtagttggaagtagtctagatagtatttttatggttatggagtacatggaacatgatcttaaaggtgtcatggagaccatgaaacaaccatatacccaaagcgaggtaaagtgtttgatgcttcagctgctagaaggtgtaaaatatctacatgacaattgggtgcttcatagggatctgaagacctcaaatcttttgttgaataaccgtggtgagttaaaaatatgtgattttggactgtcgccccagaattgttgttaggaacaaaggagtattctactgctattgatatgtggtctgtgggctgtataatggctgagctccttgccaaagaaccattatttaatggaaaaacagagtttgaacagctagataagatttttagaacacttggcacacctagcgagaagatttggcctggctatgctaaattaccaggcgtgaaagtaaattttgtcaaacaaccgtataataggctaagggataagttcccagctgcatctttttctgggcgaccaatcctgtctgaagctggttttgatctattgaatagactgctaacttatgatcctgataagcgcatatcagcagacgatgctctgaaacacaaatggttctctgaagttcctctgcctaaatcaaaggacttcatgccaacattccctgctcttaatgaacttgacaggcgttccaaaaggtatctgaagagtcctgatcctctggaagagcaacgtttgaaagaactgcaagggaacataggcaaccgtgggctttttggctgaactagaagcacttgattgggtctgcaagggaacataggcaaccgtgggctttttggctgaactagaagcacttgattgggtcctgtccgtactaactgttatgcttcaccctgaaatcctgagtccacgaggtcagatgtcttctgaggtgaggtgccatggacatgaagtatcacatcttctcggtgtctagcagcaactgatagtgttctttagcaggcttggtgccggtttgagtggataaggtttctccttgtggcccatcatagaaattttgttgcaggattaacacttcatccagattgatcataaaagcaaatataaaccgtcttcatcgtaaggtgtgacatgttggctttgaatgggtacaccagtttcacctttggaacttctgtatgtaaaatattccagattggtacgttgtaaacaatccccagtgtgtcggatttaaatttaaataaaacatcatcattattagttttcttcatgctccttgtgccttttcttttgatctttgcattttgtttgcaagagacgaaagaagcgcaggggaaggaagccttttgcttttatcaggaaatcaatgacattaatacaacttagaagctaagctgtggctgcttcaagataggaaagtgacaatttgtggagggccttcaaaagtgtttctttactagtgaaccatggtggtcagtgtactatccttgtacattaatgtaaccgttcatctaagttatttggagactatttgccttttttttgttgtataggttgttgcttatcttcagctgacagttataacattgctcacagaaaaacatgaagcgattggtttccgcaataaacaaagtgaaagttagcatgtagagggattgccgagccggtcggctaaccgggctagccgataattggtggtggtcggctccaccttatcactgttttggattttgaatttggtaaagtttgtaaattttgaaaacttttgatgacattttttgtataaatactatatattatttgaagattttctgctgaaaaa

SEQ ID NO: 43606 - DNA, 594 bp, Zea mays
  Clone ID: MRT4577_139776C.1
cctcgaggccggccaggacaattctacaccaaacacctcaattgcccaatatgaagctcacaaccattctcgcccttgccgcgactgcgctcgcaggagagaccatcaacaacgagcacctcaagaccgaagtcgttaccgcagtcgactgcaagcgcccttccgtcgccggtgacaagatccacgtccactaccgcggtaccctcgagtccgacggctccgagttcgacgcctcctacaaccgcggccagcccctcagcttcaaggtcggtagcggccaggttattaagggctgggaccagggtctgctcgacatgtgccccggcgagaagaggaagttgaccatccagcccgagtgggcgtacggtagcaggggcgccggtcccatccccgccaacagcgtgttgatcttcgagacggagttggtcagcatcgatggcgttagcaaggacgagttgtagatcgtgctgtggatcggtacgatgtatggacgacatgggcatggagagcaaaggccaagtaaataccagtcatgagatataccacgaatagacaatgagtctacacgccaaaaaaaaaaaaaaaaaagcggcc

SEQ ID NO: 43607 - DNA, 456 bp, Zea mays
  Clone ID: MRT4577_139777C.1
gtaaacaatccccagtgtgtcggatttaaatttaaataaaacatcatcattattagttttcttcatgctccttgtgccttttcttttgatctttgcattttgtttgcaagagacgaaagaagcgcaggggaaggaagccttttgcttttatcaggaaatcaatgacattaatacaacttagaaggtgaattaattgtgagatatgtccacaacaaattcggaacttgaactaatgtgtgcatctaacatctgtttgctaagctgtggctgcttcaagataggaaagtgacaatttgtggagggccttcaaaagtgttttactagtgaaccatggtggtcagtgtactatccttgtacattaatgtaaccgttcatctaagttatttggagactatttgccttttttttgttgtataggttgttgcttatcttcagctgacagttataacattgctc

SEQ ID NO: 43608 - DNA, 581 bp, Zea mays
  Clone ID: MRT4577_139778C.1
ctcaggaacatctcttttatacgaactcccagaacacgcaccccccgtagtacacgcatacatcgtgcacatgcgtgctcgtagaccaccccgcagacccctcacctgatgagtctaagattcgaagggtaccccaacatcttggcagaacaacaaaaagcacacggacgctgctgtctaccagtacaagaacgcccggggcggcttgtcctcctatctaacgcacccagcagggcacggttctgaacgatcaactcaggtgacactacacggtgcaccgagccagacttaccagctacatggtcctgggtctggtactataccagccgcactacacacaccttggcccttatgtagaacgcgtatgagaatcaaaaagactgtgtggtaaggactgttgtctggcacaggtctgacgaatgtgtatagtacagtcctatgatactaataagagacgtacgcgctatctactgactctgcgcatgctcagcacctgttactaaagcttgaaatgcaccaatgcgtatgtgtcaaaaacagtgaccagtatgctgaacggaaggtcgccgcgcgctgggggc

SEQ ID NO: 43609 - DNA, 2491 bp, Zea mays
  Clone ID: MRT4577_139779C.1
gaaaatggcgtgcgcagttctagcagggagggcgacatggtggcaggcactgggatctcgtcaccgatcaagaagaggaaattctcaccgataatttgggacagggatagcccaaagccaccgcattctggtgcagccagggacaagaaatcggtagaatctgttccttctgagctccctccgccgccgccgctgccacaagaccacatcccactgagcttgtctgtggagaagtcacctatggatgtagaaactactgttggtacagagagtgctgagcagttgccggaacatgaggtcaataaggtgatagagcaggaagaggactatccaagtccaacaatgaggaacatatcgacttcaagatgggcgggtgcaaatgatgatgaggaaggtggggcagctccaatgaagaagagaagtgtttcacctgcagactcctctgtaccaggtcagtggaaacgagcaagcccagaacctggtgaagtctctggaggaagggcaatgtctaggtcatctgattcagggaaaataggtaatgatgagaaagaagattccgaggtcgataaagatgactatatggatgttgacagggagcatgctagtgacagtggtacagaaaactgtatgtcggatactgactcagacaatgaaatgtgcaggcctgaaacccctgaaccagagaggccaccacacaggtgtatcaatatgcttcaaggttgcagaagtgttgatgagtttgagaggctcaacaaaattaatgagggaacatatggtgttgtatacagagcaagggataagaagacaagtgagattgttgcattgaagaaggtaaagatggagagggagcgagaaggtttcccattaacctctcttagggaaataaatatcctcttgtctttccaccatccttcaatcgtggatgttaaggaagtagtagttggaagtagtttagatagcatttttatggttatggagtacatggaacatgatcttaaaggtgtcatggagaccatgaaacaaccatatacacaaagcgaggtcaaatgtttgatgcttcagctgctagagggtgtaaaatatctacatgacaattgggtactccatagggatctgaagacctcaaatcttttgctgaataaccgtggtgagttaaaaatatgtgattttggactgtctcgtcaatatgggagcccattaaaaccttatactcaactggttgtgactttgtggtacagggccccagaactgttgttaggaacaaaggagtattctactgctattgatatgtggtccgtgggctgtataatggctgagctccttgccaaagaaccattatttaatggaaaaacagagtttgaacagctagataagatttttagaacacttggcacacctagcgagaagatttggcctggctatgctaaattaccaggcgtgaaagtaaattttgtcaaacaaccgtataataggctaagggataagttcccagctgcatctttttctgggcgaccaatcctgtctgaagctggttttgatctattgaatagactgctaacttatgatcctgataagcgcatatcagcagacgatgctctgaaacacaaatggttctctgaagttcctctgcctaaatcaaaagacttcatgccaacatttcctgctcttaatgaacttgacaggcgtaccaaacgttatctgaagagtcctgatcctctggaagagcaacgtctgaaagaactgcaagggaacataggcaaccgtgggctttttggctgaactaagagtacttgattggattcctgtccgtactaactgttatgcttcaccctgaatccacgaggtcagatgtcttctgaggcttggtgccggtttgagtggataaggtttctccttgtggcccatcatagaaattttgttgcaggattaacactccatccagattgatcataaaagcaaatataaaccgtcttcatcgtaaggtgtgacatgttggctttgaatgggtacaccagtttcacctttggaacttctgtatgtaaaatattccagattggtacgttgtaaacaatgtccagtgtgtcggatttaaatttaaaacgaaacatcatcattattagttttctttatgctccttgtgccttttcttttgatctttgcgttttgtttgcaagagacaaaagaagcgcaggggaaggatgccttttgctttcatcaggaaatcaatggcattaatacaacttagaagctaagctgtggctgcttcaagataggaagcttgatggctgtcagcttattgtacctaagtgactaaattttgtggagggccttcaaaagtgttcatctcttactagtgaaccatggtggtcagtgtactatccttccttgtacattactataaccatccatctaagtgttttttggagactatttgcctgtatttttgttgtataggttgttctttctcttcagctgacagttatataacatt

SEQ ID NO: 43610 - DNA, 447 bp, Zea mays
  Clone ID: MRT4577_13977C.1
cccacgcgtccgcccacgcgtccgccacgcgtgcgctgaccacagcaatcaacctcctctggactttgcatacatcggaccatcgatcacacttcacacagtcctagcccctagatagaggcactatgctggagaaggactgcggcggtgccaaaggatgccagagcaagcgggagcggttgtaccgggggtgctgcccgaagggagtggttctgatcctcctagtcctctgaatagcgctcattgggaggctgaagctgcgccctgacaagcccaggttctacctgcaggacctgtccagggctgagcctgaacgtgacgccagcgtaggacacgtacctgttcacgacgatgcgagcgacggtggcggcgcgcatccagcacgagggcgtgggggtggactacgatcagggggacgcggacgcggagtgcttaggcgagacgatc

SEQ ID NO: 43611 - DNA, 759 bp, Zea mays
  Clone ID: MRT4577_139780C.1
tcgcgcagcgaaagagggagcttgcacgggccaacgcacacacaacacaagctcgtcgtcaatggcgggccgggccgggagtgctcatttcttctcacctccccagccgccacaaaacaaacgagccgcattgctcctgaccgaccgctcttacttcccttctctctctgtttcttcatttctactccacctgccccacagctactcggctgccagggagaaccagccgttagcttctctactccctctcttgtttcacgttccttcagcgcgttctggtggccagcgcatcgcagccaccgcgctcaactgtaaggcacgcgctagcggcttttcggtcgtctctatgcacagtgaaacgggcaccgcagacctcgccggcagcgagctcatcccttcgggcgggtgagctgctgtcggccgggaactgaccgcagtccgagcacgacaggttgggtgtctgtctcttgactgtctttaacttttaaaacttggatctagtcctcatttactcgaatcccttactgtgtatgaatgaatgtatgagatggatctaatgtaatattcgggatcgagttatgagttgataaaacgtagatccgagaacttgggttatttctgttattttctgtgatgatgttctgtacctttgactgaaaaaaaccagtccaaggattatattgatagtgctctgtacacttaatctgtacgcggtttcttattgatgttttttggccgtgactccccccccccccagct

SEQ ID NO: 43612 - DNA, 766 bp, Zea mays
  unsure (1)..(766): unsure at all n locations
  Clone ID: MRT4577_139781C.1
ccggccgggctcgaggccggccgcacataatcaatagtattcactactgttagtcactcttttgaaacaactacccacgttctttacagcaacgcatctctctcacgttcaactactctttttcgttctatacccatttcttctacaaccaagaacaagaacaataagcaaaatgcgtttcaccatcatcgccgcttctctcgtcgcagctgttgctgctcagtacccggctgctagcgagacttgcgccgctccggtcaccgtcactgtcaccaagaccctgggccacactcctgttgctccctccagtggctctgcctactacccaaccactgttgctgtctaccccaccagcactcccctggttcccgaggcttccaccgtcatcagcggtgctcctcctgccgtctctggtaccgctgctcctaccggcactggcgctcccatccctgagttcactggtgctgcttccagcatcaaggtcggcagcgctcttgctggtctcggtgccgtcgccgctcttctgttgtaaacgtgcaagtgaaggactccttttgggaacatactagggcagagcagctgtatataccctgacttacaattctttttacccctcttttcaatcacactttgggcttcgtttacggacgccctttttctcacgtcttgttctgtcagatgttgtctgcaaggttctcaatggtcgtcatgaacgatgaactagattgacttgttcatagcggtaatgtgtatccattccatctng

SEQ ID NO: 43613 - DNA, 354 bp, Zea mays
  Clone ID: MRT4577_139782C.1
ttctgttgatagggtacgaaggaagatgcgggggggctataaatgtagaagccagctatcgcaatgcaccagaggtaaggcgctggcgcctttatccaaagcgggatgacaggacctatatggggggttggccccctcgcggcaacagtagaaaaaatggactgcaggtggaacagcatagacatcaaggacggaagtagagaggaggcgcggcaaggtcaacgccagagatcaaaaaagcgatggaggaacacgatgcaacccttctaagaactactcataactcatgaacgagcgggcacatcaagaacagaggcagcacacctgacccaatccatttcagctcccctggaa

SEQ ID NO: 43614 - DNA, 2372 bp, Zea mays
  Clone ID: MRT4577_139783C.1
tccgatgagtttgagaggctcacaaattaacgaggccacatatggtgttgtatacagagcaagggataagaagacaagtgagattgttgcattgaagaaggtaaagatggagagggagcgagaaggtttcccattaacctctcttagggaaataaatatcctcttgtctttccaccatccttcaatcgtggatgttaaggaagtagtagttggaagtagtttagatagcatttttatggttatggagtacatggaacatgatcttaaaggtgtcatggagaccatgaaacaaccatatacacaaagcgaggtcaaatgtttgatgcttcagctgctagagggtgtaaaatatctacatgacaattgggtactccatagggatctgaagacctcaaatcttttgctgaataaccgtggtgagttaaaaatatgtgattttggactgtctcgtcaatatggaagcccattaaaaccttatactcaactggttgtgactttgtggtacagggccccagaattgttgttaggaacaaaggagtattctactgctattgatatgtggtctgtgggctgtataatggctgagcttcttgccaaagaaccgttattcaatggaaaaacagagtttgaacagctagataagatttttagaacactcggcacacctaatgagaagatttggcctggctatgctaaattaccaggtgtgaaagtaaattttgttaaacaaccgtataatagactaagggataagttcccagccgcttctttttctgggcgaccaatcctgtctgaagctggttttgatctattgaacagactgctgacttatgaccctgataagcgcatatcagcagacgatgctcttaagcacaaatggttctctgaagttcctctgcctaaatcaaaggacttcatgccaacattccctgctcttaatgaacttgacaggcgttccagaaggtatctgaagagtcctgatcctctggaagagcaacgtttgaaagaactgcaagggaacataggcaaccatgggctttttgggtgaactagaagcacttgattgggtctgcaagggaacataggcaaccgtgggctttttggctgaactagaagcacttgattgggtcctgtccgtcctaactgttatgcttcacactgaaatcctgagttcatgaggttagatatcttctgaggtgaggtgccatggacatgaagtatcacatcttctcggtgtctagcagcaactgatagtgttctttagcaggcttggtaccggtttaaatggataaggtttctccttgtggcccatcatagaaattttgttgcaggattaacgcttcatccagatcgatcataaaagcaaatataatctacctgcatcataaggtgtggcgtgttggcttttattggttacaccagtttcacctttggaacttctctatgtaaaatattccagattggtacgttgtaaacaatgtccagtgtgttggatttaaatttaagaacgaaacatcatcattattagttttctttatgctccttgtgccttttcttttgatctttgcgttttgtttgcaagagacaaaagaagcgcaggggaaggatgccttttgctttcatcaggaaatcaatggcattaatacaacttagaagctaagctgtggctgcttcaagataggaagcttgatggctgtcagcttattgtacctaagtgactaaattttgtggagggccttcaaaagtgttcatctcttactattgcatttatgcactaaagtccggtttagtcacttgaaccaaatgagatactttagtggctaaactttagtaattaaactttagtctatttactaaaggaaccaaacatggcctgccttagtatgttgttcctgcattagattaattaattaatgcacaagcaacattaacataggcccatttttggtttgtttatgaccgacaccaatagtcatcgttatgaggtctacgacattatgaatgctgtatatatgctaattgaacggattatcatgtagttaatacaaaatattaacctcattcttataactatattatcatgcacaatcaaagcattagctatcttttagctatcttttcgtgaatggtgctcatggtaatctcattctacttatcaatagtgtcatcctcttgcaactgtgtcatttccagggattgccgagccgttcggctaaccgggctagccgataattggtggtggtcggctccaccttatcactgttttggattttgaatttggtaaagtttgtaaattttgaaaacttttgatgacattttttgtataaatactatatattatttgcaaaaaaaaaaaaaaaaaaggggcggcc

SEQ ID NO: 43615 - DNA, 1941 bp, Zea mays
  unsure (1)..(1941): unsure at all n locations
  Clone ID: MRT4577_139784C.1
gagacgaaagaagcgcaggggaaggaagccttttgcttttatcaggaaatcaatgacattaatacaacttagaaggtaatatatcaaaagccaattgctgcaagtgacgtgttgctaactagaaactaatgaacgagggagttctttactgaaaaatcaggtgcatgaaatggatgatatcttataactatttatgtgaacagacttagtgttaatgtgatatgtttaatttcgatgtgcttgtgcacacagcattgtcagagcagttgctcccatattacaaagttgaaaacgaaaattatatcaagaaataacctacgtgagatattttttgaatggatgttttctagttgccatttcaactacaagaaataaatttgagttcatagctatcactggagtgcttttctgaacttattttcactgccaatgtatataggtgaattaattgtgagatatgtccacaacaaattcggaacttgaactaatgtgtgcatctaacatctgtttggtatttaccttctaacttgatgttcttatgcatcttccttcttgtgtgctctctgcttctctgttggttaacacattgattgagttagaagtaaacattaggttcttgttcttcacagccaagtgggttagtacttgtttcggaaacagttttaagaaatgtggaatagcaggaggataactgttattgagagatccttcaacactgaaagcataatatgttattcagcagttggtcatatgtgtgaccaattgcataatatgttgacctgttgttttggcctgtagtttgttgtgcacctaggggtggtaatgagctctaaattttacactataaatttaaggatcaggtcggattaggattgggctctatgtctattcgcttttgaactaaaattaattaagggctccaacaaattgtgaagaaacatttggatcgtgatccattaccacctgcacacaagttttctagtagctatgactgggagattgcttttctgctacctgttagtttatgatcattccatcattatgtactcttcgcttggttatagctagttatttataccactcaagagctgagagtttgtggaactcactacggttgttgtatgacacatctgcagctaagctgtggctgcttcaagataggaaagtgacaatttgtggagggccttcaaaagtgttttactagtgaaccatggtggtcagtgtactatccttgtacattaatgtaaccgttcatctaagttatttggagactatttgccttttttttgttgtataggttgttgcttatcttcagctgacagttataacattgctcacagaaaaacatgaagcgattggtttccgcaataaacaaagtgaaagttagcaccagtttcacctttggaacttctnctatgtaaaatattccagattggtacgttgtaaacaatgtccagtgtgttggatttaaatttaaaacgaaacatcatcattattagttttctttatgctccttgtgccttttcttttgatctttgcgttttgtttgcaagagacaaaagaagcgcaggggaaggatgccttttgctttcatcaggaaatcaatggcattaatacaacttagaagctaagctgtggctgcttcaagataggaagcttgatggctgtcagcttattgtacctaagtgactaaattttgtggagggccttcaaaagtgttcatctcttactagtgaaccatggtgggattgccgagccgttcggctaaccgggctagccgataattggtggtggtcggctccaccttatcactgttttggattttgaatttggtaaagtttgtaaattttgaaaacttttgatgacattttttgtataaatactatatattatttgaagattttctgctgaaaccaaatttcaaaatacacaacgaatttc

SEQ ID NO: 43616 - DNA, 592 bp, Zea mays
  Clone ID: MRT4577_139785C.1
tcgtatacaattggaaatcgtgactgaaaagtttgcacccctattatgtcagagacttggtgtaatgacacgtgggtccacctgcgttcatgaattgtttgtgttttggcagaaaccactagttttatgcattgatgtgatgcggccatccacataatttgattcaaagacctagctattaccttgaagtgattattgagaaaccagcctacatcatagaacctatagtagcttactaaaagccagtggcagagcacccgttatggtcaactatggctagagccatacctaaaaatcatgtttggtgtagtggtaagttcatactgcttgcgatcaacaggttccaggttcaagtactactacgtggtcctacgtgttgcatcacgtttttctctttttttgtccttcttcagccatacctcattattattttgtcctccgccactgctgaaagcaaatattctcctccacacaaatcaggaaatttcagtgttattgaatgtccggtaggtggtaggatccatttcttcagaacaggtagaatgtagtatttttgtccacggtaggacttcctggcatatgagttatgttc

SEQ ID NO: 43617 - DNA, 299 bp, Zea mays
  Clone ID: MRT4577_139786C.1
cttctcgtttccgatcaatctactatgaggggccgggcataatgtttatggatgggacctaaagacaaccagtgcaactctccaagcgcacatgctttaacccttaaagagctgccggcctatactcaacatttccatatgcataaggacaggttgttatttatcttacatactcactatcctaaaatatctcatacactattatattgtactctataatatcgtatgcgtgaacgaagactaagtccttctggtaccttccttttagcgactatacgatgctatacttctcattctat

SEQ ID NO: 43618 - DNA, 219 bp, Zea mays
  Clone ID: MRT4577_139787C.1
ctcacccacacggtctgtctcgagaatctctgcatgcgcattggggggaggaaagcgagctaatatctcttcctccgcaacgactcaaaccggcaccgtcagggatccgtgaaccaccaaaccagcccagagcccacacgaccacaaacgctgcttatgttggagagaggggcacgcgggcggacggcagctatgggggaggtgagaggcactacacgc

SEQ ID NO: 43619 - DNA, 571 bp, Zea mays
  unsure (1)..(571): unsure at all n locations
  Clone ID: MRT4577_139788C.1
gtcgacccagcgtccgggcagtttacagggctgtattatcagataaccaggttgttatcatccggagagctaaaagggccacgttcaagaggcaaaacatcttatggaagtgaagctccttacaaaaattaatcactggagtttggtgagattcttaggttttattgatgaaaaagatgagtgtattcggatcacagagtatgttccaaatggcactcttagggaacacctacatggggacgctttaatctgttacaacttgaggacgtcaaacatcctactgacagagagctaccgagccaaagtgtgctgttctgaactgtcaaaaagtggtaatatcgtgctattaaagggaacagggggctacattgatccagagtacttggagacctcagagctcactgccaaatctgatgtctactcttttggaataatactcttagaaatcatatcttctcatgggccacaagaactgggatgtanttgatgaaccaccggcanaagcagtgttgtacaatgnggctcttgagaaattctatgacgacctcatgaatgagatattggattaccg

SEQ ID NO: 43620 - DNA, 430 bp, Zea mays
  Clone ID: MRT4577_139789C.1
aacccccgaaaaaaaatttttttttggacttttccctataaaaaatttaaaaggggggcccccccggggtggggtgtgggggaaacactggttgggttgtcaaaaaagggtgggtgaatgggcacaatttttggcgttgtaagggggggcccggtttggggccaccgggttggtggaacgggaacaactgggggtgggtcaaaaagggggggggggtcccacccctttgctgggttaatggggggtgttggtggtggtttaatattgcgggggggttcattgttccccgttgggtggggggaaaaaattggggggggtgggcaaaccgggcctggctggttgggtgtttgtggtggttgccttttaaaacccggtttcaatgcccctttgttgggtttttggggaaaaaaattctttttttttttggggt

SEQ ID NO: 43621 - DNA, 270 bp, Zea mays
  Clone ID: MRT4577_13978C.1
ccgagttccatttgatttccttgatccaaattaatattctccccctaaatgaatcatcaaaggtgagtctcaaaaaaagcgcgtctcatgccaattaaagaatccattgatcacaaagaagctttgttccaatccccctaattacccatcctcttcatcaataactatggcttcttctgcaactctgctaccataaacatgtgctccaaatgccacaatgatattattactaatcattatcatgccaaacttgctttctactctatcgac

SEQ ID NO: 43622 - DNA, 2279 bp, Zea mays
  Clone ID: MRT4577_139790C.1
atgggttcctaggtcccaatcagcacgaggctattatcttctccttttcattggataagtgctggagcaagttccaaccaaatgagactctggagcattttatgatagttaaatatacagtaaatagcgtatacctacatggatgatgaataaactgacattgctccctttcccttttcattctggggacgctttaacctgttaccaacttgaggacgtcaaacatcctactgacagaaagctaccgagccaaagtgtgctgttctgaactgtcaaaaagtggtaatatcgtgctattaaagggaacagggggctacattgatccagagtacttggagacctcagagctcactgccaaatctgatgtctactcttttggaataatactcttagaaatcatatcttctcatgggccacaagactgggatgtattgatgaaccaccggcaaagcagtgttgtacaatgggctcttgagaaattctatggcgacctcatgaatgagcatgtggcttaccgtttggcagcctgtgtggatggagatgtggtcagggacttgctcagtttagcgtagtgggtgtgtgatgccttctggttggttcgcctgagcatggtagttgtaggcgagcgactgtggaaaatatggcaagatcatcgtagcatcttttgagctccagaagatatatgcatttcaagaagcatctggtagtaagatttcaaaggaaactgtaagttcatctaggacaaatatgtcacgtgagttgaccactgaggatggtgcccttaaagctattggtatcgacaactcaacaatcaaacatattccaaggtttaacaccacttctgaactctcagtggatactatttcatcctctaaagtaagcacaccatccaaggagatcccatcaactttacgccgtccggacaagtcaaaaatgcctgcactaatacctgatgagggatctttaaacttaagccttaagcaggttcagaaggttactcataatttctcacctttatttgagttaggtgaagggggaacctgggcagtttacagggctgtattatcagataaccaggttgttatcatccggagagctaaaaagggccacgttcaagaggcaaaacatcttatggaagtgaagctccttacaaaaattaatcactggagtttggtgagattcttaggttttattgatgaaaaagatgagtgtattcggatcacagagtatgttccaaatggcactcttagggaacacctacatgaccaacgtaagagaatcctgaattttaatcaacgtatagtgattgcccttgatattgctattgcattgacttatctccatttgtgttctggggacgctttaatctgttacaacttgaggacgtcaaacatcctactgacagagagctaccgagccaaagtgtgctgttctgaactgtcaaaaagtggtaatatcgtgctattaaagggaacagggggctacattgatccagagtacttggagacctcagagctcactgccaaatctgatgtctactcttttggaataatactcttagaaatcatatcttctcatgggccacaagactgggatgtattgatgaaccaccggcaaagcagtgttgtacaatgggctcttgagaaattctatgacgacctcatgaatgagatattggattaccgtatggaggatcgcgtggatggagatgtggtcagggacttgctcagcttagcgttgagttgtgtggtttcgcgtggcgctgatcgcccaagcatcgtagttgtcggggagcgactgtggaaaatatggcaagatcatcgaagaaacgtaggggaacagcacgagtaccaaggaagctgggcagaatttatcgaacaagagggaatcctgaggcatcacaagtgtgtgctcaagagaagttgggagccttcaacaacgcagcaggattggtctgtgtatgttaggcagattgaattagttcaagaagcttacgataccccatggggagaggaaattttttcggggtctgtttcattggacgatatcacagtatattctcggtagaaagcttcaatacgattatattactcctgttttctccgcggtattatatgtgtagattggaggacaataacctatttgttctatttctgtttcattggacgataaatcatagtgtctcctcggtatgaactcttgaaagtttcaactcgttgttttcctcactctatttattcagtgatattgctgttagaaaattacgcaatttcagtact

SEQ ID NO: 43623 - DNA, 1184 bp, Zea mays
  unsure (1)..(1184): unsure at all n locations
  Clone ID: MRT4577_139791C.1
aattcggcacgaggctcctctcctctcctctctcctccctccgctttatcttttcgtcggccctgcctggcgcctgctttcaccgtttccgcccgtcgccttccacctctcgcactacagctcaagcacagcgcggcaccctacgtccccgcgactccccccttcttccactccactactcgccgcgctccccatgccctccccgtgacgccgaaaccaaatccttttcgctcttccatattactgtcgcggcggcggaggaggtccgcggcattgcgagatatggagaaggagaggaagcaggggttcttcgccgcgctcaaggaggaggtcgtacgggggctgtcgccggcaaggaccagagggaagtccccggcgccgcggagcgcgtcgcccgcgaggatgctgatcccgcgccggcggaaggcgcccgcggctccgccgccgccgccgccgccgccggagaaggtgctgcagcagtacctgggggagcagctcgtcgcgcgctccggcagcctgttgcgccccggcggggaggctctggcgccgctcatcgaagggcccgacgccgagcgcctcgccgccggcgaccccgacggcgaggactcagggcgccgcgaggggttcgggcactgggtccgcggccacctgacgcgcgcgccatccatggccgccgcaggtggtcccgacggctcgttccggcggtccgacctccgcctgctcctcggcgtcatgggcgcgccgctcgcgcccatcccgtccaagccggccgagccgctgcccctcctctccatcaagggaaccaccattgagtcgtcgtcggcgcagtacatcctgcaccagtacacggcggcgtccggtggctacaagctgctgcagtcggtgcggaacgcgtacgccatgggcaaggtgcggatggtggcgtccgagttcgagacggcgacgcgcgtcgtgaagaaccgcgggcccagcggccgnggtgtcgtcgacgtggagcagngnggtttcgtgctgtggcagatggctcccgacatgtggtacgtagagctcgncntcggcggtagcanggtccatgccggntccaatngncgcctcgttctggtgncacaccccttngtccgntgnccangncncaaggggcccnttcctccccttacncntagtnctccaggnctncgttcctt

SEQ ID NO: 43624 - DNA, 324 bp, Zea mays
  Clone ID: MRT4577_139792C.1
caattttaattttatttttttttatttatgggacatggtttaccaatgacaatccgtagctttttttttttttttttttattttttttttacacgcaccccaggggttccaccaataggtttagtcaacctcctagggggggccaactattttaggggagtgaccaattgttagatattttatggcgtggaggaaaagagcccaagcagaaacaccgggaggaaggcctttgctttgcagatactattatcggaagacgaaaatcgaaaacatcgggggtgccatgcaattcagctgggaccaaataatttcaatccctgttca

SEQ ID NO: 43625 - DNA, 588 bp, Zea mays
  Clone ID: MRT4577_139793C.1
gccgggcaccccggctctgctcccgcctaccacatctcgctcggggccagctgcctcgcagttcgcatcatatcatacctcggtgaggatgagggagatcctgcccatccagggagggcaatgtggcaaccagattgcgcgccaagattctggtaggtggtgtgtgatgagcatggcattgaccctaccgggcggtacactgaccagttccaaccttcacttgagagcgtgttatatgtctactacaacgacaacctcctgcggacgctttgttccccgagctgtgctcatggatcttgagcctgccacattggacagtgtccggaccggaccctatgagacagatctttcaccctgacaactgtgtgtttgggcaatcttacgctggaagcaattgagctaaggaccactacaccgagggcgctgaactcattgattctgctctgaatgttaggaggaaggaaactgagaactgtgactgcttgcaaggattccaagtctgccactcaattggtgaggggactggatctggaacaggctcactgatgatctcagcgatagcgagagagtgcccttaacgaatgatgc

SEQ ID NO: 43626 - DNA, 827 bp, Zea mays
  Clone ID: MRT4577_139794C.1
aattcggcacgaggcggaaacgaagcaagggaagcgtaagcgttaggagacgaggcgccgagggaggcaagccgatcacaccaaacgcttcgtgctgctgccccgtctcttctcatcgtgatctcagggcagtggatcgatctcacgtcggaggcgaccttcttaggcgcgccaccgccatccgagccgagccgcagcgatccagatccagtgttggggctgccttgtgcaccgaatcagtgatcgggcagcgtaatacaaagagggagcgcttgatcatctgagctggttttgtacagaatgtcagagggtaatgtggatagcatccagatatctgttagtaatgatgagaggaggaatagggcagatgccgagatctcggaggacgagccgaggcacaccaggatgcggtcactgaagaagaaagccttgcatgcatcgacaagactcacacactccctgaagaagagggggaagagaaaagtggactgcagagtgccaaggatagctatagaagatgtcagggatgctgaagaagagcaggcagtgaactcgtttcgggaggttttgtttgctaggggcttgctaccagtcaagcatgataattaccacacgatgcttagatttttaaaagcgaggaagttcgattttgaaaaagcagcacagatgtgggcggacatgctgcagtggagaaaggagttcggtacagacacaatttttgaagattttgaatttcatgaactagaggaggtcctgcaatattatcctcatggttaccatggggttgacaaggaaggaaggcctgtttacattgagttgcttgggaa

SEQ ID NO: 43627 - DNA, 223 bp, Zea mays
  Clone ID: MRT4577_139795C.1
ttaaaatctaaagcacttctacccatactgatctatatcttactacaatttcttaattgtcttaactacttataataagaacacattgtatttacatacatttctacttcatcttcaccaatatcagtaaccacctatatcatactcactatctatagcacgcaatactacttacactccctttcaacctcataattataatatacctttacataaattcaat

SEQ ID NO: 43628 - DNA, 269 bp, Zea mays
  Clone ID: MRT4577_139796C.1
tcacactcttgcgaaaaaaaaaaaaaaaaattaaattaaaaaaaaaaaataaaaaataaaagtatagattccaatctaacgaacacaatcatacaaacctataaactctaacataaaactacctaaatctaaatcatcttaccaaaattctacaacatctattacttacaaaaccctacttttacacaacttaatcgccttccacaacatcctcctttatccaactgccgtattctctaaaacaccctttccgacttaactttccatca

SEQ ID NO: 43629 - DNA, 196 bp, Zea mays
  unsure (1)..(196): unsure at all n locations
  Clone ID: MRT4577_139797C.1
tttcttatttctgggaagcccnttcatcggncnaanaactttattatctgactatttctcntnggaggtctantngagggcaccnccnctgatgggttgttggtggaacactgctcggtttgtcctagcccgttggttgnttggcgggggggggtgctgttgtctgtgggtgcccgcgttttgcgcttcgtgctgg

SEQ ID NO: 43630 - DNA, 241 bp, Zea mays
  unsure (1)..(241): unsure at all n locations
  Clone ID: MRT4577_139798C.1
caccaaggagagtacgtggaggancagccatggcttcatcggtggccgccgcggcgagcacattcctgngcanccgcctngcggacccngcgccanagaacgggcgcntcgtggcncggntngngttcgggttgggctgcaaggcgaactgctncctaagaaggtggcgaagncatcgncctcctctgannggccgctgttgttcccctgngccgttgcgccngactacctggncngctct

SEQ ID NO: 43631 - DNA, 302 bp, Zea mays
  Clone ID: MRT4577_139799C.1
tcggagcttgcttcaacttcgacccacaaccacgggacggcagtcggcagcaggcagcgtctaacgcaattcccttttgttttgttgcttctaccttcccggccagtattaattacaagcttccactttcgagttttggttgcaacctgttcttctggggtcccatcggaggggggtgaggagattgaaccagattccgcttcctccaggctcgcatttgttgcgcttattcttcttgcggcgcccggccggccagccttggtgggtaccgtggaggatggcctggttaacaatagtgactt

SEQ ID NO: 43632 - DNA, 220 bp, Zea mays
  unsure (1)..(220): unsure at all n locations
  Clone ID: MRT4577_13979C.1
cgcgtccgccgncctcctccttcttcccgnccatcgacgtcgccggggcgccctacaactggagaaagggggctttctacagcgtcatgacaatagcaactatctcccccgccgctccgatcccatccgagcccttttcatccctacccctcggccgtagacatcgccctcaaccccttcttttaaatgatttccgccgccaactacttaatgattccaa

SEQ ID NO: 43633 - DNA, 258 bp, Zea mays
  Clone ID: MRT4577_1397C.1
gccctacggcgactagacgatgacgttggcatctgagacagaggttgccgaagatgaggatgatcagacggaggaggaggaggaggaagaagatgatcaggtactagctgccgaggacggtggctggctacagcgcggtgagggtgagcttcttgacgtggaccacagggccgaggagttcatcaacatgttctacgagcagctcagggcgcagaactttgccgcggtgttccgatactccccatgattatatgtatg

SEQ ID NO: 43634 - DNA, 312 bp, Zea mays
  Clone ID: MRT4577_139800C.1
tatgtttgtcggcaggtgcgcatgcaagggtgctgctgtagaatgagtttgattacatgccaacaggtaccaaatgggtgaaggtgactcaggtccctcaaggatctatgggacgagacgtgctggttcactactgtgcctcacaccccacagtgaagggaaggcattgaccatcatagtgaccagcgttggaatgctagtgatggcacaattcaggatctgattgtgccgactgaaaccagtcctatttactgcttgtaaggatgatggaaatgcttgtgccctatatgggaaggcacacagtagtagtca

SEQ ID NO: 43635 - DNA, 742 bp, Zea mays
  unsure (1)..(742): unsure at all n locations
  Clone ID: MRT4577_139801C.1
gccggccgggttccggattcaaggaaggagcctgtaatactaacctctattttttacatcaaaacaatgctgcagcgactaaagttggttattttaccttggctaatgaagcgatgaagagcaataacgagaataccttgggcaagtattgtggatcattgagggcgtcatggtggtgatgtacctctccaaattggtataaccatcacatactgatctgagatggagcgcttagggaggactcgccgttcttccatggaggtcgtcgccgtgtggaagccatcacccgacaaagttctggagacatcatgtgtgtctggagacatcgtgtgtgtgagggattcgacgacgtgttctattgattgcagatcgatgtttctagaaggagcaggcccacggaagacacgtggttacagcgcacagcaacatcagtcggaagcaggaggctgttgctgatgggtgacggccactgatcctagatcgaacggtgaagattaaaaaaagtgacgtggacgcaggatagaagccgttttgaaccggctttaaagtataggaaatgtttctgaaccacagcgcctttctgagacctgaacttactcttttccagcacttcttgcagcaacttggccaacaaaactgctcggttgactgtagcgngaacctgacacatcacagattcacaggtccctgaagatcttgtttcaaccttttcataaactgtgtgacaaagaagaattcatct

SEQ ID NO: 43636 - DNA, 254 bp, Zea mays
  Clone ID: MRT4577_139802C.1
gccgaagcaacgttcgggcgatgattccgagcgtttcgagagagccagtcaacaatcacattggagcaccagactgtccggtgtgcactgtacagttacctgtgcgccaacctgtggtagactccaatgagggacttgaccagctaagggaggacatctgcaccccacagtgtccggaagattattaaggacaagggcagcactgacttctaggaatgcacgtacctactgttagttgccttgaacctattaaa

SEQ ID NO: 43637 - DNA, 2825 bp, Zea mays
  Clone ID: MRT4577_139803C.1
aacaaaaattgtcagcctcgaggccggccggggagcgagaggcgcgctgttgcggaaatgccgctcccggcgttcctggcggcggcggcgaggctcgcggtcctgctggccgccgccgtgactgcggccaacgcggcctccttcgcgcgataccggcgccgccacctccgccgcatccccaaccccatcgacgagtccgccgaccccgtcgccgacttccgcgccctccgccccgcctcggccgaggacgccgcagaagatgacagcttcttctttgggctagcgaccgcgccggcacatgtggaggacaggttggaagacgcttggcttcagtttgcggtggagcactcctgcgacgacaaggaggccatgcgcgaccctacgacagcagatgcggtgatggcgtccgctgcaggggacggaggtgctcagttggcttctcgtaggtcgtccagaggggatgatgatagggatggtgatggagagttgaggaagcctcttaagatcgccatggaggcgatgctcagggggtttgaaatgtttgctgagggtggtgagtcaggttctgctgctgctgccggtgacagttgcagccacaacgttgcggcttggcacaatgtcccttgcccgcaagaaaggcttaagttttggtctgatcctgatactgagttgaaacttgctaaggaaactgggatcagtgtcttccgcatggggattgattggacgagggtaatgccgaaggaaccaatcgaagacctcaagagctcagtcaattttgctgcgctcgagcggtatagatggatcgtccaaagggttcgtgactatggaatgaaagtgatgcttacgctgtttcaccactcgcttccaccttgggccggagaatatggcgggtggaggatggaaaaaactgtcaagtactttctggactttgtgaggcttgttgttgatcgcgtatcagatttggtggactactgggtggttttcaatgaacctcatgtgtttgtgatgctgacctattgtgccggtgcttggcctggtggtgaccctaatgcaatcgaggtagcgacgtctgctttgccgactggtgtatacaaccaagcattacattggatggctattgcacatgcggaagcctacgattacatacattcaaaaggcgaaagtaaaaggaagccggtcgttggtgtcgctcatcatgtatcatttacacgtccctatggtctgtttgatgttgccgctgtcacactggctaattcattgacccttttcccttacatcgatagcatatgtgacaaattggattttattggcatcaactactatgggcaggaggtgatatcaggccctggcctaaagctcgtggacaatgatgagtacagcgaatctggtcggggtgtttatcctgatgggctgtttcgtattctgattcggtttaacgaacgatacaagagcttgaatatacctttcgtagttactgaaaatggagtttctgatgagactgatctgatccggaaaccatatattctggagcacctgttagccatttatgctgcaatccttatgggtgtgcctgtgcttggttatctattctggacaacgtcagataattgggaatgggcagatggatatggtcctaagtttgggcttgtggctgttgatcgtgctaacaacctggcacggaaacctaggccatcatactatttgttctctagattgttacaaccggggaaaatacaagacatgacaggttggcggcttggagggagctgcaacaggcagcgtttcagaagaaaacacgcccgttttttagggcagtagataaacatggccggatgtatgcaggtcagttgctgatgcctcgtcttcctcctctggggtagatcgggcacggcgactgcgtgctccgttgggggacggtgctggagatcggtcgtccgcggtgaaggtcgccatggcggatgatgacgatgtcaatctggtcaccggtaacgacgaccttcgcgcggcagggcttgtcccagatgacgaagacgacatccaggctgacgctgctgctttgctcggtatcgatctaacctttgctcctgtcgatctaagttctaatccgaccaacagctggtggagggcctgctacggccaccgatatggatgttagatggaattctacttatttgatgcttaaacacttggtcccatacaaaactgttttttctgtcttcatcaattcacattatgagtcacaattatccagttttgatatacttctctggtggcgtgaccacaagctaacatatccagttttatccataatggcaagggatattatgtctgttcctgtatctactgtctcttcggagtcttgtttcagtttgacagggaggataatcgaggagcgacgacgacgcttattgcctgagaatgtggagatgctgacttgcttaaaagattgggaattaggagaaaagagagaacaacatgctgttgacaatccagagcttgaggactcattccagaatttatttcttgatgaagatgaacctgttgctgcttagttgtagtcttgtagactgtgatgtggttctgacatgtgctttcactgctttgtcattgagtgattgtgagagagtcattttgtattgtaatatacatttgtaacagatacaaacttagtgattaaactttgagctggctgcactcttttttcctttctagggtttctcacaagggtgagttttacctagaaaggtttttaatgaggcagcattgcacaaaacagctcatttattatatttgtctatattttctactgttttttaactttggtt

SEQ ID NO: 43638 - DNA, 1694 bp, Zea mays
  Clone ID: MRT4577_139804C.1
gggtccaggcacgcgtccgaattggtgttagcttaagaattcttagtattcatcccttcgattaaatgtgaacatttgccttttctcgtgccaattactaatgttacggcattattcgaaactccagtagagcttccaaagaaacttatcatcggccccccaagtgctgatagaatccaacttcctgatggacgacatctggcttatgaagaacaaggagtctcagctaacagagcaagattttcactgattgctcctcattcttttctttcatcaaggctaacaggaattcctggaattagtgcatctcttctagaagaatttggagtacgacttgtgacctatgatcttcctggttttggtgaaagtgatccacacgtaggccggaatctcaattcttctgcactggacatgctctatctggctaatgctctcaatattccggagaagttctgggttgtgggctattctggaggtggcatgcatgcctggagtgctcttcgttacattcctgatcgaattgctggtgcagcaatgttcgcacctatggcaaatccatatgactccaagatgacgaaagatgagaggcgtaaaacatgggatagctggtcaacgaaacggaaactgatgcacattttagctcggaggtttccatcactactaccgttcttttatcgccaaaccttcctttctggaaagcaaggacagctggagagttggttgtcactgtcattggggaagaaggacaaaactttactggaaggtcctgtgttcaatgcattctgggaaaggaatgttgcagaggctgtgcgccagggagatgcaaggccatttgtagaggaagctgtgctgcaagtatctgactggggtttcagcttatctgacatccaaatgcagaagaaagaggctgggggattttttgagctcatcaagtctctgttcaatcaggctgaaagagagtgggtgggatttctgggcccaatacatatatggcaggggatggacgaccgagtggtctcgccggcagtggccgaatttgtgcggcgggtggttccaggagccacggtccacaagcttcttgacgaaggtcacttctcatacttctgcttctgcgacgagtgccacaggcagatattctccaccctcttcggcattccccagggccctatcaaccctgcaccgccgcagccaggcgaggtggtttcagagctcaccgaagaaacaacagtgccagacaatgtcacagatcaggaacaaggaaaatcaggcctgccctgatcaagatcagttttcaggatcaacagtatagatacaagacattactactaaacacaacacctcatatcgacgggacaggcttttcgtcgctgcttgtggactgagctgctcctcttgcggagtcttgaaggatgaaggcaaagtattggatagaggctgtgccgtttcacttggatgtacaaaaatgctcattacagattcgcacggcacctgctcggtgtgcttttagtatagtcggcattaacattcgattaacctgctatgactgcattataggcttcttttagcacatttgttttggcatgcgaacccaatggttcaattgcgtcctcagctgaattttgttactttgtcagggactgtttgatgtagctccactaactctagattgacctaattcagctttacttcacaag

SEQ ID NO: 43639 - DNA, 205 bp, Zea mays
  unsure (1)..(205): unsure at all n locations
  Clone ID: MRT4577_139805C.1
ggcggcgtaggagcaatccggcgagccacaatattcaattgatgaccatccacaaggagaggaagaggctactgatgatggtggcgttagcgtcatggtcactcagtgtgtcaagaggagcaaaagcaagactcccgggatttgaagaccaaacanncactgccccanggtnnttaaactcccatggccaatcccaatgccattg

SEQ ID NO: 43640 - DNA, 1087 bp, Zea mays
  Clone ID: MRT4577_139806C.1
tgattggtgttagcttaagaattcttagtattcatcccttcgattaaatgtgaacatttgccttttctcgtgccaagtactaatgttacggcattattcaggacaaaactttactggaaggtcctgtgttcaatgcattctgggaaaggaatgttgcagagtctgtgcgccagggagatgcaaggccatttgtggaggaagctgtgctgcaagtatctgactggggtttcagcctatctgacatccaaatgcagaagaaagaggctggggggttttttgagctcatcaagtctctgttcaatcaggctgaaagagagtgggtgggatttctgggcccaatacatatatggcaggggatggacgaccgagtggtctcgccggcagtggccgaatttgtgcggcgggtggttccaggagccacggtccacaagcttcttgacgaaggccacttctcatacttctgcttctgcgacgagtgccacaggcagatattctccaccctcttcggcattccccagggccctatcaaccctgcaccgccgcagccaggcgaggtggtttcagagctcaccgaggaaacaacagtgccagacaatgccacagatgaggaacaaggaaaatcaggcctgccctgattcaagatcggtttcaggacccacaagtatagatacgagaccttactgctactaaaacacaatacctcaaatagacgggcttttcttcgctgcccatgggagcagcctgtgaatcgagctgctcctcttgcggaagtcgtgaaggcaaagcattggatggaggaggttgtgccgtctcagttcgatgtacaaaaatgctcatcacaaattcgcacggcacctgctcggtgcgcttttagtatagtcggtattacaattcgatgaacctgttatgactcagctatattataggcttctttttgcacattatggttgaattgcgcccgcagctgaatttttgttcctttactagctatggcatgatccaacatcccgatccagcttaaggccagtaatgtattcgcctcttgcatgatgtaaaaaagttcgtctaaagctgcggcacccccagc

SEQ ID NO: 43641 - DNA, 114 bp, Zea mays
  Clone ID: MRT4577_139807C.1
tgtcttttcagaccattagttttatttactgcagggcgcataagaacccggtcgacaccatgagggttttgctagatggccttcttatcctgcatctcgttttatgctcattct

SEQ ID NO: 43642 - DNA, 227 bp, Zea mays
  Clone ID: MRT4577_139808C.1
gaccacgcgtccggagaacttataaacactgttagctccctagacatttaatgatgctttaatatacgaggattgacacttactttctatttaccaacccatcctttgagctcgaaatatcctttcatgatgattggtttacctttttgggttggaaatcaccgaacagtatatttttaaaacaaattaccgtatgcaccatgatgcttgcgccttttgattgctct

SEQ ID NO: 43643 - DNA, 482 bp, Zea mays
  unsure (1)..(482): unsure at all n locations
  Clone ID: MRT4577_139809C.1
gccggccggtttcgggaaagggggaaanacaaaaccaaatttttcaaaaaaaaaaacaacacaaaaaaaaaaaaaaaaaaactctctcctcgatccgggaaacctctcaaaccctgacccgcctccctgaaagtttcaacacctcaggaatctgggcccatgggcgagggaaacgaaaaccttcccatttcaggttgaaatcaaccagctgccctccctcatcataaacaccttctactccaacgaggagactttcctccgcgagttttatcaccacctcttccaatgcgctgaacaaaatacggtccaagcgccccactgacaagagcaagctcgaggcaaaccccgatatttttcttcacccctccccccccacaaggcaaacatacagtctcttcataattaaccggggcattagaatgaacatgtacgaccttgtcacgaacacagatttcaccgacaagccccggacatgggaaccc

SEQ ID NO: 43644 - DNA, 489 bp, Zea mays
  Clone ID: MRT4577_13980C.1
aattcggcacgagggcgagctcggcacgtcattgtgcactgctccaccgagctgagcctgagcgcgagcctccgtccgaagtccaaataatcttcagctctcctcgacgcatgcccggatcgatcggtccagttctacccgccggaggaggaggaggaggcagatcgaccggcagctgactaaggtggatccacggaggaggcatggcaagaggcccctacccgccgccgaggtggaagaggaggaggaggaggcgctgcccccgggcccgccgcccgcaaagcacgagcagctggaggagcctcaccacgccgccgtatcgcagctgcaaggagccacctttagcggcggcggagggtcgtcgtcgtcttccgtggtcggtggcgtcgccgccgcaggcgtacgcgcagtactactactcggcgcgcgccgacaacgacgcctccgccgtggcctacgcgctcgcccacgtgatgcggacctgggctg

SEQ ID NO: 43645 - DNA, 212 bp, Zea mays
  Clone ID: MRT4577_139810C.1
cgagagagagagagagagagagaggtagacggagatggagtgcctgcttgggctgctcaaggtgctggtggtgcgaggagtgaacctggccatttggaaccggttaacccacagcagcgacccctacgtcttcttcggccacggaaagcataaagggaattcaagtttaaaataccgtacgatcaacccaaattggaacaaggagttaacct

SEQ ID NO: 43646 - DNA, 214 bp, Zea mays
  Clone ID: MRT4577_139811C.1
atgtgaataaagttaccatctcattagataagatggtagaacagctgctgatgccttagccactagccagaacagctgttctaccatcttatctaatgagatggtaagcagtatgtgaataaagctggtgttgcttaccttcagtttgtgaatgccattatgtactgtaataaaaaactctgtattgtactccctagcattatcattatgcttt

SEQ ID NO: 43647 - DNA, 560 bp, Zea mays
  Clone ID: MRT4577_139812C.1
gcgagggccacaactacctgccccgagacgagcactgctagcaggagaagcagtaaagacaggaggcaccacgctactctccagcctgcacgcgctggtgacgacgctgcgggcgacggtcattaacaagcaaggatctgatccaacaacagttcccaggcgtcaacgatctgttgagggacgggctccgagtggcggaccgagacccttccgacgacattcggataatatcgcaaagcatatcaaagaaccaataggacaccaacaaccacctgctgacgttctaggtgacctagatgatacactagtaccaaagtctaagcgagacaaagacgatgaccaaatgatgcatactatcgactggctcaacaaattatgcattcatgaactgactgattactctttaagatgcaagctgaacccggaggcatgcgggcacacgggtaatcgcaatgaccacagatatcctcaaataacaggatgaacctgacacttaccgtggagcatgcgctgccaacaaaccgactgctgatgctgaactaccacaacatgttcctgac

SEQ ID NO: 43648 - DNA, 614 bp, Zea mays
  Clone ID: MRT4577_139813C.1
gccgaggagagaagggctcctgtcgtcggtagtgggcgacatccggtgctactccggctccgaccccctccgcccgtggctccgggggatgcggaggatggagagggcgctgccgccagcgacgctgcgggagaagctgcccaggttcctccagaagtgcgcccaggagttccaggacaactcccgctaccgcgacgacccgcggtacctccgcgtctggatccagctgatggactacgtgacggacgcaaagccattgctcaagacgatggagaggaatggaataggcctcaaaagggcttcgttctatatggcatatgcactgtattatgagaagcacaggagattcaatgatgcagagaagatgtaccgtttgggaatccagaaccttgcagagcctattggggagttgcacaaagcacatgaacagtttcgtttccgcatggattcatacaagaagaaagataaactgcaggaaagaatgcctaggaaagtggggtctagtgctacatctatgaaccaagtcaaaggtgaaagcagacactataaagaactgaaatccaatataaagcaaacatcagaaagcagttctaatccttcattagggccaacta

SEQ ID NO: 43649 - DNA, 480 bp, Zea mays
  unsure (1)..(480): unsure at all n locations
  Clone ID: MRT4577_139814C.1
acgccgncgaggacgcgggaccgcaccgccccggcacccncggccgccggcaccncggcngccgacgcggaggaaaaagcgnggnnggccacccacgccgcgagagggggagggcgaggcggnggcggaggggcggcggnggagcngacgcngggacccgaccccacacggggcggggnggccaaccaccgcgcgcnggccacagcaaagcaggggcggacccgcgccgacggaaacgnggangaggggcagagagcgcaggcggacgagaaccgcgccgaggcggcgcggangcgggaggcaaaaaagcgggcggggcncgcgagggacgcacaaccaccaccngcagacgaggnggaacaagccgaagaagaagaggaaaaccaacaaggcaagcgggacaccgagaagagcaganaagaaggggaaagagaagacaagaaaaggaggcgagcagagggggaggagaagagggacaaa

SEQ ID NO: 43650 - DNA, 377 bp, Zea mays
  Clone ID: MRT4577_139815C.1
ccggcggtcatccgcactctgtaagaacgccgcgcgtgtagcatcactccccgatcccgcacgagcagacgcttcctccttcgcctctcgcgagagccacaccccgtgcgtctccagaggaagaggaggatgatgtcgatcaccaaaggcgtacaccgctttgggaatcgggctagaccaacacgaaggtctactgctgcttctccatcggggggaaggtgtacaatgtgaccaactttctggacgaccaccctggatgcgatgatgtcctgctgtcttccactgtctaggatgctaccgacgatttccaccatgtggtgtagagcccactcgcccttgcaatgctggacgagaaccttcgtcggcgagattggatg

SEQ ID NO: 43651 - DNA, 616 bp, Zea mays
  unsure (1)..(616): unsure at all n locations
  Clone ID: MRT4577_139816C.1
acgcctgcggctccggtccggaattcccgggtcgacccacgcgtccggatccagctagaccgcgagcgcgcgcgtccccagccctcgagccgccgcccgccgccgcgccgcgcgatccgcaccggcctccccgagagcgagccggacgccgcgactgccaccgcgctaaccgccgccaaccgccaccgaggtgcccggagagagcggagaggcggcatgagcgaggcgggcgaggccaccaccggcggcaccacgctcccgcaggccgcggccgacgcgcccgccgcggcgcccccggaccccgcgcctaagagcccggcggccagcggcgcgccccaggccccggcgcccgccgcgctgctcgcggggagccccggcggagacgcagcccccgggcccgccccggcctcatcagcccccgcggncggcgaggacgcggagaagaaaggtctcgccaccaaagtgcttggcactgtcaaatggttcaacgtcaaagatggctatggatgtatgaaccgaaatgacaccaaagaagatgtgtttgtgcgccagacggccatgaagaaaaacaacccgcgcaagggtctgcgcagtgcgggggatggagaaactgtac

SEQ ID NO: 43652 - DNA, 337 bp, Zea mays
  Clone ID: MRT4577_139817C.1
ccgcgcggtccgcagacaccagacaaaccagggggcgcagccgcgcccgacaaccagcccagcggcgacatccaccacaacagacccgcggagcgacagcccaaaccagccgacagacacgcgagcgcgacacaaccggaaccacaagcacaccatagaagcacccagcggagaaacaagccacagagggggaggcgcataatgaccaaacacacacccagcagccagaggataccagaccagaccaagcaagggacaacgaagacaacacggcagcccacccaagacggggagcaactaaggcgcaaacaagaacacccaagccaccccagacaca

SEQ ID NO: 43653 - DNA, 517 bp, Zea mays
  Clone ID: MRT4577_139818C.1
tcccgggggtggaaaccctagctgtcgaatccgccgccggcgagacggctgccgcccaggcgcctcagcggaagaaagagacgctccatgagctgctctcgaggcacaacacgcgggcgagagaagaaggccatagctagagggggatcatagctgcactgctgctggtaggcttttagcctcgaagtatcagggtctcagtggatgccaaactgggaccaatcagaaccacactgctggactggtcgtcctacggctggtgaaatttcttgaaagacattttgctactattttggtgataggtatgttttgtttttgctgacgctgaaagatttgtattagtactgaataggttatgggcatgtttggttcagcttttttctgattcgcttttccgagaatctagctgtgagtagaatctggctgtgtagagaatctgagtatcattaggattacatgcggaggaagataaagttgtccatggggctcaggatctataaagtgacggattactatt

SEQ ID NO: 43654 - DNA, 493 bp, Zea mays
  unsure (1)..(493): unsure at all n locations
  Clone ID: MRT4577_139819C.1
gagtccggcctggaggagatattntgtgtttatgcacaccccaacgttgactcctctctaaaatgcccggcagagagaaaaactggtgatgtcagatgggcattttattaacgagccaacttagggtgtgcgtaaaccctaaatattctcttggcggtggtggaaaccctagctgtcgaatccgccgccggcgagacggctgccgcgcaggcgcctcagcggaagaaagagacgctccaggagctgctctcgaggcacaagacaaaattgaagtgaagtataatttggaacgaatctactgtagcacgcgggcgagaggagaaggccatagctagaggggaatcatagctgcactgctgctggtaggcttttagcctcgaagtatcagggtctcagtggatgccaaactgggaccaatcagaaccacactgctggactgatcgtcctacggctggtgaaatttcttgaaatacattttgctactgttttggcg

SEQ ID NO: 43655 - DNA, 1817 bp, Zea mays
  Clone ID: MRT4577_13981C.1
tggatgggccgggcggtctgctctgtcgccgccgaacaccgccgccaggctcctcctcactgcactgaacgaaaaacggcttcaaagggcccgcccacgcccacgcccacgccccgcccaccgacccgacaaaaatgttgttgccggggatgttggcggcgcagtttacggctctctctctatcccagtcaccttcgccacagtccagcttacgccttgccatccgcccttcgctggcggcgagggcccgctttgtcgctccgcggacagcagcctctgcggccgccgtatccgctaaaccggcggcggtttcgtctcccctaattgaggaccgcactgtcgtccgtatcgggctccccagcaagggccgcatggccgagcaaaccctaagcctcctcaagagttgccagttgtcggtgaggcagctcaacccgcggcagtacactgcagatatcccgctgattccaaatttggaggtttggtttcaaaggcctaaggacattgttcgtaaacttcagtcaggcgatcttgaccttggtgttgtgggttttgacatagttagtgaatatggaaacggcaatgaggatttagtggtcgttcatgatgctcttgagtttggacattgtcgtttgtcccttgcggtacctaaggaaggcatttttgagaacatacatactatggaagatttgctaaagatgtctgaatggacagaagaaaggccactacgtgttgttactggatttggatatctaggcgataagttcttaagagagaaaggttttaagcatgttcgttttttatctgccgatggagctcttgagtcatatcctcctatgggtatggctgatgctattgtggatctcgtgagtagcggaacgaccttgcgtgagaataacctaaaggaaattgatggtggagtagttctggaaaagccaggccactcttgtagcaagtaggaaatctctgcacaagcgtaaaggtgtgctggaggttactcatgagttgcttgaaagattagaagctcacctaagagcaactgcagaattaatggtcaccgcaaacatgaggggcaacagcgcagaagaagtggcagagagagttcttagccaaacatctatatggggattgcagggcccgactgtaagtcctgtctatcgcagacgtgatggaaaagttgatgtggaatactatgccattaatgtggttgttccacagaagttgctttacaaatctatccaacaactgagatcaattggtggcagtggagtcttggtaacaaagctgacctacatattcgacgaggagacgccaaggtggcgcaatctcctctcggagctggggttgtaacttgggcgcatggtcaacttcgggtctcttctacaagttcccatatgtactgcaccacattcgtttgtcagtaccgaagcatgtaaacccatatgcagaagtgagaccgtgtggtatctgttttgtacctcttcgcttcaggaaattttggcctgtatcttgaccatctgagatgtattgatagagttgggtaatgctgttgggcgtatgtgtatttcttgtgcggttgtgcctgacttctcttgccggggcactgaataatcggccatgtttgaataaagaaagccggtatggttctcattaaaaaaaaaaaaaaaaaaagagccgaaaaaaaaaaaccgaaaaaaagaaaaaagaaaaaaaaaaaacttaaaaaaaaaaaggggcttgccgttttaatggcctgtatcttgaccgtctgagatgtattgatagagctgggcgcagcaacggcatatcccgacagcacg

SEQ ID NO: 43656 - DNA, 380 bp, Zea mays
  Clone ID: MRT4577_139820C.1
agaccaccagctatagctactgcacagcgcaagatagcccaagcgacaccatgagggagtggctcgttgccctagaatctacaggctctcgctgcgagcgccacctacacgcatacaagcggcggatgcagctgacagccaccgccggcggttcatctaccgccgccggtgcatctgccacctgcggttcatctgccacctacggtgcatctcccaccgacggtccacctgacgtcgtcggtgcacctgccaccgtcggtccatgtgccgtcgtcggttcatgtggcgacggcaccatgccaataccctactgaaccagcccggtctcagcctcatccccagccacacccatgcccgtgccaacagacgcatgcaagccc

SEQ ID NO: 43657 - DNA, 608 bp, Zea mays
  Clone ID: MRT4577_139821C.1
cattggtacctcgaggcggcggacgcgagtaagtgactccaaggacgtcgacctcagccgccggctcggcgagctgattcaggcccttcccgagcggacgcagagggtcgggctcgagtccgatcttcgtccgcgccactctcggccccgacgctcacgctctcgccgctgctcgactcccgcgagcatggctcaccttctccgtaccatcgggctctttctaccatcgctcgaagcagcgcgcagcgcgtcggccgtgccacatggaggtcactgcaacctcatgctcgacgagacccaccacgtctacacacgcaccgatggtgtatctcttcaacatgccgcagagagctgctgccaatggcgctgataacgtcgacaacatgttccacagatgcatgcttgacatgatcaataagaacggcatgacagatgtaggctgtaaggtgggatcacgtactatcatcctggcttacgagtggctggctatcaagcgctgatatcaatactcggcatagtcttgaacttcttgccgctacgaaggagatgatgtgatacaacccatgcctacagcgatggagcatgggagagtatagatgtcctccgac

SEQ ID NO: 43658 - DNA, 586 bp, Zea mays
  Clone ID: MRT4577_139822C.1
gggaccctcgagggcgggcggggcgggttacacaatacacgagtcgacgccggacgtcgctctctacagctcatactccctcgagaccttctcaatccatttcctctttctattctggaccatctaggtggcaacactgagggtggctcctagactcccaagaagaggacgttctccaagtacagctaccggggcagctacctacatgcacttctcgaaatgaccacgaactacctacctacgttcttccccggatgcgccaggagaacgatccagaggaggctgaagagcgaatcgctggcgactcctcaagaagactgcgcataggtggagaaaaagatgctcctgctgacgataaactctatgagctcgaaacgagaccatctccgaagcatgctcattggcactgcgacgagaggaacgcattgatggagtctacgacgggaaaaccttccaccgagttgacgatctacgctgagatgatccgcccctaccttgctgagctctccatctcctataaatcggtcaagcatggtaggaccggatatggtgccatccactcctcgcggtttattcctctgaaatg

SEQ ID NO: 43659 - DNA, 554 bp, Zea mays
  unsure (1)..(554): unsure at all n locations
  Clone ID: MRT4577_139823C.1
cggccccnnnnnnnnntttttttttttttttttttgaaaaaacattgatgtttaagattttattaaaaatgataggtatatcgtgaaaatatatttcatgataaatctaacgatattattacagttcctcccccgtaatttacagtcttgcccaaaaatagtaatggtgctattacacagacaaaatggtagccccaaccaaactctttctgaaatcaccaaatggaaaaggttgtccattgatgtccctagtacatcaatacatcatgacaatatgctagactatgctcaaaagtaggtgctccacggtcttggtctgataagagctccataactaggtcagagatactacagcagtgggacacaattaaaaaagcagccaaacaaaaaaaacatccattcttgtcctgtaaaactgctgttgaattatcacaggtcactttgacatgtacaaagtaaaccgtaggctgcacatgacctgaggatgcttgcaatagcctcaagctgcccgcctcgtctttcagctgatttgcagtttgggtcgacgcggccgc

SEQ ID NO: 43660 - DNA, 320 bp, Zea mays
  Clone ID: MRT4577_139824C.1
actaggacgcaccagggcaacggctcgaatgggacgtggtccacaacggtttggtttcaaggccccacgtgccagatcattcatctgcaggaactcacgcccacccttgacaaaatgagatggacactgatgcagacggagaaccactcagaggcggtgggggcgaaccgtcgagcacagatcatcgaagcggacaacaacacgacgtggaataggggaatgtgactgaagaagcaagacctcgtgctcgaggccaaggatgtgctaaagcaaggacgccccacggaggtagaacatctgccgggagcctactcgaacct

SEQ ID NO: 43661 - DNA, 446 bp, Zea mays
  Clone ID: MRT4577_139825C.1
ggatgagttattgtttaatattttagagaagatattagtggtcgttattagttttttatttctgcttgtttatttgcccatgtgggggggaggggaacccactaaagtcattcccttaaaaacggcaacgccaaaaaaggatgtccaaatttaagggattgacctgcaggggaattttttttcggccactggggaaaagaaacctgcgggggggaaaacttaatacgggcccttttttttttttgggggagttttttaaaaaaaaaatcaaaagccgggggcggatttccgggttttgtaccccggggggggaagttttaaatttttttttgggggaaccaaaattaattttttgggggggggttttaaaccggggggaggggaaaaacctgggggtgccccaacataaaagttttgaaaaaaaacccttttttaaaagggggggg

SEQ ID NO: 43662 - DNA, 359 bp, Zea mays
  Clone ID: MRT4577_139826C.1
gtttttaaagatatttgcttccaaaacacaatggatttatgggaaggggtgtgagctttaaagaacatgtgtttttaaagatatttgcttccaaaactcataagatgattgccatcttgagctccaacttcttgaggatgtggttcatgttcaagatgtcatcttgcttttgttactctcggagcaagctgatatctagaaggctatagggaggtgaacaacctataaaaaatattctaataaaggcttgaaataagaactagagactggataaaaacttatatgtgagaagcatatttcttgatttagttctagtgtgtttttgctaggtaacaaaaagataccataataagggagct

SEQ ID NO: 43663 - DNA, 273 bp, Zea mays
  Clone ID: MRT4577_139827C.1
atcacgacaagatggcatgcacaaacaatgcgatgagagccttgttcctcctggtcctcttgggcatggtgcatggtgagaaggaagagtcaaagggcatcgatgcgaaagcgttcggtcctggtaggtccttcgacatcaccaagctgtgcgcctccggcaatggcaatgacagacagcactaatgctgtgcaagatgcttgggcattggcatgcggacgtactgcgaaacagacaatgctcatacccaagggcgaattacttgtcggacaa

SEQ ID NO: 43664 - DNA, 439 bp, Zea mays
  Clone ID: MRT4577_139828C.1
atagggtctaaaatccccttgttatttaaaattgaataaaagaggattttagccgcaccaatcctctacggttttctggctcccaaactagccctaatgttcacaagcaacagctacaatatggatccaaatacccaaccccacaatggataccaaattagttgcaaaacttctgtacagatctgttacatctttctgccaagaaacaagaaacagaaaaccttttgagtgccgactgccgacatgtttggtattcgctgcagtaaactcaagtataaatctaccctgcgattgttagacttactttaccaacggactgtactgtgaacgttttgctaccgtcgttggtggtgtaagtaacattagtagcttcacactgcgtccatgtggttcttcggaagctgttccagagcagcggttcacatggggtgagtgatga

SEQ ID NO: 43665 - DNA, 456 bp, Zea mays
  Clone ID: MRT4577_139829C.1
ggaagaccaccctcgccaagagggtcttcgctgatcagcgcgtgcgcgacgagttcgacctcagggtgtgggtgtgcgtgtcgcaggacgtgaacgaggctgacctgctgtggtccgtcctcgttggcgccggaggcggccaccagttccagcagcagcacgacgccacgccggacaggtcgtcgctggagcccgcgctccagcgggccgtctcgggaaagaaggtcctgctggtgctggacgacgtgtggagcgacgtggcctggaaggaggtgctccagaacgcgttcagggccggcgctcgtggcggcagcagggtgctcgtcacgacgaggaaagagacggttgccaggcagatgaaggccgtgcacatccaccgcgtggagaagctgcagcctgaagatgggtggcgcttactcaagaaccaggtagtcttgggcaggaatccaaccgaca

SEQ ID NO: 43666 - DNA, 1907 bp, Zea mays
  Clone ID: MRT4577_13982C.1
gcaatgaggatttagtggttgttcatgatgctcttgagtttggacattgtcgtttgtcccttgcggtacctaaggaaggcatttttgagaacatacatactatggaagatttgctaaagatgtctgaatggacagaagaaaggccactacgtgttgttactggatttggatatctaggcgataagttcttaagagagaaaggttttaagcatgttcgttttttatctgccgatggagctcttgagtcatatcctcctgtgagtctgcttcctctccatttgttttccttctgttttccttgtgatcccctcccttttttttgcttcatgtatctattttaaatttgattggcccaatagtgcaggctacccttttctgttccccaacagtacttaaatttagatctttagagaatctgtaagtgctaattaattgttttattatatgttggtcattgctttatccagaaattattacgccacatagaattatgtgtactattgtccctgctatacttgtttacgttcttgctctagtagttatgattgctggcacgaattctgtatgggttatatatatatatataaaacccggtctgcaggggtaagaccaccccactgcattatattaagaagaagaccttctcacgcatgtcgagaaaacccccaaagccttgcaccacttatacacaacggcaccgtaacccatgtgaaaacgaccagggccgggccttagacctgtgctttggcgtgggacagacgagtggatttttatatgactgatatagattatgggtgtctgagctttaacccttcacatggatcgatttgtttatttactttaggtgccactggaatgtacactggtgtctttttttactagcttgcgagttgttgcgtaaagaggctatcaaggttaattcatgttgctaatttcctcccccctgtgaagatgggtatggctgatgctattgtggatctcgtgagtagcggaacgaccttgcgtgagaataacctaaaggaaattgatggtggagtagttctggaaagccaggtaaactttctcgaacacacatgcatgtgtcgggcacacactcttcagtaggcaatatttcacagttggtggttcctttgtcaaagagaaaagtttacccctttcctgtttcctaagatataaaattctatgcaggccactcttgtagcaagtaggaaatctctgcacaagcgtaaaggtgtgctggaggttactcatgagttgcttgaaagattagaagctcacctaagagcaactgcagaattaatggtcaccgcaaacatgaggggcaacagcgcagaagaagtggcagagagagttcttagccaaacatctatatggggattgcagggcccgactgtaagtcctgtctatcgcagacgtgatggaaaagttgatgtggaatactatgccattaatgtggttgttccacagaagttgctttacaaatctatccaacaactgagatcaattggtggcagtggagtcttggtaacaaagctgacctacatattcgacgaggagacgccaaggtggcgcaatctcctctcggagctggggttgtaacttgggcgcatggccaacttcgggtctcttctactagttcccatatgtactgcaccacattcgtttgtcagtgccgaagcatgtaaaccgatatgcagaagtgagaccgtgtggtatcttttgtgtacctcttcgcttcaggaaattttggcctgtatcttgaccgtctgagatgtattgatagagttggggaatgctgttgggttgggcgtgtgtgtacctcttctgcggttgtgcctgacttctcttgccggggcactgaataatcggccatgtttgaataaagaaagccggtgtggttctcattc

SEQ ID NO: 43667 - DNA, 498 bp, Zea mays
  Clone ID: MRT4577_139830C.1
cgagcgattcccactcccgatcagcacatgatcactaactcttgcagctcgagcattctttagctgctctagctctagccctagctcgttcctagccactgggccgcgtagtgatcagccttctgatcgtgacccatggccactgccgatgtccagaccccatccgctgtggcgaccgaagaagcgccggcgggggatacccctgctacgcccgccgacgtgcccgaggaggctgcccccgccgctcgagccaaggtggaagagccagctgccccggcagagaccgagccaactgccgccgctgatcccgatgcgtccccaacggaggcggaggaagagacgccaaaggaggcggagccggagccggcggcggctggagaggtgaaggaggaagcggcagcgcccgctgccgagacagaagcagaaccagcaggcgctgagccctaggctgctgctgaggaggaggagcccgtggaggccgcacccgtcgctgaggag

SEQ ID NO: 43668 - DNA, 295 bp, Zea mays
  Clone ID: MRT4577_139831C.1
cccacgcgtccgtccattcgtgcgttcaataaatccaaaataaagcgtgctcactggactgatcattatgatagtggacggtgcaagaatgaacttgatgattaccatgatcttccagatatatctcttccatctgataaacaaatgaaaagaaatcggcatacgtcgctactattatctcactacgatgatgatccagctgatgtatgtactgaaaaacatagcatatatactgatactgaacgctgtttcttcccacaaccttcagacgtgccacctatacatgagcgacgga

SEQ ID NO: 43669 - DNA, 501 bp, Zea mays
  Clone ID: MRT4577_139832C.1
ccggccgggaaacagactttccccaatggtctcgtgtagccatcccgccttgacataccgccaggctggctcaagaggtcgctgatatcaagaagctcattcacatctgccgtcggagggacgcctgctccgtcgcgcatctgaagacccagaagacgagctacatcaagttcaaggtccgatgccaagagaacgtctacaccctgcgtcttaatgacaccgacaaggcctcagaagctcaagtagaggctcccccccaccctgcagcttacagaagacttgcacaggaacaagtatgcttaaatgaacgtgggttgtaaacgtgttactctggtagcggcaggattcacatggaagggacgttttgcgaccttgcatttcatcatgtgctccgaagggaggatactccatatcaatccaaaaaataaaaagaaccgattctggccaagtaaccggccaccaggattacccgtggtcctccacttcgaacttttgtgccat

SEQ ID NO: 43670 - DNA, 391 bp, Zea mays
  Clone ID: MRT4577_139833C.1
cccaaagaaggaaaaaacttttggcctttcaaattttgcaatcccaaatgtcagtccccctcgccccggaagaggggaaagaaattttacccttttccccaaaaggggtccattttattttcggctccctaagtccctttccaaagccaatttgaacttgggagggctcctaaagggcccgtttcgcaaaaacagttgcaaacctaaagagtccttttccccccacccgatatggttcgaatttcccctttcgctttgtaaatcgttggttttttacagcccaggggggacccctgattttttttccgtcagaagtttgttccccccctccccagttgtccacaggggtacctgagctcccaactttgggattttttctgccctttgggac

SEQ ID NO: 43671 - DNA, 468 bp, Zea mays
  Clone ID: MRT4577_139834C.1
gccggccgggttcccgttatcgagagataaaaaaaaaaaaaaatcaccaaaaaaaaaaaaaaaaaaaaaaaaaaaaaaaaaaaaaaaaaaaggcccctaaggaaaaaaacccgatcaacaacaagggggggccccctgggttgaaggaattcttaaaaaagtttgcccccacgggggacccggagggggagtccggcctaacttaaacggtataccgggagggattgcccggtaccaatggccgcttataaagagcgaaatgagggggaaaaccggggggtgacctaaaaaaaacgcctggggaaaaaccctggtttccccagatgaagtaccccttgaaaagccccccccctatcccccttgagaaaaaatggaaaagcccaacgccaaaggccctccccaagggtgaccattgggaaaaggtcgggggaaaattttggtaaaatcacctcgttaaattaagccaaa

SEQ ID NO: 43672 - DNA, 610 bp, Zea mays
  Clone ID: MRT4577_139835C.1
ccaaaacctctatgaatcgccttgaaatatgcactcgtacctacatgcccattgagatatcctatgaaaagcttctcactaataggtataactctaaccatgccatgtaagtcttcctagaaacatctcttagcactcttatcgtggcctagttttggagcatatacactaattacgttaaagaccaaatcacccacgacaagcttgaataaggtaatcctatctccttgccttctacatccaccacactaccacactgttcttgatgcttttaccaatcaaaaccccatttttatttgcaactctccttgtgtactaaagcttaaagccagtattgtcgaccccccccttttgccttctcaccctttcatttggtctcttggacgcataagatattaacacacttcctagtcgttgtctcaactaacttccttaactgtacgtgaccccacatttcaattgcctaaatggatcctattttgtttgattagcttccttacccttcgcaggacatgtgcgaagatccttgtcgatgaagcacaccactaaggaagtagcgacccgatccttgctcactttacaccgtgcctagattgcgacacaacaccac

SEQ ID NO: 43673 - DNA, 145 bp, Zea mays
  Clone ID: MRT4577_139836C.1
tcgaccgacgcgtgcgtccacgcatacgatcacccactccatcatgtcttttatctcatagggggctagcgttattggacgttctttctttactgcctgttggctaatcctatccccctgaatgtcattttgtgcgtacatagag

SEQ ID NO: 43674 - DNA, 242 bp, Zea mays
  Clone ID: MRT4577_139837C.1
ggcccccggaaggcagttggccaccaaggcggtaaggaagtcggcgccaacaaccggcggggggaaaaagcccaacaggtccaggcccggaccaggggcgttgcccaggatccgaaggtcccaaaaaagcacggggttcttgatccgaaggttgcctttcaagggcctggtgcgcaagatcgcccaggatttaaaaacagacttccggttccagagccacgccgggctggcgttcccagagg

SEQ ID NO: 43675 - DNA, 819 bp, Zea mays
  Clone ID: MRT4577_139838C.1
atgcgcagggatgggaggtacgggaagaggacactgatgggctgcatccgttgtcaagtcatggaagagagcagaaacatcgtcgaacagcctttctcgcacctcccttcccagcaagcaccggctagctgtcagtatgatgaggtgctccaactcgtacttcaaatcaacagtgccactttctccccactttgagaagtactcctcagcctcaacaaccatctggtcgacatagctgcgcagcttattggcccggagcgcctcggtgaagaacctgaactgctcctgcctgatggagtagtcgacgtcaaagacgaccccggggccgaaggtgggcacgttgaacctgtacacctcctgctggctcatctcggcctcgttgcccttgaagaagtgcgcggacacctcgggcccgacgaggaacgtgatcttgcggctgatgatggggacggtgaagacgctgccgaggcgggcgtactgctcccggatcatcgggataggcccgcgcatgaacttgacgaggccgccgaccaccggcgcccccgggatggtgggcggcaggcgcttgcccccggagcgagagcgcaggaggaacctgaagaaggcgacggtggcgaccagcagagccgcgccggcgatgaaccgctgttgctggctgtcggcgagatccatcatctgattcgtgggaaacgaacggcagttccgtggggttaggatgcagagcggcaagcactagctacaggtatgagagaatctccttttgcttctcctattccaattcgtcgggacggggacgaggacggcgtcgtgcccggccgg

SEQ ID NO: 43676 - DNA, 438 bp, Zea mays
  Clone ID: MRT4577_139839C.1
ctgcttgacatccctttctgcttcaaaagagtggacgccatgctctaccgggcgaatttcgacggcgaaattaactacctcaggaaatctttccagacactagagggagcctgcgacgatctaaaaggcagtagactgttcctgaagctactcgaagctgtcctgcaagccgggaaccgaatgaacgtcggcacgaaccgtgggcaggcaagagccttcaagctggacactctgctcaagctcgcggacgtcaaaggcgccgacggcaagaccaccctgctgcacttcgtcgtccaggagatcatccggtcggaggaggacgcgaggacgacgtccgagagagccgcagaggatgaggccagaaagatcgcgagagacgagacgttccgtagtaagcaagggctgaaggtagtgtccgggctgagcggcgagctcggg

SEQ ID NO: 43677 - DNA, 486 bp, Zea mays
  Clone ID: MRT4577_13983C.1
ttgcttcccctcgtcgtctgcacaagcgccgtggccaactctggcccaaccccgacagatcttcaattccccatctccgcccaccgatcgatcttcacgccagtctcggtctcttccgaaggcgtcacgcgtggtcgcctgagaggagaggaggaagatgatggagggcattgccggccatgtcgcgcaggacgtcatccaagacgactacgaatagtgggaactttactgtctcgagcacgaaatctgcactgatgtccgagtgtctggagataacaccgcggcacataacgatgatgcctacagcaccttcttcagacatagtgccgatgggaagtacagtccccgagcaatcttcatcaaactataccccactgtgctcgatgaggtgcgcaactggacccatacacgctcaggaatttcatgctgctccacattcttctgaagaatgcgtatgactgggactaacaatttactcccgtgacc

SEQ ID NO: 43678 - DNA, 2104 bp, Zea mays
  Clone ID: MRT4577_139840C.1
ccgggccccccttcggggccgctttttttttttttttttttttttttttgtttttacactgaacacctgagtttattcattgcagcgaggttatttgttcagttttgtgtttatagagaacgataaacatcaggatttcaacaataaagccacacgcttatagatgctacaggttacagatttgactaaggggaatgctgagctaggaagctagctaacaagcggatgttgcacatcatggcagcccccatggtgaagcaaattacagaatcctaaacaacagaaacacccctacaaagctggcgtgcgtgcagcagaacttgcactgaacaaatgctgacaaacatgtgaaaacaattgaatcaaaaagaagcaagcatctagagactgcgaccacaatcttagttgtccacggcaagcttccgcctcttgtagttaaccatcacctcgcccttgatgccaaccaccatggcgttccagtcgttctctgggaatggcgataccagctcgaactcaaagttcctcagtaggtgcgtccagatcgccttgatctgcaggtaggcgaagggctcaccgaggcacccatgcctgccgccaccgaaggagatgtatgagaaggcgcctgcagccttgtcctcctcccttccaggaccgaaccgatcagggtcatacgagtcagggttcttgtagatgtggggcagcctgttggcgaaggatggtgatgtcgcgacgatgtggcccttggggatgtcatactctttgccttcctttgttgtcacggtgaagtcactgtgtgattggcgaagcaacataatcagcggcgggtggagacgaagggcctccttgatgcaccggtagaggacatccatctctgccaggatgtcatgatcgatcttgtcgccatgccgtttcatgacatccttctgctcctctacggcttctgcaaagtactgcttgaagcgaagcatgtatgctccagtccaggttgaggtgattgagctggtgtgctgtccagcaaagagcgctgcgataagtagcccggttacctcaccctcggtggtggggcgcccattcttgtacttggaatcaatgaagcactgcagcatgtcttcctcagactgtccagaggccttgcgggacttgatgatggtggcaaagatttctgccaaacgtgcccgtgccctgtcgcggcgcttatgcgcagggattgggaggtacgggaagaggacactgattggctgcatcccgttgtcaaggtcatggaagagagcagaaacatcgtcgaacagcttttctcgcacctcccttcccagcaagcaccggctagctgtcagtatgatgaggtgctccaactcgtacttcaaatcaacagtgccactttctccccactttgagaagtactcctcagcctcaacaaccatctggtcgacatagctgcgcagcttattggcccggagcgcctcggtgaagaacctgaactgctcctgcctgatggagtagtcgacgtcaaagacgaccccggggccgaaggtgggcacgttgaacctgtacacctcctgctggctcatctcggcctcgttgcccttgaagaagtgcgcggacacctcgggcccgacgaggaacgtgatcttgcggctgatgatggggacggtgaagacgctgccgaggcgggcgtactgctcccggatcatcgggataggcccgcgcatgaacttgacgaggccgccgaccaccggcgcccccgggatggtgggcggcaggcgcttgcccccggagcgggagctcaggaggagcctgaggaaggcgacggtggcgaccagcagagccgcgccggcgatgagccgctgttgctggctgtcggcgagatccatcatcttttgcttctcctattccaattcgtcgggacggggacgaggacggcgtcgtcggggagtggggattccgggtgcggggtgcctatatagatgtgccactgccaaatggaggagggagtggggtgggacagtgagagatcccgtggttgcgggggaggagtgtggaaggattagcaacggcggataggaggcttacgcgtggcgccccctgccggcctcgaggtacccaa

SEQ ID NO: 43679 - DNA, 473 bp, Zea mays
  unsure (1)..(473): unsure at all n locations
  Clone ID: MRT4577_139841C.1
aagattgttaanngttgnaagtgggtattggnagagattgntgtnaaagaagtatttgaggttgtagatttttttttttagaggnnaanttggttggggggggggtatattgtaaggttggtgggaaattggaggatatngaggttgtatatggaattattgttganaaagatatgagtnatttaaaaatgggaaagagaattgaggatggtaagattgntattttganatgnnnatttgagnnanngaagggtaagatnaagnataaggttgatattgatattgtngagaaatttnatgaattgngtgagnaagagnagaaatatttngatgaaatggttnagaagtgnaaagatgttggtgnaannttggttatttgtnagtggggttttgttgatgaagnnaattatttgttgatggatagaaatttgnnaggtgtnagatgggttggtggtgttgaattggaattgatt

SEQ ID NO: 43680 - DNA, 893 bp, Zea mays
  Clone ID: MRT4577_139842C.1
cccctctctctctctctcttcgccgcccctgtttccgccgccccctgtaaacctcccatccgccattgctaatccagccactcctccccaaaccacgggatctatcctactccctcctccattcggcagtgccgcgtggcacacctatatataaacacccggactccacactccccccgcatcgccgccccccgtcccgacgaattggaatacggaaagcgaaagatgatggatctcgccgacccccagcagcagcagcggctcatcgccggcgcggcgctgctgctggcaaccgcggccttcctcaggctcctcctgggctcccgctcccggggcggcaagcgcctgccgcccaccatcccgggggcgccggtgatcggcggcctcgtcaagttcatgcgcgggcccatccccatgatccgggagcagtacgcccgcctcggcagcgtcttcaccgtccccatcatcacccgcaggatcacgttcctcgtcggccctgaggtgtccgcgcacttcttcaagggcaacgaggccgagatgagccagcaggaggtgtacaggttcaacgtgcccaccttcggccccggggtcgtcttcgacgtcgactactccgtcaggcaggagcagttcaggttctttaccgaggcgctccgggcgaacaagctgcgcagctatgtcgaccagatggttgctgaggctgaggagtacttctcaaaatggggagaaagtggcactgttgatttgaagtatgagttggagcacctcatcatactgacagctagccggtgcttgctgggaagggaagtgcgagaaaagctgttcgacgatgtttctgctctcttccacgaccttgacaacgggatgcagccaatcagtgtcctcttcccatacct

SEQ ID NO: 43681 - DNA, 305 bp, Zea mays
  Clone ID: MRT4577_139843C.1
ggagcagcccagccaagcactgtcaggaatcctgtgaagcagctccagctatgtgtgaagaagaggacagcactgccttggtgtgtgacaatggctctgggctctgtaaggccggctttgctggggacgatgctcccagggctgttttcccatccattgtgggacgtcccagacatcagggggtgatcgtgggaatgggacaaaaagacagctacgtgggtgacgaagcacagagcaaaagaggaatcctgaccctgaagtacccgatagatcatggcatcatcaccagctgggacgacatggaa

SEQ ID NO: 43682 - DNA, 658 bp, Zea mays
  Clone ID: MRT4577_139844C.1
gtatggatctactggaaacaggcactacttctcttgtggaatctttaaacacttctaatcatcaagaagtccatgacaccttacatgaggagtccattcagctagaaaatccaagcactgttggaaagaagaagaaaaggaaaaggcgtcaattgtccccttcaaaatctgcttctgctcaagagacaacagaaccgtcagctacagcagttgatttattaatacccacaggtgaagttctgtctaataacagcccagggatacagatccataatatacatgcaatggataatctttcacaagaaaaggagcagaaaaaatctaggactagttctcctgacacatcaaataggcatttactggaaacaaaccctacttctcttagggaaactctaaacacttcaaatcatcaaggccatgacactttagatgaggagttcatccagccagaaaacccaagtgctgctggtaagaagaaaaagaaaaggcgtcaattggtcccttctaaatatgcttctgctcaaataacgacagaaccatcgtctggggcagccccagcggatttatcaaaatccacaggtgacaaagcatataatgctgaattgactagcaaaggtgaaactgtagttgaagcatctggtttgcctctttcatctta

SEQ ID NO: 43683 - DNA, 429 bp, Zea mays
  Clone ID: MRT4577_139845C.1
cctgtcgacgggcaccctttttttgttctttttaaatctgccccgggcagggcgtgttaacaaaaatagcaggtgctggcgaatatacatcaataaccatgtcctaacctctgctccccatggttgccggtgatcaagcgtctcggatgttcaccactttacggataactcgagtttcttccgccagagcatatggttgtggcgttgctcaacgggcaaagaacattgactatttttataactggcgttgtaggtgactccacctccacggtcgcgataaagcgccttttgcgaggagctccaagcaccctggcccttgcgatcgtgtctaccctccctccatggtagcctctccggcccctgaagggggcaggcccggggctccgtccctgacgagctgagatcctatccccatgcgtgttgattcac

SEQ ID NO: 43684 - DNA, 599 bp, Zea mays
  unsure (1)..(599): unsure at all n locations
  Clone ID: MRT4577_139846C.1
ngactagtgggaagggactgaagaagagcgagagaggtgggtgaccgccgcgcctccgtccagacttccagttccaggcgtggcgaactaggcaagcggcacgctccgccttcgcataccctccgcgagtgagctccagttgcctccaccgccgtactcagcagcggagaccggcgagtcaacaggtagcagagggggaggaggggagcagttcctattcgcccgggcaccgaccgcccggagcattcccgttcccgctgctgcgtccgctagtttgccgtcgccctgttgcacgtacggctagggtttggagatagatccgcccgccgccccgccggctcgtgtagatgcacgccgtgctgcagggaggagtagaggaagtgcctggctcgcgtggttttggttccttgttctgaaggcttcgtagcgcgcgatccggttcggttgcaatcggtagtaatgtcgggctcgtcggccgcaggggaggacatagtgcagcacctatcgtccaattccaacccgtcttcgtcgaagctcgccaagctcgaggcacggatggccggcaaggctgtctccgcgccatcgtcaccggcgcacca

SEQ ID NO: 43685 - DNA, 782 bp, Zea mays
  Clone ID: MRT4577_139847C.1
gggtacctcgaggccggccgggccgggaaaaaaattttttgttttttaaaaaaacaagcttagatcaagtttttatctttgtgacaaaatgtctaaaacaaataatgcttacgatttcttggccaagatcctcatcattggtgactctggtgtcggaaagacctgcttattgcttcgtttctgtgagaatagtttcaccacctcccacttagccaccatcggaatcgactttaaaatgaagacaattgaagtagatggtaagaagataaagattcagatctgggatactgccggccaagagagatataagacaattactcagacttattacaaaggagcaatgggaattatattgagttatgcagttaacgatgctgaatcctttaacaacattgaaaactgggtgaagcaaattaaacaacatgccagcgaagacgtctgcaagatccttattggaaacaaatgcgatatgcccgatagagtcattccttatgaggatggcaagaaattggccgatcaatacggaatccacttctttgagacttctgctaaagagaatttgaatgtacaggaagcttttaaaagtatagcaaaggaagtcaaggataaattggccgacaaacaaggtgtccccaccccaaatgctggaaatggcgctggtaaaactgaaggaacaaaacttacttctgccagtaaatccgaagctggcaaaggcaaatgttgttcataaggtgaaaggaagggcttactttatgagagaaaaagtgacagaaatttctctc

SEQ ID NO: 43686 - DNA, 268 bp, Zea mays
  Clone ID: MRT4577_139848C.1
acaggatattctttgtgccaggggcgtttttctacgggtttttggctactatggatcgttggcccaaaaacttaatacgatctcattggatggatccaatcgagctgttgaagtgacttataataaacaaaatggacattacgcgttgtatccctaccaggctggtaaccattaccagaccttgtaactttagaaataaaactaacaattcaaccactttttaaatcctgttaccactgctaactaaactttaaggaacctaattaat

SEQ ID NO: 43687 - DNA, 366 bp, Zea mays
  Clone ID: MRT4577_139849C.1
gccggccgggctcagaagagacggcgcatcccacatcactcatccactgttcgcagccgcattcctgtctcgtatcctctctcgccgatccgatggtctgcacaaagcaaacagcaaggaagacgaccggcggcaaggccccccggaagcagatgcccactaaggctgcgcgcaagacggccccggacaccggcggcgcgaagaagccccaccgcttccgccccggcaccgtcgcgctccgcgagatccgcaagcaccacaagagcactgtaccgctcatccgcactctccccttacagcgcctccaagagatcacgcacgactcccagactgacctgatgttttttttttttcttacctcccccc

SEQ ID NO: 43688 - DNA, 326 bp, Zea mays
  Clone ID: MRT4577_13984C.1
accatcatttcttcgtccatctagtagcttcgaccgagacagacgtcttgactcatctataatgccttgaatatcactgggcaatcagagatctcgtacactgtctcatcgcgatgtccttattatcaacacacatcattctgtaggtaatcatactaatcatccaaaccctaagtggaaacaaattcttccttttgtatatagagcacatcaaaagcagactaacctatctccttgtgcatgcgctaggaacacgtatgcaaaagacttggccaacctcatgtcattaacgatcacaatgctgtcaaacagactgctcgactaac

SEQ ID NO: 43689 - DNA, 159 bp, Zea mays
  Clone ID: MRT4577_139850C.1
agggagggctgcgcctacataccggatgacctcgttcaagcatcaaacaacatcgagcgctagctcgagcacatccacaagaacatggctctcatgcgctccgacgaaaaagcgaggacgagcgagagcgtgggcgctaacatcatggtgacatatggt

SEQ ID NO: 43690 - DNA, 272 bp, Zea mays
  Clone ID: MRT4577_139851C.1
gtgcaaaatgaaacaggcccaaagaacatccaacagtatatttgggtaaaataaacgtggatccgtaacatcattacatattccaaacaaactatatatggagccggcacaagacacctaacaggttgtaaaagcaaaactatcctatgtttttatgatacatccgaaactacaaaacaggtcggatttgatattaaaaccttgctcgcaatgttgctggacactcaatttagaccctagaacaaaccctctccatttgtggcacaagcgct

SEQ ID NO: 43691 - DNA, 616 bp, Zea mays
  Clone ID: MRT4577_139852C.1
gggtgaatgttggtttgatgcttgctggtatgggagcttccatcaatgtttccggatggcaagtgttcgttgggaaaagaggcaagcaaaagtcctggagaaagccagaacacggatggtgaaacaggagacgtcagacacgaggagctcttggagcgaggtctgggcatcatccccaccacgagacgaccaaagcaacggcggtgatggggaagcatcggagagggccaagagagcggcagctgctgccaggcggtggcgagagttctccaggcgaggtgcggacaggcctccaacgcacaagcttcccgaggcagtgggcaacaaggattagtagtagtagtagtccatggaacagagagatacttggcaatgttggtttgatcatattggctaaatgtacagtgccattgtctgtagaggcttgcagtgccttcccagctagctttgcacgcactcatgtgctccatttgtaaaatctaggtgagtaggtatatagtgatgttgataacctgaacctgtacgtagaagacaacaagcacccagtgctgcagaacaaaggtcaaacatgtacaatacaatagaacgaatacaagtgtatacatactttcgctgt

SEQ ID NO: 43692 - DNA, 339 bp, Zea mays
  Clone ID: MRT4577_139853C.1
cccacgcgtccgcccacgcgtccgcccacgcgtccgcccacgcgtccgaaaaaaaaaaagagaaaaaaaaaaaaaaaaaaaaaaaaaaaaaaaaaaaaaaaaaaaaaaaaaaaaaaaaaaaaaaaaaaaaaaaataaaaaaataaaaaataaaaaaaaaaaaaaaaaaaaaaagttggacactttttaaaatcgaaatgttatttcaatagattgacaatatctaactttttaaattggttcaaaataattaattcaatcaggcagaaaatataaaataatagggactgtaaaaactgtgtatttaacaattctaaagtctttatgtcaaatttcattt

SEQ ID NO: 43693 - DNA, 579 bp, Zea mays
  Clone ID: MRT4577_139854C.1
tttgatgcttgctggtatgggagcttccatcaatttttccggatggcaagtgctcgttgggaaaagaggcaagcaaaagtcttggagaaagccagaacacggatggtgaaacaggagacgtcagacacgaggagctcttggagcgaggtctgggcatcatccccaccacgagacgaccaaagcaacggcgatggggaagcatcggagagggccaagagagcagcagctgctgccaggcggtggcgagagttctccaggcgaggtgcggacaggcctccaacgcacaagcttcccgaggcagtgggcaacaaggattagtagtagtagtaaatttgatcatattggctaaatgtacagtgccattgtctgtagaggcttgcagtgccttcccagctttgcacgcactcatgtgctccatttgtaaaatctaggtgagtaggtatatagtgatgttgataacctgaacctgtacgtagaagacaacaagcacccagtgctgcagaacaaaggtcaaacatgtacaatacaatagaacgaatacaagtgtatacatacattcgctgtacaatcgcggtacgt

SEQ ID NO: 43694 - DNA, 1486 bp, Zea mays
  Clone ID: MRT4577_139855C.1
ctattgtattgtacatgtttgacctttgtccagcggcacgtggaggttggagccttgtacggccgactttttttttttttttttgtacgtaccggttgcgaatgtatgtatacacttgtattcgttctattgtattgtacatgtttgaccttctgcagcactgggtgcttgttgtcttctacgtacaggttcaggttatcaacatcactatacctactcacctagattttacaaatggagcatatgagtactctacagacaatggcactgtacatttagcgaatatgatcaaaccaacattgccaagtatctctctgttcccacaactactactactaatccttgttgcccactgcctcgggaagcttgtgcgttggaggcctgtccgcacctcgcctggagaactctcgccaccgcctggcagcagctgccgctctcttggccctctccgatgcttccccatcgccgttgctttggtcgtctcgtggtggggatgatgcccagacctcgctccaagagctcctcgtgtctgacgtctcctgtttcaccatccgtgttctggctttctccaagacttttgcttgcctcttttcccaacgagcacttgccatccggaaaacattgatggaagctcccataccagcaagcatcaaaccaacattcaccctctctactctacgcatctcgttctcgaggagtgacagctgtgcagcggaagtccagtgaatacaatcaactgggcaactatcaatggcatcttgaattagctctgtgctacctgactgggaatagactcttgacctcccaaagtcttcctcaatttgaaagactccagggcaaatattggcacagtttttacatccaatgcaggtaaactcatcgacgaacacatgatccttcggtgcactgtcatcaaagaaagggttgattgctgttgctgtgtacccatggatctcatcatacactgcacgctgtgctggatcgctcaacaccgagtaaacttcgttgatgaacatgcagaagtttgtcacgtcagggtggtccccgctaaggtcagggtggcactccttcatgcaactgtagtatgccttcttaatttcctcaggggttgcatctggcatcacacccagaacggaatagtaatcgtcggcgacatcctcatccgacctttcacgatccgcttccgtggaggtggcaaataccctgggatcccttctccgcacactccatctcccccggtcgccacgtacggctccggcgagcccgacggttggcagttgccgcgttgggcgggagcagaggaaagaccgtggcagcgtcgcgagcgcgtcggcgagcagcggtggcgagaggagagggggcgccattgcctaacggattttggaatgcggcgacgtccagcaagatcgggctccaacgaggaggcacgcggcggcgaggggtctccctgccggcgagacagtcccggccgttttcgacaatccca

SEQ ID NO: 43695 - DNA, 355 bp, Zea mays
  Clone ID: MRT4577_139856C.1
ctccgtggacgtcttggcgactgctggcgacgggacggaaacggtcgtatcaagggcgtgtcggcgcggcatggccggcgagatcggcgtgatgctcaacataccacagccgttcaccgtccggtgcaggaggctcacccaggcagtgcgcgtcagccaaggccaccttctgcgggtagtccggcctcacaccgccgacgccgacagggtgttctgcaacttcgttcgtcagcaccttggatctcccgtgtggaaagttgcgaggaaagaaacgccactattcggggagatcgcggatgagcttgaagtcggtgccgccaccgcagcgtcaatgtcgaagcggaagagcgagatg

SEQ ID NO: 43696 - DNA, 294 bp, Zea mays
  Clone ID: MRT4577_139857C.1
cctgctccgtcccaaacttcgctgcgactttccgaggggcttttcttaaggaaccgggggctataaaaatccaccgatccattttgttctcggcatttctttttcttcaataccggcaaatcttccatctttttgccagcaaactttacaaacggggtgcatgaccctttttggagtatacgcaagcttttaggaaaatctctagcatatcccttttacaaaattgtctaataacatttttctttactaagtactttatttccaacaagcaaatctgtataaacaaaaagagca

SEQ ID NO: 43697 - DNA, 323 bp, Zea mays
  Clone ID: MRT4577_139858C.1
attctattttctagcccgccctcccttcattacctttcttttgatctcccaccaagcggaagcctccaatgggttgatcttttataatatacttctccacctagaaacaatggacccgaaacgccattattactccatttgtacggtcacaaactcataaagctaatccatcaacatcatccacgctatctgaatcatggagaactcactctccccatccccttttattacccattttttcgagttactttactaggcaacaatcccttccatctgaacattcacatatcttaacttcatctgcctttccacaattcgcaact

SEQ ID NO: 43698 - DNA, 891 bp, Zea mays
  Clone ID: MRT4577_139859C.1
atttcttgctgatgtcatctatgtagtcatattttaaatggtttcgtaatgaaaacgtatggttgttaaatccgtcaatttatacttggcctaatgcaacttcattgtcttttttttttcattttctccaaataattagagagactgcgaactgtatgtaacctatgacccatccacgtcataccaaggaactttgttgcttcactagtcactgttctccacactttactccttcaggacatcgtcagtcagtctgacttctagagttctcatagctttcttaagtttgagtgtttgaccaattttatataaaaaggtattaacatcaatgacaacaaaaaagcttattatgaaaacaaatttcatgttgtatctaactatactaattttgtgtcactaatatgtcttttttctatagaattcagtcaaaataaaaaatttaacttagaacaactctagaaatggatttgttcaagcaggagccaggagggaaatgatctaacttgatagatgaaaggcttgctcttttagatattttgcttcaagattttactaaaggtacttccaaatttgtcacaggttgagattgtgatgagtctcgaggagcacttcgatattagcgttgaggagtccagcgcacaaacaatcgccacagttgaagacgccgcggacctcatcgacaagcttgttgctggcaaagcgtagttctgtacctcctctatcgttgtcctaccactctaggtctatcccttgatctaggtttctatggtctgaagacttgtgattttctccgcactgctgttgctattcccgtgtcgtaataatacgagatgttttaagcggctgaacacacggtggtgtaatctgttactggtaaggtgcattgttgag

SEQ ID NO: 43699 - DNA, 948 bp, Zea mays
  Clone ID: MRT4577_13985C.1
atgagcatgcctaggacctcatcgggggaacgaatcccgctccatctgcaccatggcgcgacacgaaccagcaaaccgacaagcgctgggagaagaggcatcgtgaagaagtccatgccgctggaccacccgtctctcgtgcccgaggggcaccccgcggaggcgaacgaacattggacgacatcctcgacgcctagtgcccgtaccacaaggatatgcgtcataccctccgaaactgcagagacttcaagcactccatcgggaatggctgacctttccaacctctaccacctcccctaccacgaggaggacccgaagaacctcgacaacctcagcaagaacaaaaggcagcagaagctcaacgatcgacaaatactggtggcggccaccagtgcccccgccccatatcgatggtcagagcacccgatcacctttactcgggcggatcaatggctcaacttcgatcatccgggcaagtacccgctcctcgtcgatccgatgatccgagagagcagggtaaagaaggtgttggtggacgggggaagcagcatcaacgtcactttccctcggacactcttaggcttaggagttgcactcaaagagctccacgagtcagacactccattcttcggcattgtgccgactgaaagagaatacccactcggacacatctacatgtcggtcacctttggaactccggaaaactacagaaccgagttcatgacgttcgaggtagtgagcttcgactgtggatacaacgccatcatcggcaggccgggattggcgaaattcatggccattccgcactattcatacatgatattgaagatgccaggaccacaaggaatcatcatcgtacgcgctgacttccaaggcgccgcagaatgtttccgagtggccattcaggcggccctcaccaccaaaccgccgacgacttcctccgcgtag

SEQ ID NO: 43700 - DNA, 112 bp, Zea mays
  Clone ID: MRT4577_139860C.1
agcacgtggcggtcaaacgttcgctttaaaccaaaaatcacaagaactatgtgtctcaggatctccaagcaccggcaaagatccattccttatatatgcacctagcaacacc

SEQ ID NO: 43701 - DNA, 213 bp, Zea mays
  Clone ID: MRT4577_139861C.1
tcctcccactattatatactaaaatcacacattctagacatcatatacgaatcatacctacaatctcgtacaccatgtgttacacacataccatatctaatttcactgctctatactcaccaactataaacacaacaatcacccacacattattcgtcccataacatattaaacaccccatccttactatctttatcaccctctatctatcca

SEQ ID NO: 43702 - DNA, 818 bp, Zea mays
  Clone ID: MRT4577_139862C.1
gttcccacctagttttccccatttgccattccgacgagcaccttcaccgtctcctcccagtcccacctcgcgtggcacgccatggctttctccccgcgctcgccgtggtcgcgtgccaagaaaaccgacgtctactcaaccttcgttgtccacggcgatgacgatgaagacgacgcccgcggcggcaggggcccctccacgcgggcggaggaagacgaggaggaagacccctcctcgctgcctccgcttcttcagcggctccccaaggactttggcggcgcctcgttcgacgacgacgaggacccctactcctccgaccctgacgatgcttccctctctgccacggcggccttcaagagcggcgtcccggcctccggtcgatctccgttcctggatctgcggcgctcaagcccccgcgctaccgatgacgacccgtactctaccttcgtcgttcattccaccacacgctcggggagaacctcctccagccctcgcgggtccgcctccggcacattcatccgtcgctcgggtggctcgtctagccctcgcgagtccgtctctggcacattcatccgccggaccggcagcccgtcgagccccggggagtcagcctccggcacattcatccgccggccagggagcccgtcgagcccccgcgggtcgttctctggcaccttcattcgccacaccagcgggggctccagttcccatgaatctgcctctggcggcggcggggtttcgggtcctctttctggactccagcggtggagcagtcagaggagcttcgggagccatcgcctctgatgcagcaacaacag

SEQ ID NO: 43703 - DNA, 926 bp, Zea mays
  Clone ID: MRT4577_139863C.1
gcacgaggtggcactggcacaccgcgcgtccggatttggctgagtagctgactagctgagcgagcaatccatcccttcgcccgccgcaccatggaagccctcgcctcggcgcctcgggcgctcttcccgcgcgcgtgcccagtcgcgacgccggccggcccggcccggcgccgcaccgccgctcctcacatctgcagggcctccgcggcggctggggaggagacgccgccgccgccggccgctcccaagaagatcctcaagaagaagcccgtctactcgatgaagaaagggcagattgtgcgcgtggacaaggagaagtacctgaacagcatcaattatctgtcagtgggacacccgcccttctacaaggggctggactacatataccaagaccgcggcgaggtcttggatatcaggaacttcgaaacaggagaatacgccctgatcgcttgggtggggatcccgacgccaccggcatggctaccaacctacatgctcatcaagtcggacaagctcgactacgagaggatatgatggccggccggcggcctcgcagggcaccgtagcgccgccgccgaattcatgcttcatttcgcatcaggagtcggccaagcaggacacacctcttgttgttgacttgttgtaggtatatacgtacatgccagtattgccagaacagtcgacagaggcaatctgagacctcagctgctggaataatcaggaagtagatcgagagcgacgtacgatgacgagattcataattgctgctgcacatcacttctttatgttatttaaactcacatttcataattaatactaataatatattgtctccaaaaaaaaaaaaaaaaaaccaggcccgacggctacgacaggctggcttcaacgcgtggccgcggccacataacgtcatagcagtgtcacct

SEQ ID NO: 43704 - DNA, 243 bp, Zea mays
  Clone ID: MRT4577_139864C.1
cccacgcgtccgcgaacacagatcccagcacttttcccagctttctctccagcatcagtccctgcagcagctggggcctctggtcaggaaccctcagggacccaggaactcagcttccaaacatctgcaccttgaccggactcgccatcccgccgtgggggtgcaggtgattgtaaacacgggtgtgcatgtggatgcacacgggtgtgcggtgaagatctgtggagatggagctgggagctg

SEQ ID NO: 43705 - DNA, 387 bp, Zea mays
  Clone ID: MRT4577_139865C.1
ctgtgttttctcgtgctcggccaacaaggggggggcagataataagtcagtgggaacctcccttgaatgtccaagcttacatacacctgtcatgctgtacagtagagagcaggcaatactaatattgctgtcatgctatactagcccagatatattcacatagtcagcatactaaaaagggagtctatgagaaaatttaaccatatatttaaaccacatcccactgatttaccacaatctaatggcagagaagctgcaaatgcaattgctagatgataaaacattgttattcctatcttcaggcagcaagcatagcaattgcttagctattacattctgtgtgcagctgaatagattgccaaagcacttgcaaaggcaattggttac

SEQ ID NO: 43706 - DNA, 764 bp, Zea mays
  unsure (1)..(764): unsure at all n locations
  Clone ID: MRT4577_139866C.1
agcatagagaagctatttcaaatgctgaactgcttgtgggcagtagcctctcgcgtagcacagcatcaggtctcccactccaccctttcatgtcgaaatgctggaaaacacncatggatatgtttagtggaggagagtattcaggtttcactgaagataagaagtatcaacgtaccaacttcctgtttgactgcatcatagagtcactggattcaaaattctgcaatttcggcaaatgtggatacaaggcctggctgagcctgcctctcagtttgagcgaggacctgctgaagcgccaggtattggaagacatcggcaactggagggagtcgagtgggactgctcttagacaagtctctgacaaagaagtggaccaagtgactgacaggtgggatgcaagccaggttgaagcatttgacataagcattgcaatcgagaacgacattcttgaggcgcttgccggtgagttcgcactcgacctgtggtgaaacacggcgtattggctgctgtatgtgagatattgacatgtttggactttctgctcgcatgatcaattacgtataaataagagatactgcggatatctttgtttttttttccctgcagcaaattttgtacagagccatgtaaggttgaaggacctcccggttgttttgccctttgtatgctgtaaccgaaacgtgctaaagcctaaaagtgtctcctacttttggcgctttttttttcttaaaaaaaaaaaaaaaaaaaaaaaactcgagaagggg

SEQ ID NO: 43707 - DNA, 462 bp, Zea mays
  Clone ID: MRT4577_139868C.1
ctacttgcggtcgtgctgctcgcgctcaccttcggctagctgggggactgacggccgcgcacgcccaacttctttactcagctcggccagtacatgtggccctccgtgctgttcgccatggcgaccggcgtcgtgctcatgtgcaggcgacgctctgcatccattacgcttgtgcctaagtgggcctctgcggcactgaggtcatcacattcaacgtggggcttgtggatgaggcctccacgcttgaactactgttctggacatgcccgatcaacaggtcagatattctgatccctgttgtgagcctgctttcgctagatcgtccttcttggccccgctgtccattcctcaatgcaggtgaaatcagactagctcggtgcctgcacgaatgcctacagactcggcacaggcgggactgtggaacccatcaaacaagccgtagacagagatgctttcttttac

SEQ ID NO: 43708 - DNA, 337 bp, Zea mays
  Clone ID: MRT4577_139869C.1
gaactaaacgacaacttattggaaaccggagggagtacacagttaatccaagacaacagactgctgcaggattagaataatcacctgccggaggagccactctaggcgagggcaaaaatatccaaaagttacctagctacaataggcccgtttagcgacctctttggccgacatgccaagagacgacttctagtgcgacgtgttcttcccgacgatgaccaccggctcgtttggatccgcgaccgcaagaggctcgctggactgtatcatgaccgccgacggcatgaggggcctgaccacgggcttgacttataatcacacaagggggatctggaca

SEQ ID NO: 43709 - DNA, 256 bp, Zea mays
  Clone ID: MRT4577_13986C.1
ctcagatatcttataatatctggggattttggatactagtatgggaattcctgttccaaaaatgtatgtttttggtttaggctcattttttcgaacaacactgtaacactacttgtaatttcagtaagatgatagatatacggagactcgaagtataagggaggataaataagtaactcccacaaccaacacttagtactagataactacaaggaaatacacccccacattagatcagctcactatcagtatgtgt

SEQ ID NO: 43710 - DNA, 272 bp, Zea mays
  Clone ID: MRT4577_139870C.1
cctttgttttatattttgagctgtctttttagatgatcaacaaaaacaggcgcgtgcaggataaggaacatctcatgctatggtacaaatttaaagggggtctacgagggagcagcgtccatggaaataaataaagaccgctgaactcaaaaataaaccaaacagtcaaaaagacatggccggctctacatgtcctttttgtgtcacacacacaaacacatggcccttgtgcacagagaggttgactaattgtagatcgggacccgcccttt

SEQ ID NO: 43711 - DNA, 493 bp, Zea mays
  unsure (1)..(493): unsure at all n locations
  Clone ID: MRT4577_139871C.1
cattcttttatcttcgcgctagatgatgggacgaatctttcaagcgaacatgctgtgcagaggaacacatgattgatcctgctctgcgaagatcacccatagaccatgcgatacctactgcctcgtccaagcgtagggaaacgcgggagatgcgatcatgtgtcatgctcctgctatgcaagcgcgtgcgcggacaactccacaagcacacaaggagctcgctactatagcgggtgcggttgatacgaactaaacttgatggacctccactttattccttgggacctcataaatagcctaacttagagaaactaaaatagagctgtagctcctactcttatgcaatgagggactagatcggaataaaatcgacggactaaaaatgctgccctagaaaccaaacacccactgaggtgatacctaggggcgacagattcaaccggctaagcattgatctgcgacaccatgcagnggacgctcttggcactgggcc

SEQ ID NO: 43712 - DNA, 434 bp, Zea mays
  Clone ID: MRT4577_139872C.1
aactcacccgtcaagcacgaaccttcaagctacagcagccctgagaagatacccgctctgaagctcaagcactcaaactataaactaaatagatggctggatgtcagatatatccgcaaccacaaagaatacattaaagagcatcaagtcacaattcgagcaaacaagccaaaaatgcacacataagcggggtcaattagaaatggaacatggtatctgaacaaataccaagttccatggagaactaacatagaatctttaattgtggcatgtacatataacaataacatggaccatacaaaagaattaggcgacataaccccaataatctaatggtctggtaaacaccaaccacatgtgccggacacctatacacaatgatgatggcaatccctaacgagggcacacgtgcctgaaaggaaccctaacgctgg

SEQ ID NO: 43713 - DNA, 256 bp, Zea mays
  Clone ID: MRT4577_139873C.1
ggaattcccgggtcgacccacgcgtgcgcccactcttcacgaccacgcgttcgatggtcttgccgagcatgatgttgcataggatggtgccacatatgtcactgccactccttcttgcagatcatgctgcaacaataattaccatctatgaataaccaaattgccatgactaatctacccatgctcttacaggaacatttaccattagctgcatattagatagatatatttgtgtcgtaccaaataatagatttga

SEQ ID NO: 43714 - DNA, 588 bp, Zea mays
  Clone ID: MRT4577_139874C.1
aaccgaccccctcgctctcggccgctccgcctcgccccaccccacccctcctctctcggcgactcggttccccctcccgcgggacgcctccggagctcactgccgcccctggggcctggtcgttccctcatggtcatcgcgacgccttgccgggatcgtcgtacgggagcaattgctgggtcagatgtaagagggtctatggagactgcctttcgtcgtcgggagtgattcgcactccacaatgtgtaggcagctacaaatgtttattttcattgtaccagaggacaatgggacaccaaaggccaaatccacggaggtcagcactagtccaagcaaataaccatacgctaatgatagagaagataaatgatttctgagagaatgtgggcagattgttaaaaccaccgcgacaactaaaatatgtagtgctttatgtaatagtgaactagcaatggcatggactttgccctgcttgttttctttatgtgatatactagtgatgttgtggacaaatcttcagtattctcattgaagtaattgaccctgtttaggggagcttttgccaaaaaaaaaaaaaaaaaagcggcc

SEQ ID NO: 43715 - DNA, 327 bp, Zea mays
  unsure (1)..(327): unsure at all n locations
  Clone ID: MRT4577_139875C.1
agtagaagaggcaggnnatgttccccaacacagccaggaaaactgcaggcgcctacttggctggtggtgcttgttggatttgcaatacccttatgatgatattaagttatgttgtgacatttaggttcaatacaaggtacacttaggatagaagcatttgctcaatacaagatacacttaggatagaagcatttgctcctcttagtctctctctctttttttaacgtaatggcaggagctctgctcctcttagtctcagccatgcgcagaattcaatttgtatactcattgatctccccacctgtatagcacatatttgatctgttt

SEQ ID NO: 43716 - DNA, 2227 bp, Zea mays
  Clone ID: MRT4577_139876C.1
ccgcgatccagagatcggcgccctacacaagatttgaatccaatgtggttcacctgctaatgttagattcatggcaagggagatacagatattaagaagacttgatcatccaaatgtcatgaaactggaaggtttgattacttcccgactatcatgcagcctttatctagtatttgaatacatggagcacgatcttgctggactttgctcctccccggacatcagattcactgaagcacagctcaagtgctacatgaaccagttactgtcaggactggagcattgtcattcacgccgtgtggttcatcgtgatatgaagggcgctaatctcctcgtgaataacgaaggggttctaaagatagctgattttggacttgcaaatttctttgatcccaacaaaaaccatcctctaaccagaccgctgttgttactctgtggtatcgaccacctgaactgctactaggttcaactcactatgatgcagctatagatttatggagtcttgcgtgtgtgtttgctgagatgtaacgctaggaacctaacctggaggtaacaaccagggcggggcaacgactcaagatattgaaagtatgcggttcacctgctgatgattattggaagaagtcgaagttgcctcatgcaacagtatttaaaccgcatcatccatatcccagtacccttcgagatgtttttaaagaggtaccagaaaatgccttgagtttactagaaactctcctatcggtggagccctacaagcgtggtactgcatctagtgctctttcttctgagtttttcaggacaaaaccttatgcttgtgaaccatcgagcttgcctaagtacgcacccaacaaggagatggacgcaaagttacgagatgatgcactcagaaggaaagctagtagcagagggcatggggcagaagcatcgaagaagtcttcaaggatcagcagagcagcaagagaacacactgcagtccctaagcagataaataacgcagaggaacccaaaaacaacgtgaacgcaaccagagatggcacaatactacaggatcgcacgaaactgtcactgaacggcgacgctaggctattcgcggacatacagccagtgccagcagcggctcaagtgaaaggaagcgctcgtcacgctaagaacgaatcacgagaggaaatgcccttctcagggccactgagtgtcccttcctctagtggcttcgcatgggcggcggcccaaagaccgcaggaggaccgtgctctcgctaggtcacggaccagatccagctcaagaggccagtttcctgcagaggccgaccgggactgtactaggacccaagccaccacagagagtgctgctgccgtcagggagctgcctagcagcagagacataccacgcgtcggctccaaggtccgggagcgggagcctcacgacgcggcgaagcgcgcggtcctgaggaagtggtcgcagctagagcgcccggactcgttcgactcctgcgacacttaccactcccagaacttctcccacgccatgctcgttggtggcggtgctctctcgtcgaagaacagcttcgagggcggtcatggtcatggtcaggaggagaaggccgagtactcggggcctttgttgtcccagtcgcacaaggtcgacgagctgttgcagaagaacgagcgccatatccggcaggctgttcgaacgtcatggttcaggagaggaggaagaaaggaggacaagtgaggaaacgcttgacggttcctttccatggtggaagtgggggggagcatgtctgatgggcctctgctgccagtctgggaagtggacaactggtgctgacgattccattgtttaactggaaacagaatggactttggtggtcccagctcacagcaaaattttagcctctttttttttcctggcgtgtgttgcagattgcccggagacgccagtgctctatccgttttggctgtacaaaaaaaacagtagcggctgacccggcagttgtgtagttggttggaaccgataagctggcagcaccacgtggtgcgagcgactgtagtaaacattacaggctggttggttcatggctaactacgacacactttgtctaacgttagttgttcgaattgaaaaactaatattagttaaaaaaaaaaaaaaaaaaaaaaaaaaaaaaaaaaaaaaaagaaatccctgatccctttgttttccttttccatattattttatttaatgg

SEQ ID NO: 43717 - DNA, 229 bp, Zea mays
  Clone ID: MRT4577_139877C.1
cgactccccgagtttttcgccttcttggtctcgtttggggggaggcccgccacttcctccacgacgagatgacaagacccacccagcagggttaagttagccggggcgcatgaggcaagctgtggggcagggcccccgagggacagcttaatgaagatggaatgacttgccaacctccttccaatactgtctgtcgagcttttgtgggggggttctgaacgtgcacaca

SEQ ID NO: 43718 - DNA, 700 bp, Zea mays
  Clone ID: MRT4577_139878C.1
ttttttttttttttttttttttttttttttttttttttttttttttttttttttttttccatgaaccaaccagcctgtaatgtttactacagtcgctcgcaccacgtggtgctgccagcttatcggttccaaccaactacacaaccgtctgttcaacccacactgccgcgtcagccgctactgtttcttttgtacagccaaaacggatagagcactggcgtctccgggcaatctgcaacacacgccaggaaaaaaaagaggctaaaattttgctgtgagctgggaccaccaaagtccattgtgtttccagttaaacaatggaatcgtcagcaccagttgtccacttcccagactggcaccagaggcccatcagacatgggcacccccacttccatggaaaggaaaccgtcaagcttttcctcacttgtccacctttcttcctcctctcctgaaccatgacgttcgaacagcctgccggatatggcgctcgttcttctgcaacagctcgtcgaccttgtgcgactggggcaacaaaggccccgagtactcggccttctcctcctgaccatgaccatgaccatgaccgccctcgaagctgttcttcgacgagagagcaccgcccccaaccccaacgagcatggcgtgggagaagttctgggagtggtaagtgtcgcaggagtcgaacgagtccgggcgcttt

SEQ ID NO: 43719 - DNA, 354 bp, Zea mays
  Clone ID: MRT4577_139879C.1
ggaggagggggaggcaggaggtttctcactcattaccacccccaacctcatttttgcagctccatagtaaccaccaaccacattgtgctacaagagcagagagagagcctgggggttgggccaattcaccttatatcctttcacattatggctatacgtccccttagtaatccatcaacatggggggcctcttaatgggtgcacacctcatacgcccaccgcaggtgcttctcttttaaagctaaaacataggaccccggtctacaaaacctcgctgggcccacaccttcgcttatttgctgcgaaccccttatcttgctatcttcaccctatcaagccattcttgagtcacat

SEQ ID NO: 43720 - DNA, 436 bp, Zea mays
  Clone ID: MRT4577_13987C.1
ggaaaaaccaaggggatccctccctagattcaagctcccgtaaatcccttcattccggtctttaacagtggcggggcccaccctgggacccccctgtaaccgcccgtttcttggggggggggggcccctccctgtccctggcccctttgctccccccctcccccgggcccattggcttccaagccccgaaccctgcctttttaaccaccgggccccctgccccggatccgccaacctcccctggggaatgcccccttgccccccccggttccagtgtctaggccggggctctttccccctcccccctggtgccttgctttttgcgccccttctggggagctcttttcccgccccttggcgtggtgggggcctcgcctgtgttctctggcggctctggacatgatattatggggggccggagcgcccccccgtgggc

SEQ ID NO: 43721 - DNA, 376 bp, Zea mays
  unsure (1)..(376): unsure at all n locations
  Clone ID: MRT4577_139880C.1
aattcaactctcagctcctctcctggcaaccagacaacctccgtacactcgcaagaaaacatgaccggagaccatggcggacgaactcagagaataccacatcgccgattccagagacgtcatcagactcttcataaaggacacggactgttgcgacgaactcaaggaagccgtgaacgtcatcgaatcagagagtcagagtttcatcgcaggctgaccaccaccgacatgatcatgagaagtctatgcggacaagctcagtgacaacgacgtcnacgagatcctcagtcacatcgacctcaacatggacgaccacgtcaccgacgaggagctcatcgaggcgatcatggtgttctacagagacgacaacggcatc

SEQ ID NO: 43722 - DNA, 848 bp, Zea mays
  unsure (1)..(848): unsure at all n locations
  Clone ID: MRT4577_139881C.1
gcccgataccttctctctcccgacttttccttcccttcatcgcacgacgagtgacgacgaccatcccccaaccccacgccgcggagccgcaccaaatctcaccccgcatcctttagggttagggttctgcccgcacctgtgaattccgttgcgaaatctctcatctcctgagtcgagaatcgcagtttcccgctcggctcgtttggggaaatcggttattttcgtccggccgcgtgggctctctgaagtgtttgggctgtcggctatttgccccgagttttcaggtttgaaaaatcgtcgtaatttgttcatcacgcggctgccgaactttaagtggtggtggaagtttcgtgcctcggcgtggcccccgtgctccgattcctgatcacctgcccgccccgcacgctatgagcgcagggcgcgcgggctggggctcttgctgctcgggcacgcgcgcgcggtccccgtgttaatgcctcggttgtcctgcaagttcgcggaccccgacagcaccgtttcctccgctccggtggcgcgccgcgtgcggtcagacacgatgagctgcggcagcgacgtgtgccgggacggcggcagcagcagcggcagcgaggagttccaggcggccgcggcccagcagggtcgccgntttaaatgattcggtggcgcccgcccgngagctcggatgccgcccgncgcccgnnncgtcgtggatcgacaggaaagctgcttgttgatccaaaagatgnnctgttcgtggggacaaggatttggggagggagctcatggcaagtctacaagggggaagtacggtgatcaaattgtagcgataaggttcttaaacgtggcag

SEQ ID NO: 43723 - DNA, 283 bp, Zea mays
  Clone ID: MRT4577_139882C.1
ggtcattaaacgaacaattatttgcgactgaacattgaagcacgcaggaaacaaaggacaatgaccttgggggccggacgcatgcattaaacatcctactataccgcaaaactcaggccttataaaggggcccaaccgaattaggcgctctgtcaacacaagaacggcgctctactccatggcaggtcattaaacacttggaccctgacccaccaaaaatgctactagacgttctagcatcacttgctgacggtcttgctgcacttgctggggcgtaatgacc

SEQ ID NO: 43724 - DNA, 192 bp, Zea mays
  Clone ID: MRT4577_139883C.1
atcattcgttcggacaaccccaacggtcgcgcgagctaaaaggcccctgacggcactaaaagaaagactggcggttcaacgtcaccaaacacagagcgatcaaggcgaaaaggagcgcaacttccctgacgagccctcgggtgggggggcgacagcagtggaaaataacttgctaggaggaccgcaagcctg

SEQ ID NO: 43725 - DNA, 565 bp, Zea mays
  Clone ID: MRT4577_139884C.1
gagaccatgcatgcagatagagctcgctcagctctatatgcatgcatggtctcaagagtcagagctcagcgagctctatctggatttccagtccgcttagcttgctggtcaagacgcacagcaggttgtgcttgtatatgtttggtcacttggtactatcttcacttcaccttgagatagatgtcaaacctgacggagatggatagatcaaagcaaaagatgcgaaacatggcacaaatcaaataaacgcagggcagcagaagttgccggactgatttgtggcaagctcacacgaccagagctctcccatggtctagcttcgcacgcccaagctccaaaagtcacacgaccaccactttcctcaagagcccttataggctgcctccaacaacagcatgcggatgcgcgattagtaggggtggtgatgcggggcgcgcgattagtacgggtggtgatgccctctatattttatgctataaaatttaaaatttttaagaatcctattaggattagactccattactatttattttgaactattctttcgccaaaaaaaaaaaaaaaa

SEQ ID NO: 43726 - DNA, 457 bp, Zea mays
  Clone ID: MRT4577_139885C.1
gactctagaatcgctcgtgttaattaactatgcagttaaaacgacgactatttgaatatcgaattgatcaagatcaagtaataattttatttacacctttaataaatatccatcaatataattacgtcagataaaatattttagtttccattcgcttagagtaaacgtgagtagtcctcgattgtagtaccggctatcccagttcatttcttgcacggtcgtaaatgcgagctctatatcgtgtgtgtagtaatatatcttgttggggacttgttctcaaatgctatgaatttagaacaaggcaacacaaatgttaatgattaaagaccttcgtccttcgaagcattaattttccctcaggatataatgatcttcacgcgaaggttgtgaaggacataccttcatcatctcaatacataatgaagaattaggatcatatgacatatataaacaaaac

SEQ ID NO: 43727 - DNA, 1066 bp, Zea mays
  Clone ID: MRT4577_139886C.1
agttactcctcagcaccgttgctgcattgtggacatgttagctaaagccggcagagtggaggaagcttatgaatttgtgcaggaactgggggaggagggtgacttcgtttctatttggggaacactgctcgcgtcctgcaaagcacaggacaagcaggaattggtgaatttggtgacagagagattgatctgcattgagaagaagtatggccatgctggttacagcgttttgttgtcacatatttttgctgctgagggcaactggagtagtgctgatagcctgaggaaggagatgaggttgagaggattgagcaagatggcaggttctagttggattaaagtccagcatgcagcattgcaaagctaccctaaaaatggccatgaacactcattactgcatgtagttgattacggtagagatgaaatcatctgacatgaatcagtactgcagcagtggaaagcttgctgatctggtgtttgttcatgtcccatgacgtgatcagctcaggctatgacagattggccttttggttatctgcagcattgacaccttgtcaccttgacgaaattggggcatttcggaacatttacatatatatgaacaacaaactgaactcccgcactactcgtgagcggtgaaataaccctgcaggttgagaccctgatggcctggacctggatgcagtcatgcaggaaggatatcgcattagttgaatacttgaatgcggcgtcttgcaagccgcggtgagcagtgagtgtttacaagaccagcaaaggtatttgctcggtgcatgtagcctcatacagcttttagtcgcagtccaagaccaagacacctgacatgcatggtgaagtgtacagcaatttgttcatattgaagatggcgtactcaaatgaagatgaaaaatcatcgagttacttttttttttgctttgtgctggacgttatctccttatgcttatgtgcatctatgaaacctgaaggagacattttattgtaaagctcaacaccaataaatttttgagatcattaaactgagtaaccaaatgatgaaaccaggttatct

SEQ ID NO: 43728 - DNA, 815 bp, Zea mays
  Clone ID: MRT4577_139887C.1
ccgggcacgcatccagccgggccaggccatgcttgggccgggccaaaaaaacgggtcgcgtgccggggtgccgggctctaggctgcatgctcatctatagtgcaacacgtgcgcgcgggcgggcaccatattctattcggatacggaaacggaaggcaggacgaggcagacacaagcacgcgacgtgctccgctccccagtccccagtccccacacacggcaagctacgcaggctcgtgctcgtcccgcgcccccgcgaaagaactgatgagctgtccgggccaggccggcgggtggctgctcgactacggcctggtgggggaggagatccagggctcggagttcatctacatggtcgacgacccggccgtctccagcgtgaatgcgtgatactggggttcgatgctcccaggaaggagtccggcgccaacaagaggcaatacttcccttcttccttcatttgggctgaattctgcctgcataggagcctgcggagagacatacataatcatgaacggcttgggataatttcttgtttgtcgatagtattacctcctgctcgagtgatctggcatgcaaattgcttgattagcagtgcccctatttggttgagaaggaactaaggtagaatagaactagtggtagtattagggttcctttggttgcgggacagccagatcagggacgtccctgtcgtcccctctcgtctctccaattttaagggataactgaaaacatcatttttaactcttaactctgaaccaaacatcttatttgaaggatcgtcctaaaaaaaaaaaaaaaaaaggccccta

SEQ ID NO: 43729 - DNA, 412 bp, Zea mays
  Clone ID: MRT4577_139888C.1
tgtggtacggtagatctaaacagtgaatctggaccatacatgcatgaacaacaccgtccagatctagaactaccaccagtaaaaactaccgcatgtgggaaggaaataaagggtgggtagtatcgttgcctctcaggttgggagaacatgtttaattatgctgcaatggaataacggacttgcttagtagctgggactggtccaccaacttaaaatatatgcagcacatgtccacacatatataggtagtggagaagatgatggcagaaacaggagttgaaatcagtcgcaaccggtcgcttcactctcgctatgactgatgaagatgttaggaaataaagatagatatggttagacatatttggagataataaaactctcaaatttattttataacagaacaaagtttcag

SEQ ID NO: 43730 - DNA, 303 bp, Zea mays
  Clone ID: MRT4577_139889C.1
aacaaacatgcggggacccccccaagaaggaatgtggctcaccccccccctcccgaaatttcatatccaaaaagttggggggggttttttggggcgaaaatattttgccttcgcggattttattcaataccatgatcccgggcagaacccccagagctgagcccccctgtttgagtttaacccaccccaaaagaagggtttaaaatttggtccacatgacacccgggggcccttttccccaccttaaaaaaaaaagccccccttttggggggggaaaggacagaatctcccggaagagggtcc

SEQ ID NO: 43731 - DNA, 183 bp, Zea mays
  unsure (1)..(183): unsure at all n locations
  Clone ID: MRT4577_13988C.1
gccctttcgaagcccaccgattccctgcgatttttttcccctcgcctcctcgtctgcggcgtggggatcgtcgaaaaagaatcgcagagggggctcgtnttatttcgagttaaggaagccatacttagcacaatactaggctgtgtgccagtccttactatgtatccatgtatatgcatcaat

SEQ ID NO: 43732 - DNA, 432 bp, Zea mays
  Clone ID: MRT4577_139890C.1
ccagtttccggtagcataccaccatgggcctctgcatatccgtgtctctctggaaggagaagctctacggcgccgacggcagcagccggtcggtgcagtgtcgcgtcgtccatgaggttgccggcgtggagagtggtgactgcgagtgcgggaacttgggaagcgacgccgacgcgctgggggtagagcagaaggcggcggctccggcggccatggacgtgaaaaccggtggagtggagggaactgccgctgccgtgtcgggtggcactcctgtgcggccgatatggcagatgagggtgctgatgggcgtcaagtgccagctgccgcggttcagcgtgatggtactctacgacgagagcggccggccggtgtgcactggcgtccgggacagagctcgtgaccaggagaaacatgctgcagcgatttcagtgc

SEQ ID NO: 43733 - DNA, 468 bp, Zea mays
  Clone ID: MRT4577_139891C.1
cattgggtacctcgaggtcggccgtgtactcactataatgcgggaatcacagacgcgtcgatctcagcttgttgcactggctaccctgacctgccacatatcgtacgtaatcccggaagatacaaagcgaaggaaaagcatggctgctccgaagctcctgacgtggcgctggccgagctcaagtgggtaaccgtggaggctccctcgccaggagtgaaagctgccatgccatgttccatcgtgtaccgaacactgatgccgggacagccgttctgccaaatgggcgctgtcctgctgccccattcgctgattcgctgcattcgcactctgctgtaataggacaacaataccctcaatcgacgcaccatatgcgggtgtctacagaatcacggcaaaagagacgacagaacatgctactacatcacccgcaacagcccagctaaccaaataatgccgcgttgccctgcc

SEQ ID NO: 43734 - DNA, 467 bp, Zea mays
  Clone ID: MRT4577_139892C.1
gcaaaaccaggggaggcagcccaccccttgcagccttaatagggagtataaatttacaaaaaaacgggattggatccatttataccaaatcccaaacaggcaccatgtggggagtttaaacaggggtaccaaatcgaaaacaaccaacaggtcttgggttgccccgcttggtttatgcccaacctaaccaacgcctgagggtgcgtcctctcacatgaaaaaaaaaaaaacagcatcaacggttgcaggcttggggcgggcccaaaaaaaaacacctgtgccgcttggtggaaaaaaaaaaacctgttgctgaaaaaaaaacaccacggttttttggtgaaaaacgaagtcagctacttctgctgagggaaaacatcgctgcaaaacttcttgaaaatttggcactcgccgggcaagaaggcgaaaaaccgttaaaccatttttgcctgggcccatctaggactcca

SEQ ID NO: 43735 - DNA, 169 bp, Zea mays
  Clone ID: MRT4577_139893C.1
acgcgtacgcataactgtcagactgggcatctctgctccgctgatcgattctctgattaggcgcgggttgtgaacttgggggtgcctgtcgatccacgcccacactcttccttaggcgcatccctcataagcacctgggcgccatcgtcatcaatgatgataggcgtga

SEQ ID NO: 43736 - DNA, 153 bp, Zea mays
  Clone ID: MRT4577_139894C.1
ggaaaacccgggccgacgccacgcgtccgtaagtcttttcttacactctggaaatttgttaccttaccaccagcccttatatcatttaggtgtcatttacatgttataaacccatcatatcaccttcttgtcttatgataccaaaacaagaca

SEQ ID NO: 43737 - DNA, 307 bp, Zea mays
  Clone ID: MRT4577_139895C.1
ctgaggtcatccgtgaggtagtatctctgcatggcaacaagtccttgaatctttggttcagttgaacagggtgacagtacgtgcttttctagatgcacgccatactcgaggctcatatgctgctggtcttgtgtgctaggttctccctgagcacctttctgaccacgatagcctacggatgctcgttgcgcaccggcaagtgcgacagctgagcaactagaagatgctcgctctataagggatgtccgagaatgtacgtttacattatgagcttgagccatgaccagtacttgatctcctcctggcc

SEQ ID NO: 43738 - DNA, 351 bp, Zea mays
  Clone ID: MRT4577_139896C.1
gaccggcaccgcgtcttagagttcttgtcgctcgcctgcttttacgacatgccccgcaacaacgggtccgtgggatctgaccaaatccacccactctacatggatgatctgactaacatgaccgggatggagtaccttttgagcgaagtgatggaaactcacctatttgttatccgcaagcagaaatgggatagctccagataaataaagacctatgctcgcttactacatcctagactgatccatttaccaggcacctcagctctgaaacgtctttgacttacacttgaggagggatatacatgctatattagaagccgttaccatatcatgttcgaagtttgagaagat

SEQ ID NO: 43739 - DNA, 733 bp, Zea mays
  Clone ID: MRT4577_139897C.1
aaacccaaaaaacccgtggattaaaaaaaacctttttttaaaaaagggggggttttttcccccgaaaataggggcttgaaaacttttttttggttgccccctaccaaaaggggggaaaccgggggggggaaaaaactggttaaaaaattttaccggggtttttttaaaaaagggggggaagggaacccccccccctccttttttgaggaaaaagggctaattttccccgaggggaaaacttggggggggggctttttttttgaaaaaaaagccccccagcccacccaaaaaatcgcccccccccccacccgcggggttaaaaatttaacccggaaaaacccgggagggtttattttaaaaaccccaggttgaaacccgggggacctgttttttccttttggggaccgggaaaaaaaagggcccccgggaaggggttttttgaacccgggtttgggcctgctttttgccggggggaaaaaaaacgttttcgttttcaccctttgggggggggattggcaagggcccttttagtttttttgggggccaaaaaccggtaaccccagccctttttttccccaattaaagaaggattttttggagaatcccgggggaccaaattcctttcgaatggtttttcctaactggagcccctcaaacagaacccggaagttggacaattttggggaaaaggaaaaaaaatcccttttttccctcccatccggaaaattttttt

SEQ ID NO: 43740 - DNA, 485 bp, Zea mays
  unsure (1)..(485): unsure at all n locations
  Clone ID: MRT4577_139898C.1
ctagttctagatcgcgtgcggcgccctttttttttttttttaaacaggaatcaggcaaacttaatgaagcgtaataaagtccaattagcagggaaaggataatcagctaatacattatgaccacattcctacaccataatcgaaagaagcaagaaaatacctctgatttttggtgaaagacgcccaggggaggcgggggggggtgtttttatagactactaaagcagagagggagcttaactggaaagcaaaatacggtattgaagagatgtgccgtgaccaatggaactgggccagcaagaacccttatggctatggatcacctgactctatcaagcagaatgggcaccaaacaaacggatgcggtgactccttcaagcagaatgggcancggacaaacggttcaactgagttacccaaggggaaggggcaccatgcgtatgggtttgntgacttacctaancgcaacgggcactgggtttttg

SEQ ID NO: 43741 - DNA, 384 bp, Zea mays
  unsure (1)..(384): unsure at all n locations
  Clone ID: MRT4577_139899C.1
ccggcgggcgggcggcggaccaacagcgcctcatcttcgccggcaagcagctcgaggatgggcgcaccctcnccgactacaacatccataaggagtcgacgctgcacctggggctccgcctcatgggaggcgccaanaancgcaaaaagagagagggagggggagcccaataatatcaatcacaagcacaagaaggggaagctcgccgtgctccanttctacaaggtggacgacgccaccggcaagggcacccgcctccgcaaggggtgccccaacgccgagggcggcgcggggggcttcatgggcaaccacttggggggggggactgcgnnaanngtgtgtcctcctacgtctcccccaccacggggtagatgccccttcctt

SEQ ID NO: 43742 - DNA, 1659 bp, Zea mays
  Clone ID: MRT4577_13989C.1
atggccgacccttcaaacctctactatctcccccaccacgaggaggacccagagaacctcgacaacctcagcaacaggaagggggaggaggcggagcgttccagtgcgtcgatggaaaagtcaacgtcatcttcggcggacacgggtcgcaagagaacaaaaggcagcagaagctcaacgatcgccagatactggtggcggccaccagtgctcccgccccatatcgatggtcagaacacccgatcacctttactcgggcggatcaatggctcaacttcgatcatccgggcaagtacctgctcctcgtcgatccgggtgatccgagagagtagggtaaagaaggtgttggtggacaggggaagcaacatcaatgtcactttcccccggacactcttaggcttgggagttgcactcaaagagctccatgagtcagacactcctttcttcggcattgtgccgactaaaggagaatacccgctcagacacatctacatgtcggtcacctttggaactccagaaaactacagaaccgagttcctaaggttcaaggtagcaagcttcgactgcggatacaacgccatcatcagcaggccgggattggtgaaattcatggccattctgcactattcatacatgatattgaagatgccgggaccacaaggaatcatcaccgtacgcgttgacttccaaggcgccgtggaatgcttccgagtggccattcaggcggccctcaccaccaaaccacctacgacttcttccgcgcaggcgaactcaaagcctaaggaagacctcgcgatacctgcaaatgaagctcaagccgtgacctctatgcgaccgactgaggagacgaagaaatcaacctcggccgatcactggggcaagcgggtagaagcctatgtcgatgatgtggtgatcaaaacagaaaagtcagaaaacttcattgaagatttgcagttggtcctcaacagcctgaggcgataccggtcgaagctcaatccagaaaaatgtgtctttggagtaccagcagggaagttgctcggattcattgtcagccaccgaggaattgaagccaacccggaaaaaatcgaggctatcatgagagtggaagcaccacgatcacagaagaaagttcaaaggcttactggatgcatggcagccttgagcaggttcatatcaaggctaggagaaaaaggcctaccattctacaaattgctcaagaaggtagacaagttccagtggaccacagaagcgcaggaagctctcgatgcgctaaagaagttcttgaccacgccacccgtactaaagccgtcacgccgagccctgctagatcagccggtagaagatctgctgttatacatcttttgcacgactcacatggtgagcaccgcgttagtagtcgagcgggcagaagaagggcatgcatatccagtacagcatccggtctacttcatcagtgaagttctggggccctctaaaaagaagtatcctcaagttaaaaaattattatacgcggtacttctaactgctcgtaagctccatcactactttgacgaccacaaagtcatagtagtcaccgggtttccaataggggatattcttcacaacaaagaagccatcgggagaatagccaagtgggcctgtgtcacacccgggctttaa

SEQ ID NO: 43743 - DNA, 1850 bp, Zea mays
  Clone ID: MRT4577_1398C.1
cgaattcggcacgaggccgcccgcccgccccgcagccactgccttcctgcctgccattatttcttcctcctcctcgctgtccatccgtccgtcgtccgcctctgcccgcccgcctgccatcattttcgccccgcccaagctgtgagcagggaggtggtaagcagcatgctgggagcgagcgccagcaggggcaggaaggcggcgccgccatcagtgaagctgggggcggcgaaggaggcgccggcgaccgtggccgcagccgccggcggcggcaaggtgtcggcggaggaggtgtgggaggtgcggcccggcgggatgctggtgcagaagcgcggcgggggcggggcggccgacgacgagccgtctcccggcgtcaagccggtgcccaccatccgggtcaaggccaagcacgccggcgtcacgcacgagatctacgtcagttccgaggcctccttcggggagctgaagaagctggtggccgccaagacggggctgcacccggacgaccagaaggtgctgtacaaggacagggagcgtgactccaaggcgttcctggacacggccggcgtcagggaccgctccaaggtggtggtgctggaggaccccgaggcccgcgcgcgccgaatcatcggggagcgccgcagcggccacctccagaagaccgccagcgccgtcgccgcggtcaccgccgaggtcgacaagctggcacccaaggtggcggcgctggacgcgtcggtgcgcaggggggagaaggtcgcggagaaggacgtggtgcaggtgacggagctgctaatgaacgagctgctcaggctcgacgccgtggtcgcggacggcgacgtcaaggcgcagaggcggatgcaggtgaagcgcgtccagaagtacgtggagacgctggacgcggtggcggccaagaacgccgccctcgtcggcaagtccggcgagaaggccgcggccaagccggcgccggcgccggcgccggccccggccccgccgccgcggcagcagggacaggggcagacgcggtgggagatgttcgacctgctgtcgtcgctgccgtccacgtcctcggcctcgtcaacgacgaccgtgagctccacggcgtcctccggcgcgccgccgccgagccgcccggactggatgctcttctgacgagggagggacggcggccccgcaccggccggccaccggcgcgaaagcgaaaggcgagtgcttgatgcggtgcgatgcttgtgtgccaaaaattgcaccccaaatctggtagctcgtcgagtgtcctgatgaggccatgattgggcaggcggggggctatctagctttggccacacagctgcattgcgttgggctgcatggtaccgtaccagccaattcgagttcatcaatcatgtggtgtgagagtatttttcttcttcttcacctctcctttttctttctttccttttgagttttttttccattctcctcctcctcctcctcttctaattcttgttcatggaaggtttgggattcttttggagtgcatactatactattcagatagagaaacagaaagagggagttggttagggcaagtgaaacgtcttcagattgggaaataaataaaactagtcggtgtccaaactctgaagaaacgaacaaagagagaaacgtggccatgcatgcatgcttgcctacgcatggattgttagcttatcacactgttgtttgagagtgatgggagatggaccgatcgagaggccacttggtcggtagtctgtcactccttgttgctgccgagtttcttcttcctcctcatcatcctgtataatgtaatcaagcaataatacaaaataaaaaaagcgttttgaatttcc

SEQ ID NO: 43744 - DNA, 179 bp, Zea mays
  Clone ID: MRT4577_139900C.1
tgctggcttgtgctccgcctttccttcctacactggttcattaggtctctgcggggttctggttgcagaccttagcgcatcgagatggcggactcgcatgttgcgtaccgctgctttgtcggctgtctaggctcggccacggaccaccactcactgcacaacgccttcagcacctaccg

SEQ ID NO: 43745 - DNA, 214 bp, Zea mays
  Clone ID: MRT4577_139901C.1
ggtgtgagttttatttttatttttattattttttttctattttttttagtcttttgggaaaaaataccaccgggtggccactttgggaaattttttacaccattcatacacccacgcgaggggttttcgaaatagcccacccgggagcccgaggggggcccacccatcccggaacccgtggggacggtagcggccccccttggatatttttatt

SEQ ID NO: 43746 - DNA, 393 bp, Zea mays
  Clone ID: MRT4577_139902C.1
ggatgtcaattatacttaagcaaagattcactgggagcttcaattacttctgctaaatctagtgaaatcaatgtgatggttccaagtggcggcactgacggtgattgggtggagcatgcattgcctcagcagtacatccatagtttcaaggatgggcaattcaccacttcaccagtttcacactcgggggcgtaaatacaatttgttactgatgtgtttgttttttatttcgcgtttgccttgtttttgaagatgaacgtatgatgaggtttgtaacagttttgggtctcgcagcactggactggaccctgtctgcgattgttgtttgtgttgccccttgctcggtgtgcggtgtgtatgttctgcatgcacgtggttccattcgattggtgt

SEQ ID NO: 43747 - DNA, 692 bp, Zea mays
  Clone ID: MRT4577_139903C.1
gtagctttcaaaaaacccttccgggcctgataaatcaaggattgattttatgagagaaataggtgccacaaatttctaccagaatttctacatattcatgaatgattttattgttgctaatgaatattgtaatagattgagtatactgcaatagagacaatgaaggcagatgggtttttgcagactcagactcaagtttgattgattgctatttgctaccaacaaaaaataggtctcgacaagaaagttttattgtacttcagatttgtatatatgatcaacatctctgtgtgcagtatgcttgagaatagctttaaggctgagtaacaaggtttgaagaaagttatttcattttttttctgaacatatattgtttgattcgtaatttagtttacatggtatgacatcatttatttttggtttaaactttagagtatatatgctaattgtatgctctagatcagtttaaaaaggatgcagatgtctagtcgtaataggccaatctacaaactttcatagcctgaagtttatgaacagtgaatacacatcggttctaacttctgtgtttgtaaagatgctaaaagtattcaggctctattaatgtcttcttaggtaaaatagatttgatttacatgtgccagtattttggaagcataatagacactgagcttcaaacgtttggtcaggttcat

SEQ ID NO: 43748 - DNA, 247 bp, Zea mays
  Clone ID: MRT4577_139904C.1
actaattcttacgccctaagctaagtgccagacaaagaagcagaaaagcattacttcaaaaaaaatgctgatcatcaagacccgtgcaattggataaactgaattctgtgagtagattgcatttaaaaaaaaccattgattcaactctctttagtgggaagacagttgtgaaaaaactgacacaagctgaatgctgcgaaaagcaaaaaatcgtttatctcaagctgctaataaacactatacttat

SEQ ID NO: 43749 - DNA, 284 bp, Zea mays
  Clone ID: MRT4577_139905C.1
atgggacgccaacatgtctgatgccctcatcaaatatctcgaccaacgagtaactcggactcttgctcatgactcctgcatatagatgtcttaccctcagcgaaccgcatgtgagaagggcctggaatgcattatggacaagggacaattgctgatcatccctacagactgatacctcttcaaagatactggagcgaaggcgttcacacgtcggaatcaactctcaccgtatatacggcacgatcacttaatcgatgaaagagatgctgctgcacgactgtaag

SEQ ID NO: 43750 - DNA, 528 bp, Zea mays
  Clone ID: MRT4577_139906C.1
aaaaaaaaaaaaaaaaaaaaaaaaaaaaaaaaaaaaaaaaaaaaaaaaaaaaaaaaaaaaaaaaaaaaaaaaaaaaaaaaaaaaaaaagaagggaggatagtgttaaaggaaccaaatttcacgtgcgccgtgcttggaacaaccttgggctctggtttgggcgctgcctaatttggaacttattgggccggggggtcacatagcgcctttcttggggataggcctttgttgttcaccaggcttgggtcggcttcgcccttcttcccccttttacgccacctggcattgataaatgggaaggcccctgccgattggtctttaccccacagtggcctctgcttgtttgggcgaatggtaaccgctttgtttggcagctttttggcccccggttcttggggtttctcccattgcttcctttccactttcgccggctttaccccccaagccttaaatttggtgtcccctttttttgttccgggtttccggttttcgccccctaggccttaaaacgggggcttcctttgggg

SEQ ID NO: 43751 - DNA, 343 bp, Zea mays
  Clone ID: MRT4577_139907C.1
aaaaaaacccgggccacatttaggattaccttttttcccaaggggtgtcccacacccacaatatcacacagttgtaaactccccacgggctcacacgggcaaaaaacaaccccggggtcacccactggcccttgaacacacccgcccacccatttcctttgaaccgggcattattttagccgtaaaaaaacccgggggtgggggcccccgtctcacccacccccaaagacctgaccctttagggccagggacacccgtagtaacgctcggttggcccctccccccaaccccaagaatggttttatatgggggggggggggcccgggaaaaaggctcaaccccc

SEQ ID NO: 43752 - DNA, 296 bp, Zea mays
  unsure (1)..(296): unsure at all n locations
  Clone ID: MRT4577_139908C.1
agttttcgccgctttcgattcccattgcacttcagcttnngactcggagcagtcagcgactcacctcgtcgtcgcccggtcgccgtgcacgtagatgttcgccaagcggctcttccacagggcactcgtgcatcatcatcagggagtaggaagaggaggaggaggaggagcctcagcaccagcggcatcaccagcggatgccatccaaatggacgcgcagaacncgactcactgcggggagccatacacagcttcactactctccttcgatctcgtctagtgtctcctcgctgacg

SEQ ID NO: 43753 - DNA, 767 bp, Zea mays
  Clone ID: MRT4577_139909C.1
tgcacacatatattgcaatgggcagagccattggtcgaaagccttgcacttcacgaactaattgatgatcgcattaaagatacaaacgatacatatgggttgtatcatctagccaaaattgcatatctttgtgccaggccaaacccagagcagcggccttctatgggagaggttgttcgccttattgagatagaaactgaacatatcagggatttgtcacgacaattcatccctcatttcatgaagtgatgaaataaccgaaggggattttgtggtgtgagctgactactaaagtatctacgctgcatttccaccgggacaaagtaaactgaaatccatactctccattcttgttggtgatattgtaacacttggcagttcgctctcttttgcctttcttcattttcttcttccaaccatgtaaggctttgttcggttattcctatgcttttttatggattagaatggattggaaaaaaatatgaaggattttgacctgctatggatttaatcccacctaatcccttccaatccatatggattgataggaaacccaacaggccctaacagtgtgcacatggggttactgcacctttttttcctgcccccctctcccttttgtaaatgaaacaccttcttctcaaaagtgttgccataggtgtctcctggccttgccactttttagaatgtaatgccactgtgtaattgactggctgttgaagaatttgggaggcacgcgaaaaaaaaaaaaaaaaaaaaacccccac

SEQ ID NO: 43754 - DNA, 2043 bp, Zea mays
  Clone ID: MRT4577_13990C.1
atggccatcacttttcagcacaagatcactctctgccctggatccgtgttcttctttggaaccatctcatctgtggtagacgaagaagggattctgcatcatatagcagattcaccggagaaaaatccttccttgaaaatctccgggaaagccagaacaaagcaggaaatagcgcaacctccagtgccccgggcgaagaatacctcctgcaagacggaagcagagaattcattcacccggagaaccccgttgcccacctcatccacggaaagatggacacggattacaaggaaaaaaagaaacaaacgagataaaggcccgtccaactgcccttctgcaactccattctaccctgacgtcctcttcatcggggggagagtggaatcgtccctcatctccgacgatgaaccaaccgtgcctgggttcagcgagaagctcgccgacgaaggaactgacgccataatgcccgacgacatcatgcacccagagaacgagacccggtgcagcctatatcatgagatgagatctcggagggccattcagtggcccccaaacttcaaagtctccaacgtcgacaagtacgagcctaagcaggacccgggaggctggttagctgtctataccaccgctgcacgagccgctggggaaactaaagatgtgatgactgcgtacttgcccatcgtcctcagacaagatgcgctgcaatggctacgacgcctaccccgacactgcatcgacgattggagcgacttcagtcagcattttatcgccaacttccaatccctctccgaaaagtcggggcagccatgggacctcaaatccatcaggcgccaaggggatgagactcttcggtcgtacctcaaaagatttcagaccatgagaaatcatattctcgaagttgcggaagcagcagtgatcgaggacttctaccgaggatctagtgactctcgtgcccgaacaactgttcagggaggcggaccacttccgaacaactattcagggaggcagacctctacatcaccgccgatgaacgtgcctaggacctcatcagaggaacgaagctcgctccgtccgcaccacagcgcgatacgaaccagcaaaatgacaagcgctaggagaagaggcctcgcgaagaagtccatgccgctggaccacccgtatcttgtgcccgaggggcacctcgcggaggcaaacaaacattggacgacatcctcgacgcccagtgcccgtaccataaggatatgcgtcatagtcttcggaaatgcagagatttcaagcactccatcgggaatggccgactcttccaacctctaccacctcccccaccatgaggaggacccgaagaacctcgacaacctcagcagcaggaagggggaggaggcggagcgttcccacgcatcgatggaaaagtcaacgtcatctttggtggacacgggtcgcaagagaacaaaaggcagcagaagctcaacgatcgtcagatactggtggcggcctccagtgcccccgccccgtatcgatggcttgggagttgcactcaaagagctccacgagtcagacactcctttcttcagcattgtgccgactgaaggagaatacccactcggacacatctacatgccggtcaccttcggaactccggaaaactacagaaccgagttcgtgaggttcgaggtagcaagcttcgactgcggatacaactccatcatcgacaggctgggattggcgaaattcatggccattccgcactattcatacaagatattgaagatgccgggaccacaaggaatcatcaccgtgcgcgctgacttccaaggcaccgtagaatgcttccgagtggccattcaggcggccctcaccaccaaaccaccgacgacttcctccgcgcaggcgaactcaaagcctgaggaagacctcgcgatacctgcgaatgaagctcaagtcgtgacctctatgcggatgattgaggaaactaagagaatcaacctcgggttcgctgacgaacgcaagactgccatcatcagctccagcttggatgacaaatag

SEQ ID NO: 43755 - DNA, 1672 bp, Zea mays
  Clone ID: MRT4577_139910C.1
ggacgctggggaatttagttaccacaaatgggctcatcttggtgttccaatgcttatatctggtggtgatgacaccaagctgtttgcagagcccgctcgtgtctttacgccgttggcacctcactatctccgccccccaccgcgacccccgttgtttccgctggctcgggtgggcaggtaattttgtacaaaatatctgcttgtccagtctccactagggttgatgtttttacttgtgaaagttcggaatgagtctatgtctcatatcacatcatcatctctcatgatagctacggtccaaccacttgctcgtttgaaaagcaaggggtccagaaaaatcatttctagtgctgcctctgccaatggaacacttttggcctattcagatggtgtgagaccctgcctctttgcgctaaggcataagggtggaaagaagtatacccttgacaaattagagctaccaaaaggattgccctgttctcagcgtatggcgtttacggttgattcgtccaatttgatacttgcgggccgtaatggaaaaatatacatcattgacattgcaacaggagaaatttcaaatgtatttcaccctacaagtactggagatggatcaaaaatcgctgacgacatcacctataacatcatctagaggagaagtgccaatgggcaatggctggcttgcagttaactgctatggcgatatttatgtatttaatcttggcctgcgaaggcaacactggttcatatcccgaatgaacggtggttctgttacatctggtagttagtgccccaagtgcaacacacttgtgataactacatctaaaaatgaggtgtatgtatttgatgtggaagcataacctttagactgatggtccaagcgatatacacaccggtggcccagatgttaaaataaatttccttgacattgcatcagcttaacatttcctccgctaagctcatccacagagggtgtatacagtaccagggctatgtgcaacatcgatttcggattgccagtcgttgaggatgttggcttgccaaatggatcaggtggaccagcagagaaggcagacgcaaaaaagagtaaaaaaacaaggcagaagcgtaaggcccgtgatgaagagtctacagaggagaaaaggaacaacttcaacttctttgcgtttaaagaaccagtgctctttgttgggcatctacaggacagttcaattttaatggtagagaagcgatggatggatgttgttgaaggtttcagcgcaccagttgacagacatatatatggcacatgattcttgctaacatcggcctttggcgctcgtgacaagcaaaccattgtttttgtttttttttctcaagtaatgcaaaacatccgtcctcaagcatgtcaacggttgaaaggggctacaagatattgcagcacaaagtgaaagctgcacgtagactttagagtcggggattgtggcaatggtgtattttcttttgttctctagtaatgtagtggactccctgcgccagtttgtcataccttgtcgctgcgcaaaattttgtcacatgtaaacactgtatcatcacttctgttattgttgagctgatatcttctgtttgcctcaaaaaaaaaaaaaaaaaaaaaaaaaaaaaaaaaaaaaaaaaaaaaaaaaaaaaaaagaggggg

SEQ ID NO: 43756 - DNA, 1240 bp, Zea mays
  Clone ID: MRT4577_139911C.1
gcacgagatttttgtggaatttcaatgcctgccgctgctgtccatgtgtagttcgcgtgccctgtggcctgtgcactgctgccgctttaaagcagaggggtctctctcgtcgctcgaggccggccggggtctcggtgcctttctctatcgtcccgatccgtcgttcatcagagtcgtaaccgtacgccctcgttcccctcgtcgctctcccaagtcccaaccccggttcctttggtctgcgcgagcgagcatggcgtcgccgtcgcccgccgtctcgtctctggagacggaggcgccccaggctaccgtcacgagggagcgcaggctcaaccccgacctgcaggagcaccttcccaagccatatctcgcgagggctatggtggcggtggacccggaccatccgaccgggaccgaggggcgcgacccccgcggcatgagcgtgcttcagcagcacgtggctttcttcgaccgcaacggcgacggcgtcgtctacccctgggagactttcaaaggcatgcgagcaatagggtagtgggttctttacatcccttgtcctctcgttcctcatcaacctcgtcatgagttatcccactcagccgggatggctaccctcccttttgctctccgttcatgtaaagaacattcataaggctaaacacgggaagtgactccgaaacgtatgacactgaagggaggtttgacccatcaaaattcgacgctatatttagcaagtatggtcgtactcatccagatgcgttgacaaaagatgagatgaattcgatgcttaaggcaaaccgcaatatatatgatttcctcggctggatcgctgctatcggtgaatggcatctactctacagtgtggcaaaggacaaagatggcctgttgcagcgagaaactgtccggggcctgttcgatgcgagtctatttgagcgactgcaggacagcaaaaaatcctcctgagtcctgatgaatgggctagagaggagttcccacctcaagaagaccgacagtagaaaactagcatgttataattattgtcctccgtaatttctttagaaaatgtaatttgagtcgtcttcgaataagaaatgtttccatgatgtagtcaatacatattattgtagaactagaaaatacatattattgtagaactatcatggtcatcttgtttatttaatactctctttgtttcaaaatataatttgcttgactgttttatgcctaaaaaaaaaaaaaaaaa

SEQ ID NO: 43757 - DNA, 463 bp, Zea mays
  Clone ID: MRT4577_139912C.1
cgcgttctgggtaggcccctgcaccagcccagagtgtgtgactctcatggactggtaggggtcatacaagagaagggaccacactgcaggatggaaccaaaaggcggcgctcttaccgaggaagtgcgtaaccatcgtcgagcgtctaacaccagcagccgcgcaaaaggccaaaaaccctcccgcttcgtgactcccagtcggactggcgcaggctccagtgcccggaccgggagcggagcaccacgtggaccgccttttttttgtaaaagtggccgggccgttccacacggtccgggactaccgggagaaaaccgacggcatgcagaccttgcagaggcaggcagaacgacacgaaccgggggggtatcaccgtcttcatccccaaggactcggggttcgcggggctgaaacagaccacgttggccaacctgacccagtaccatctcaggtcggtgctgtt

SEQ ID NO: 43758 - DNA, 498 bp, Zea mays
  Clone ID: MRT4577_139913C.1
cccacttgtctttttgggtatttttggaagttctatgagtcccagtgcgagaacctatccacaggctgtgatccacactgggatatccaccatcgatgtgatgaactccattgctcgcgggcaaaaaatcgctgtattttttgctgatgggctccctgacaatgaaatcgctgctcagatctgtcgtgaggctgcacttgtgaagacattgcatacaggaaagcatgcagagggcggcgaagatgacaactttgctattgtgttagctgctatgggagcgaacatggaatcagctcaattcttcaaacatgattgtgaagagaaccggtccatggtacgggtgactctgtttctggatctgactaatgatcccaccattgcacgtattatcacccctacgactgctctaacaacagcataatattgggcatatgaatgtctgaagcatgtactagacatgatgacagatgcgagctcttatgcagacgcactttgtga

SEQ ID NO: 43759 - DNA, 448 bp, Zea mays
  unsure (1)..(448): unsure at all n locations
  Clone ID: MRT4577_139914C.1
ggcgcgtctcgtggagggggggcgcgcgtcgccgaggcgcgcgtgtggccggcttctcagcccacgctctgccggggctggccgggtctcgggggagcagaggactccagactacgtgacatgaacgcaaggcgtgcgccgaagcgggtgtgctctcgacgcgcctcccggggacatctccgagaccgcgctcgtcgccgaggttcatcgcctcacgctgaccccgattgtctcgggatccttgtccagcttccttcctaagctatcacgaagagagatctgagcgagatttcctcgagaaagatgtggatggcttcatcctctacattggcaagcttgaatgaaagcagagagccctgttcgtccatgtcgccaaagggtgcatggagctttggcaggagcggngtcctgttaagggtagcggcagttgtggtggcgcagcacatcg

SEQ ID NO: 43760 - DNA, 3726 bp, Zea mays
  unsure (1)..(3726): unsure at all n locations
  Clone ID: MRT4577_139915C.1
cggtagtttcccacaacaaccccgccccattccgtcccgtccccaccacactgctcggcggcggcggcgccagcgccagcgacgacgactagtaaaacgtaacgcgcgccctgacccagtcccgatacgggctataaagctcaccgcccctccgtcccctcctcgcaaacgcaacgtccgtccctgggcctcccgttccccgttcctcctccctcccacgctgcaccggcccccttccgcacaagcgtttcgttcgttccttcgtaacctctggcaagcccgtatcagcagctgacgcaaagagctagctgccggtgtgccggtcgccatgcataaccccaggccgggcggcggggacatcgtcgagatgtcgtcgtccgccaccgccgaggggcgggtgatcccgcacagcggcccgctgagcaagaagtcgggcgcccggaagagcgcgcggttcgcggagtccgtgtcggcgccgctgtccgcgccgccgccgcgcgcctccgccaacaacaacaacaacgacgacgacgactacgtggagatcaccctcgacgtgcgcgacgactcggtggcggtgcacagcgtcaagcccgcccacgtcggcggcgccggcgcaggtggcgacgacccggacgtgacgctgctggcgcgcacgctcgagagccggcgctcctcgtcctacggccactccgtcatccggaacgcctcgtcgcggatcaagcaggtgtcgcaggagctccgccgcatcgcctccatcaaccgccgcggcgccgcggggccccggatcgaccgctccaagtccgccgccgcgcacgcgctcaaggggctcaagttcatcagcaaggccgagggcgccgccggatgggaggccgtcgagaggcgcttcgacaagctcgccgagaacggcctcctccaccggtccaagttcggccagtgcatcgggatgaaggagccggagttcgccggcgagctgttcgacgcgctgtcgcggcgccgcaacatctccggcgacagcatcagcaaggcggagctgctcgagttctgggaccaaatctccgacaccagcttcgacggccggctgcagacgttcctcgacatggtggacaaggacgccgacggaaggatcaccgaggaggaggtcaaagagatcatcacgctgagcgcgtcggcgaacaagctttcgaagatcacggatcaggcggaggagtacgcccggctgatcatggaggagctggacccgggcaacctgggctacatcgagctgtacaacctggagatgctgctcctgcaggcgccgagccagtcggtgcgcatcggcacgaccaacagccggaacctgagccagatgctgagccagagcctccgtcccacggcggagccgaaccctctccggcggtggtaccggcgcgcgcagtacttcctggaggacaactggcggcgcgtgtgggtgatgctgctgtggctgtgcatctgcgcggggctgttcgcctggaagttcatccagtaccggcagcgctacgtgttccaggtgatggggtactgcgtgtgcgtggccaagggcggcgcggagacgctcaagttcaacatggcgctgatcctgctcccggtgtgccggaacaccatcacctggatccgcaaccgcaccgccggcgtggggcgcgtggtgcccttcgacgacaacctcaacttccacaaggtggtggcggtgggcatcgcggtcggggccgggctgcacatcatctcccacctgacgtgcgacttcccgcggctgctccacgccacggacgccgagtacgcgccgctggggcagtacttcggggtgccccgcccgcccaactactggtggttcgtgcgcggcacggaggggtggacggggctggtgatgctggtgctcatggccgtggcgttcaccctggcgacgccgtggttccggcggggccgcatcgcgctgcctggcccgctgcggcggctgacggggttcaacgcgttctggtactcgcaccactgcttcgtggtggtgtacgcgctgctgatcgtgcacgggcactacctgtacctgacgcacaagtggtacaagaagtcgacgtggatgtacctggccgtgcccatggtgctgtacgcgtgcgagcgcctcaccagggcgctgcgctccagcgtcaggcccgtcaggatcctcaaggtggccgtgtacccgggcaacgtcctctcgctccacttctccaagccgcagggcttccgctacaagagcgggcagtacatcttcgtcaactgcgccgccgtgtcgccgttccagtggcacccgttctccatcacgtcggccccgcaggacgactacgtgagcgtccacatcaggacgctgggcgactggacccgcgagctcaagaacgtcttctcaagggtgtgccggccgccgacggagggcaagagcgggctgctccgcgccgagtacgaccgcgacggcagcgccgtggccaacccgagcttccccaaggtgctgatcgacgggccgtacggcgcgccggcgcaggactacaagcagtacgacatcgtgctgctggtggggctaggcatcggcgccacgcccatgatctccatcatcaaggacatcatcaacaacatgaggcagctggacggcggcggcgacctggaggcctcggacgcgtcggcgtcgtcgtcgtcgatggcctcgttccgcacccggcgtgcctacttctactgggtgacccgggagcaggggtcgttcgagtggttccgcggcgtgatggacgaggtggcgctcaaccacgccaagcacggcgtcgacgtggtgtccggcacccgcgtcaagacccacttcgccaggcctaactggcgcaacgtctacaagcgcatcgcgctcaaccaccagaaccagcgcgtcggagtgttctactgcggcgccccggtgctgaccaaggagctgcgcgagctggcgcaggacttctcgcggaagaccaacaccaagttcgagttccacaaggagaacttctagctctctctctctctatatatatgtaaggatatggatgggtgtagagaggggatcggagtagcgcaaagtaggtatttgcttgaccagttgggttgggtgggtcaaaaccccaacagttttttttttaattattattcttattcttcttcttcttcatttgctctagagaagaactaatgatcgaaatgccattatttgtacaaaaaaaaaaaaaaaaaactagaccgctcgctgagcctgcagccaggcagtgcggtgggcttgctggcctgcggcggtgcgggtctgatgccccttgtcagatcagatcaaaagcgtcaaaatgcatgtctctggtcgttctcagccacagccagcagtgcgtgcatcacgcaaagaaagcgcacgcatcttgtgtggctgccatagctgaggtgctctaggccacacattctcctactctcatcatcatccctgatacacgtacggtgggcaacaaccatgcatgaacggcctcacccaatgaatgacatgtttcagggttctagagggcgatgagcatgcatgattgcatacgcatgactggcccacatagcaacccagcgtagtcggggtttttttgttttgttttgttgtcggtatatatgtatatattagctcttcgtttgtttattaaaaaaaaataaaaaaaaatccgggcggccaaaaactagtgagctcggnnnncgggaatt

SEQ ID NO: 43761 - DNA, 830 bp, Zea mays
  Clone ID: MRT4577_139916C.1
acgcccgccgccgtattccttccttcgtctcgccgcagtccacctcgcttcatccgccgagcagagccctccagacgccatccacgccccgtgaacagatttctgttacaggaaacttgacaaatggctgatgaggatgttcaacctatcgtgtgcgacaacggcactggaatggtcaaggctggttttgccggtgatgatgcacccagggctgtctttcctagcattgtaggaaggccacgccataccggtgtcatggttggtatgggccaaaaggatgcctatgtgggcgatgaagctcaagcaaagagaggtatcctgactttgaaataccccattgaacatggcattgtcaacaactgggatgacatggagaaaatatggcatcacacgttctacaacgagctccgtgtcgcaccagaggatcatcctgtgttgctgactgaggcccctctcaaccccaaggccaacagagagaaaatgacccagatcatgttcgaaaccttcagttgcccagcaatgtatgtcgcaatccaggccgttctgtccttgtatgccagcggtcgaacaactggtattgtgctcgactctggtgatggtgtgagccacactgttccaatctacgagggatacacgcttcctcatgctatccttcgtttggaccttgctggccgggacctcacggataatctaatgaagatcctcacagaaagagggtactccctcacaacaaccgctgagcgggaaattgtcagagacataaaggagaagctcgcttacgtggcccttgattacgagcaggagctggaacggctaggagcagctcctct

SEQ ID NO: 43762 - DNA, 397 bp, Zea mays
  Clone ID: MRT4577_139917C.1
aagctagaacagaaatccaaataaccaaatgcttcttcctctcccggccgcagatcatcacgctgagcgcgtcggcgaacaagctttcgaagatcacggatcaggcggaggagtacgcccggctgatcatggaggagctggacccgggcaacctgggctacatcgagctgtacaacctggagatgctgctcctgcaggcgccgagccagtcggtgcgcatcggcacgaccaacagccggaacctgagccagatgctgagccagagcctccgtcccacggcggagccgaaccctctccggcggtggtaccggcgcgcgcagtacttcctggaggacaactggcggcgcgtgtgggtgatgctgctgtggctgtgcatctgcgcggggctgttcgcctg

SEQ ID NO: 43763 - DNA, 672 bp, Zea mays
  unsure (1)..(672): unsure at all n locations
  Clone ID: MRT4577_139918C.1
tcttcgtcaactgcgccgccgtgtcgccgttccagtggcacccgttctccatcacgtcggccccgcaggacgactacgtgagcgtccacatcaggacgctgggcgactggacccgcgagctcaagaacgtcttctcaagggtacgtacgcgcacgcgctgatgaccgattcgctcgcagattaacgcgcgcgtgctgatctattggtgaacgatgtgcaggtgtgccggccgccgacggagggcaagagcgggctgctccgcgccgagtacgaccgcgacggcagcgccgtggccaacccgaggtgagaaatctgtcccttgaccgatggaacgctagcgtacgtctccatgacaaaaacgtggcggtggcgtcgtagttgggtgggggagcaagaagatgcctatgtcttcttcttcttcttcttccgtgtggtagcatttgttgaccttgactcctgtgcgggatttgtgccaccgaatagaatactagtacttagtggcacggtaggtggctagctgacttattattgcgttcagtttggccgttgggcatgatgagctcggcggcgaaccaaccacaaccaacggtgaccgctggccggtgatattcccggcggcggatcggaacacgagctgcgactgttggtcctggtttnccaaggcatgtctgc

SEQ ID NO: 43764 - DNA, 814 bp, Zea mays
  unsure (1)..(814): unsure at all n locations
  Clone ID: MRT4577_139919C.1
gcgctacgcccatgatctccatcatcaaggacatcatcacaaccatgaggcagctggacggcggcgacctgaaggcctcgnacacgtcgtcgtcgtcgtcgtcgtcgatgggcctcgttccgcacccggcgtgcctacttctactgggtgacccgggagcaggggtccttcgagtggttccgcggcgtgatggacgaggtggcggagacggacaggaagggcgtcatcgagctgcacaactactgcaccagcgtgtacgaggaaggggacgcccggtccgcgctcatcgccatgctccagtcgctcaaccacgccaagcacggcgtcgacgtggtgtccggcacccgcgtcaagacccacttcgccaggcctaactggcgcaacgtctacaagcgcatcgcgctcaaccaccagaaccagcgcgtcggagtgttctactgcggcgccccggtgctgaccaaggagctgcgcgagctggcgcaggacttctcgcggaagaccaacaccaagttcgagttccacaaggagaacttctagctctctctctctatatatatatgtaaggatatggatgggtgtagagaggggatcggagtagcgcaaagtaggtatttgcttgaccagttgggttgggtgggtcaaaaccccaacagttttttttttaattattaatattattcttcttcttcttcatttgctctagagaagaactaatgatcgaaatgccattatttggacagatcctctctctctctcacttagactatagctaggcagttcgatgagcatgcatgcaagcaaagtttagggtttt

SEQ ID NO: 43765 - DNA, 597 bp, Zea mays
  Clone ID: MRT4577_13991C.1
atggctgacctttccaacctctaccacctcccctaccacgaggaggacccgaagaacctcgacaacctcagcagtaggaagggggaggaggcggagcgttcccgcacgtcgatggagaagtcaacatcatatttgatggacacgggtcacaagagaacaaaaggcagcagaagctcaacgatcgacaaatactggtggcggccaccagtgcccccgccccatatcgatggcttaggagttgcactcaaagagctccacgagtcagacactccattcttcggcattgtgccgactgaaagagaatacccactcggacacatctacatgtcggtcacctttggaactccggaaaactacagaaccgagttcatgacgttcgaggtagtgagcttcgactgtggatacaacgccatcatcggcaggccgggattggcgaaattcatggccattccgcactattcatacatgatattgaagatgccaggaccacaaggaatcatcatcgtacgcgctgacttccaaggcgccgcagaatgtttccgagtggccattcaggcggccctcaccaccaaaccgccgacgacttcctccgcgtag

SEQ ID NO: 43766 - DNA, 266 bp, Zea mays
  unsure (1)..(266): unsure at all n locations
  Clone ID: MRT4577_139920C.1
agacactcttctcctgttcatgacactccagcaacttgagttaaacttcaactaacaagttcgaatgtaggtcgccagccaaaaaaacaaacagacgaactcaaacgaattcacaagttacaataaacaacgaccaatggagaggggcctaaccccctgaaccccagcaaagtgcagataatataaaaggtcatgggcaccctttaccgtgtgaagcgttgtggcctacaccaccattntttctcttttttttncttgttgcctgg

SEQ ID NO: 43767 - DNA, 331 bp, Zea mays
  Clone ID: MRT4577_139921C.1
agcagtggtaacaacgcagagtacgcgggcacatcgtgccgccggcgttccacgggttcattcatttcccagtgtacttatgcatgctccttctgtgacaataattttcacgtactggccatcatatgggctactctatgtctctatctagttttttcttggaacgtatgaaagttctcttttgttgctttggtctttattttttcaaatctgataattttagaacaatccttgtaagaaatgggaacccagattcttgaagaaaaaaaaaaaaaaaaaaaaaaaaaaaaaaaaaaaaaaaaaaaaagtactctgcgttgttaccactgct

SEQ ID NO: 43768 - DNA, 1607 bp, Zea mays
  Clone ID: MRT4577_139922C.1
agctatttgtaatattttttctttctgaccaaatgtttataatgtgcatccacaaaacatcttagttttattttggtcatatatatattttatattttttgttgatatattactattgtatgtatatgggccggtctgacacattaaggtattttgtgctatttggaccggcctggcacacataactaattgtgggccgtgccgtgggccgatgactgagcacacgtcctggcacgtcatgactcataattagatatgtgcttttgtgggccgtgcttttatgggccgtgcttttgtgggcctgtgtcgtgccgggccaggccgacccacatgtacatgtatagttatcattgtagccagatctagcacgtgagtgagcagcagggccggccctgagagggtgcggagggtgcgaccgcaccgggcctccaaaaacaaagggccccctagccattgggtgctagcacctttttctattaaacctatctattctagacacaaatacacaaagagcaatgcgctatcgaccagtctcgtttagattgttaaactcatgtctcaattacttatcgaatactccatccgttttaaaaatagtatttgttttagctcttgatttttatgtttatattcaactagatgacgatgaatccactaaagaagcaaataattctattgtgatctagagagtattatttactatacacatgatggttgtatcagcagagagaaactttttaaaattgaaatatttttgtgaactatttatggtcaacaataactcaagagatgttaaatgacttgacattctatatatcgaaaaaagttgctggatgagattgatctcaatgatataagcgatgactttgtatcacaaaatgttataagatatttttaatgatatcagataacaagtacgtgtttttttgctatattttatatttgttatcttataaacattaaaacagtatataatattttttgtacgtcaaatatttgatactatatgtataattatatatatttatgtgtggatggatcttcgtatcgaatttcgcactgagtatctaaaaagtcagtaacggctctggcgagcagttggattttatgaaccgagtcgtccaaacccgcactgcacccgcaccgcaccgctcctgcctcctgccccggcgcatccgacgtgtaggcagaggacgacgacaagcaaaggatatccagtagagcgcttggactagcaggctggacgaagctcatgaatttatactggagatcatgtgaattatcccggagatctccagtaatgggctgctgtgtgcagctggcatcagtttcagagccggggtgcatgatccatttttcagtgcgtgatcattttttttttggtcaagtgcaggctaccaatcgcaaaatcatttcatcactagctaagcttaaggcaggcacccacttgatcaagcaaaatcattgcactacctgttcttccactagaaaacgaaatctgcagagaatagagaactaactccccccaataatagtagaaactacagtttatagatgtatttgacattctacaattagtcggaccaacttgtccgttggaacggagc

SEQ ID NO: 43769 - DNA, 266 bp, Zea mays
  Clone ID: MRT4577_139923C.1
cgatggtctagtgcagggtctgcgtgcgtcgacgatagcgatcagaacacggtgatagctcagtggttgcgtgacccgaggacggattgctgaacagcagtgcgtctgtcaaagtggcgaatctacttcgctctgaatactacctgcaactggttactgtctctcacggtagcaatctccgtgaatgctccgagctttgcatggttcattctgagggctatgcgaagaacgtgtcgatgagctccaatgatgccatcacggacaat

SEQ ID NO: 43770 - DNA, 688 bp, Zea mays
  Clone ID: MRT4577_139924C.1
ctttaccatcggctcgtaggtcacgaggaggtcatgttgtgtccgtctagccccaggataaggcctcgcctttttcgtgcgaccctttttacttccttccattggatctaacgcccttatggtgcagggtgacccctgcctcttttgtcgaggaggtgtcatcctccgttggatcgtcgtggtcggtgctattgttccctctccctcggcatctcgagagagttatggagtctcttgtacaacgaagggggctaccgaggccaaggtcgggttgctctaggtccaacttgccgagtccgacggtcgcgtgactgttgagctggaggagctgcgctaccgcctaggtcaggccctggactttgtccgggctcatggtttctctctgacggagcgcttggacaacgtcccgtgccgcattgggggcgttgtttgcctcgacatgcaccggggtgccaccacggcgctgcttgttggggagctccaaaccggctgcagcctacgggaggtcgtcggccctcccttggccctatcggacgaaggtctgaaggagatgatgaaattctatgacgaggcagcaagttgcgtcgtacataggttgtttgtggacgacattgtccgcaacgctccagacccaatgttgtaacaagccatgacgcgacttcttggtataatagatgaagttaacccg

SEQ ID NO: 43771 - DNA, 462 bp, Zea mays
  Clone ID: MRT4577_139925C.1
cccggtcgaccccgcgtccgacagagacccaattgtgatcacctggacccccgcttcccagagtctgaagtacttctcggggtgcctcacctccctggctcggtcgtacaccctgcttgaagcctatacttgttgcttgtgtacaggcagtttcttgtgtcctgcgtgtcgtcggttttgggtgggtgtggcgtaggccgagggggggctggattttcttatctttgatgatcgagttcagaatgtgaatctgagcctgatcgactttgacttggccgcggccgctgaggagggcatgcgcctgcggcgcggcgtgatgtgtcactggcacacgtttggtgcctgttgctcggatgctgcggtctttgttggtctggtcgccgtcttctgctgtaagtcgggcattactagtcctagtagttgttatgaatgagttttgcctacttttgttcaagcttgtta

SEQ ID NO: 43772 - DNA, 207 bp, Zea mays
  Clone ID: MRT4577_139926C.1
cgtcatcattctagaaactgcacaaccgcgcctcaaatctgataggcactaagactgcttacaatatcaagcacctgaacctgaccctctatgcattcctcagttatactaggctggacgaacttgggtcctaaatcttcgctctcgcatgcctttgtaccgcagaacgcctgaaatgacagcataaatgctaaatatatctgcatt

SEQ ID NO: 43773 - DNA, 482 bp, Zea mays
  Clone ID: MRT4577_139927C.1
aaagcaagcaccgtgagagagagggaaatcaacgtccaccatcgacgaccttgcgcgtgcaccggtgacgagccacagtagtgagctaggggtcttcgtcggtgagcgccgcgcgcgaagaaggtcttcctaggcgaaaacggtggtcgaagtgctgggaaatgctcgccggagccaatccctcgaggcggaaccgtgctgcgatgccaacatggctcgccgtcaactctaccgacgacgaacaagtgaccgaggaccctggtactcagcaggtggaaaactccgagcaggagctcattgaaggtgaagagcaggtagcccaggaggacgactgctacgaggagtttgacgaggtctaggagtcgtctcccagttgacttaatggcgccaaggaaataatattagttcggtttattgttatgatttatctttataagacactttcactttgtaaaaatgtttgcgatatttatctctaaaaa

SEQ ID NO: 43774 - DNA, 583 bp, Zea mays
  Clone ID: MRT4577_139928C.1
ccgcggccgggaaaagagagagaaaacagactacgctccctcttcgcgtagaggaggattcttgtggcctcggaaactgcttccgtttgccgatatgcttcacaggaacacctcccatcgcgacggagcccaaggggaagggccgtcttcgtcgtcgccgtccgcgagcaggtcttctgccgctgggccgacgtcgcctccgtcgtcggcgcgcgaggccccggaccctccgccgccggccaggggcttcgtcgtcggattgtaagccacaaaacgtagctgcctactacgactattattgatccaaaaaaaaattattttttgggttcctgctgctcatcgaggacgggaaacgtggcgagatttttttttttcttctgaccgcggtaccggttcatcttgtcatgcgatgcagcatcatggcggtatgttgctgctgcctagccgacgagacgatcatgtgatgtgacgagggtgtgaacatctccgtcagacacgcgttgtgtacataaaataacctctgacagtacagtatttaactgtggtctgtgctaggaataggctgcattttcccgtcgcggcc

SEQ ID NO: 43775 - DNA, 439 bp, Zea mays
  Clone ID: MRT4577_139929C.1
acatgcccaaggaagcacgggacctcttcaccacaagctgacaaaccaagcgcaaatgaaaagacccacccatgaacaaatctacacttgactctaaaatctaaagcattaccgacatttccccaaacaaccagcaaggctttgggctcgcaggcgataaacaacaagggccccgctacaaaccgggggctgctcctgcccaatgcaatagggaaggaatgggcggacgtaaactacaggcacaaaaaaatggggaagccttgtttgggggctcataaaaaaactttcacgcctctgtttgcgctgtcctgcgggagggagccattcacaacattaaaagtcctgcaatgtccatggacactagcatgctgttcatggcgggaggtgctaggcccgaaatgcctgtgaaggtcttgccaagcgggtcggcaaccttaac

SEQ ID NO: 43776 - DNA, 543 bp, Zea mays
  Clone ID: MRT4577_13992C.1
aaaaaaaaccccgggccccttttggggttaaataaatcacatttcgggggttgggttggggaaaaaaaaaacccccaccaaaccggggcccattttgtaaaaaaaaaggtttccggcccacaaattcccccccccgattttccaaaaaaaaagggtttggttgggacttttctttgatttttgcctgggccttttttgggaggagggttttgaacctgtccccggttttgccccccagaatgggaccacccttccgttgttgatttcttagcccacccttgacgcccagggtttttgccgggacgggttctttgatcccggtgccttcttttccgaacccttggttttttgcgtaatagtggcaaaaaccaaaaccattccaatggccccctccctttaaagggaatccaatccatttttttttgccttttccccaaggcatgaaattgggcccccctggtttcccccgggagggaatcatttttggggcccaacaaacttttttttccaccctaaactttttatcccaacaacaaatttttt

SEQ ID NO: 43777 - DNA, 443 bp, Zea mays
  Clone ID: MRT4577_139930C.1
aattatcataatctgcaaaaaaagtataatgaaggaggaagagtaaaacaggcgtaccatatagcacgcacgcagccaggacccatcccccagcagtagcttctatatatcgcccgctagtagtgtgtcgaggcatttctctggagccctttttttctttttcctgttgaaagacgggggcgcccaagcttgttgtggtggggggccttcctctttggcctctcctctgctgtagtggggccagcgctcggccacactgttggcttattctgcggctatttagtccgggcacaccagcggctcgatcaggtcggtcgacagcggggacagttcggatggggggggcggccggtgaccgaatgacgcctaccatttactctcggtcctgggcccgctgtcgaaaaattttaggaagaggaccaatgctgtccgatggacgatcg

SEQ ID NO: 43778 - DNA, 956 bp, Zea mays
  Clone ID: MRT4577_139931C.1
ggcacgarcccacgacgcaccgccgcaagchaagaaagcaagccccaggcggcgccgccggcggaggacgcsatggggaataagawcgcbcbgacsacgcaggcgtcggcgacggagtactacctccacgacctgccgtccacctacaatctcgtgctcctcgacgtcgtcagccgcggccgcttcctcaagtccgtccgctgcaagcacgacgaggggttgctcctcgtcaaggtctactttaagcscgccggcgagtccatagacctcaaggagcacgagckgaggctkgagcggattaggaacgcgttcaaggggatcgargggtcccacgtatggcccttccaggtttggctgcaaacagataaggcagcatatctcttgagacaatacttcttcagcaacttgcaagatcggttgagtacacgccctttcctcagtcaggttgcaaagaaatbgcttgcctttcagtkaattcatgcagtggaacaggagccatagtaagggaatttgccatggtgacataaaatgtgaaaatgtkctcsttacttcttggaattggctawatcttgcggactttgcatcattcaagccaacgtatatyccggatgatgacccgtctsahttctcattctactttgacacttgaggaagacgacgatgcyatctagcacctsaaaraatctatdaaarttgtggtgaatcccaagttgcagcagacgcacctcttcaaccatctatkgatatattttctcttgggtgttttcttgctgaacttttccttgaaggccagccactttttgagcsttctcaacttctggcttaccggcgtggkcaawathaccccatacatacycyagaaaaratacaagatactkgtatccgttacaagatacttcacatgatccagttggaccccaaaaaaagggtacatgtcgaactatcttcagaaatat

SEQ ID NO: 43779 - DNA, 400 bp, Zea mays
  Clone ID: MRT4577_139932C.1
aaggaaaaaacccccccccaaaaaggtaaaagggtacaggggaaccaaaaaaaaaaaaaaaaaccccccatcatccatgaaaaaacaagggggaagggaccaaaaaaatacaaaaaacaaaaggaaccggacggacaaaaaaaaaaacaaaaaatccaggccccgggggaccacccccaccaaggggaccacaacccccgcaaaagcaaaaaaaggtgggggtccaaaaagggttttttgggaagaaaggaaccaacccccgcaaaaaatcccccccctaaggcttggtgaagagggcccaaggcttcctgaactcccccccggagccgggcttgaccccgaggggccccaatttgaacaaggggcccgggaaaacccggaaaaaacactcggggggggc

SEQ ID NO: 43780 - DNA, 581 bp, Zea mays
  Clone ID: MRT4577_139933C.1
ccggccgggcttggccccgcgcccccagacacgcaccgcacagccacacgcgtacacccgtacaccgtacgcagccatggcatcagtaggcttcggcacggtcgcgccggccgtggcatcatcgccggcggccaggacgacgagcatgggccgcccctctgcggcgcacgtccctgcggcgacgaccaagttcgtcgcggcggcggcgggtaagcgggtggaggagaagggcctgttcgacaccatcttcggcgcgctgtacaaggaggagcagctgctggagacggaccccgtcctgaacaaggtggggagcaagggcaaggccgccgccgccccggcgcccaagaaagccgctgaagagggcggcaacggcgggctcagccttggcgggttcttctccaggcccaagaaaggttgatctcgccctgtgttctgcaagcacacaccccagccagcatcagtggttcactgctggctgttgatcatcatcatcatcactagtaaatgtagcagttgtgtgtctatgtataaatgtactgaagctcgtgtagcaaaaaaaaaaaaaaaaaacccgcggccct

SEQ ID NO: 43781 - DNA, 389 bp, Zea mays
  Clone ID: MRT4577_139934C.1
aaaaacaataccgcccctcacggggaattaaacaaaatccaaaatccaaaccctatgtgtcaggggggaagtataaaccccaaccaatatagtaccccccccaaaagggggagaaaaaggcatagatctccatgccccaatgatgcaaaaaccgctccaggctttccctggtttttacacatactagcagggggcatagatgccatggggtatggaggggccgttcctaaggctaaatcatccctaacaaaccccctccgttcttttttatttggcgggggttagtttaaaaataaactagccacccccaaattttcgagaacgggggggggccaagccccaacaagatttttaaacctacataccactaaacctttcattttccaagg

SEQ ID NO: 43782 - DNA, 284 bp, Zea mays
  Clone ID: MRT4577_139935C.1
aaaacccggcccgacccactcgtccgcccgcgcgtccggctaatcgcacgtttgatacgcgcatagggtcgaaagactaatgtagggttctatcagctgatggcgggcgaagtttacctcaagatagctggagcccacacaagttctatcgggtaaagccaatcattataggcatcgagcgcgcatcgccctcaacctattctcaaacctcaaataggtcggacggctcgtctagcttggtgagccctaccacggaatcgagatgctactagtacgccattttt

SEQ ID NO: 43783 - DNA, 773 bp, Zea mays
  Clone ID: MRT4577_139936C.1
attgggtacctcgaggccggccgggcttggccccgcgcccccagacacgcaccgcacagccacacgcgtacacccgtacacctcccgcagccatggcatcagtaggcttcggcacggtcgcgccggccgtggcatcatcgccggcggccaggacgacgagcgtgggccgcccctccgcggcgcacgtccctgcggcgacgaccaaggtcgtcgcggcggcggcggggaagcgggaggaggagaagggcctgttcgacaccatcttcggcgcgctgtacaaggaggagcagctgctggagacggaccccgtcctgaacaaggtggggagcaagggtaaggctgccgcgacggcggcgcccaagaaagccgccgaagagggcggcaacggcgggctcagcctcggcgggttcttctccaggcccaagaaagggtgaacgtacgttatgttgctccgactccgagtgaggatcgttttgcgctgctcttgctttcttgtacgtaatccttggattattggaatggacggctcgcatgtcgtgtatatatatggcagcacaaatgagagcagagcaccagcgtataactaattccttccttttcagttgatctcgccctgtgttctgttctgcaagcacacaccccagccagcatcagtggttggctgctggctgttgatcatcatcatcatcactagtaaatggtagcagttgtgtgtctctctaaccaaaaaaaaaaaaaaaaaagcggccattattgtaaaaaaaaaaaaaaaa

SEQ ID NO: 43784 - DNA, 278 bp, Zea mays
  Clone ID: MRT4577_139937C.1
attacaattacaaaggaaaacactgaacggaaatgagacaaaatttacaagtgggtttggaacaattcgtgactgctgtggtagaaaaaatcgattaacaatggggttgtcattgtgaaaatgacagggaagatcaaagcaggggaacagcgaataatgctcattttcaaatcattgttcttttgagaagtgtttaatgtgcttgggagaagggagatccaagggagaacagaggagatgacagcaatgagagagccgaacatcaaacccttaaccca

SEQ ID NO: 43785 - DNA, 281 bp, Zea mays
  Clone ID: MRT4577_139938C.1
gcaccacgctaatctaatgcggcgtccgacacatgactgctgaagcaagtctgaacgtgccaatgctatctagatacagaagtgtacttgacgcattgcaaatatctcgattacttagatctaaattacttgtacctgcttggtctatgcacagtaaacttttcgatcttgggctcatcaaactctttgaaaaacgaattgtctaaaattatgccccccctattgaatacaatttataaatattctttctgacttggaactatttcttgtcatttcaatga

SEQ ID NO: 43786 - DNA, 145 bp, Zea mays
  Clone ID: MRT4577_139939C.1
cgcaacctaccgacccaacgcacggagacccccatcgagcaatcgacataccgcccaatacccaaagccgcctctcaccgcgccccctctatttcttactcgtctatgtcaccactggtttcaccactgcaaatagaccagcgtc

SEQ ID NO: 43787 - DNA, 312 bp, Zea mays
  Clone ID: MRT4577_13993C.1
agttgtgatttatttttcattttcactctcattgttttagtcgttgtttttgcataaactggagtgtaagcatgcataaaggcttgtgaccatttacaaaatttgggccctcaacatgtagttggaaaactaaaattttcgatccggaacaagggggatgcaacagtccatgggacatgcaaactccgtatagaatgaggcacagtgtttaacaacacaaacaatgcagcgggctgctttttttgtgcttgcacgctctgaactgaattgaataaactggtgtgagcttttggtataagcgacacaacaagg

SEQ ID NO: 43788 - DNA, 655 bp, Zea mays
  Clone ID: MRT4577_139940C.1
aattcggcacgagggggagggagggtcggcacgtcggttttctgattgttactacttgctccgcggattcgattcccttgccgagatttatctcttcgccgccggagactggtggacagcagatcctcttccatctccgccggccgttcattcttaagctgcctgcgaagctttttcttgagaccctctccagagtactgttcgccggatcttggtttggagggcgagcggtgaaagatcgaatccttgtttggaggttcagcggcaggcagctcgctgtgacgtcgcccgtgcgggcatggtgtccagatcctactcgaacctcctggagctcgccgccggcggcagcggcggcgagccgctgccgtcgctggggcgccgccggataccgcgcgtcgtgacggcctccggcattgtgccggacctcgacgtctccgacgccgcctccgccgccgaccagtcctcccacgcgccgcgggagcgcgtcatcatcgtcgccaaccagctccccgtccgcgcctcccgccgcgccgccgccggcgccggcggcggcgggtgggacttcgcgtgggaccaggacagcctcctcctgcaggtcaaggacagcctccgcgcgcaccacggtcgcgcggacgtggagttcgtctaccgtcgc

SEQ ID NO: 43789 - DNA, 580 bp, Zea mays
  Clone ID: MRT4577_139941C.1
caaccatcactgccttcatcatccgatctcatatatccttacgccaacgacagctgctagctgcagcggagggagggcggcggcgcgcgcgcggcacctatggaggcgcgggcagtgtcggcgctggacctttcgctgcacatcagcctgccgagcagcgccgccgggtcggcatcgcccgccccggagctgggcggcgggggagggattgggcgaggtgcgcagccgccggccggagcggacccatggcgtcgactgaacggatccacggcgtcgaccgagctgtcgctctcgccgccgctgtggcagcaggacgtggctgccggggatgtccttccgtgccgtcggctccggccggcagcgccgaatcactactcctccaccgcggatgcaacgacgttcgtgccagtgaccgtaccccggcttatttcgttcgacgccgcggcgggagcggaggacgaggcggcgcgggcgaggccaatcgaaggcgtgcccgtctacagcagctcgcgggctgcccgtcgtcgccagctggacgacgggacggcagcagcccgcaggcgttcaccagacaccggtc

SEQ ID NO: 43790 - DNA, 285 bp, Zea mays
  Clone ID: MRT4577_139942C.1
ctcgcggcgggtctcgtggggaacagtcaggattatggaaggattcttaagccaataggcgggagtgataaagaatgtatacttcatggtgtgtggcttaatactgatcaagcacagcctgaggtaaccttactgctattgataccaatcacttgtctgaagaggggagctcttggtaggggattacaagatccatgcaataaagcttggatctccgacatggacctccaatctatggatgacataagctactaggtgacccatgatccaaggcagaggacgcct

SEQ ID NO: 43791 - DNA, 443 bp, Zea mays
  unsure (1)..(443): unsure at all n locations
  Clone ID: MRT4577_139943C.1
acacaatatattctgttaatacatcacattacaaatgagaattacttcttatctgtgttcttttagcttaaaagnnnnnnnnttgcaacatgttgcgctgcaaaagatatagctgtttctgtttttgtgagttactgatcaatttctgcattgagttggatcttggatgagtcactgatgcacttcgattttccttagctagtctaatttatgtggtaaaagcttagagttgggagctactgctgcctccattatattgatgatggaaccaatcttatattttgtatatctctctccatcatattgatggaagcaaccctatactttgttttcttgttggtgtattctgaattattattataaaacattgctgtttggtgatttgtgccagcctacttaatggatttcagaaacatggcaattctgatacatttagttttttt

SEQ ID NO: 43792 - DNA, 250 bp, Zea mays
  Clone ID: MRT4577_139944C.1
cggacccttccgccaactgtataacattatcaagcaccgtaactcaaacctcggcacgcctacttaaagcaggggatcgcaacctcatactcagacctctcggcagtcctcgtacttgcacaaatcacttctgccacacctgtcacagatccaacgttcactttacgcgcctaagatctactaattaccctatgatgatgctaacgacgtagtacattatcaaacaatctcaccacaaaacttagctaaa

SEQ ID NO: 43793 - DNA, 336 bp, Zea mays
  Clone ID: MRT4577_139945C.1
gcgagtggcgggcgcccgtcgtctttttttttttttttttttggtagatagcagagattttattggtgcgatttacaggttgcgctcataatttttacattattacacacggaatcgcgactcggaggtcgagtcaccactgccggccccggcgcggcggctacctaatcctactacattcctacgtcgccatgactcactagcctcgcgtccttatgatggttatggagccgcgcccgggggtgtgcaagcgcgtgaagcccgcgacggccttgcccgagatgcccggctggtccgcggacacgcgccgggcgcacgcgaacttgctcacggggt

SEQ ID NO: 43794 - DNA, 472 bp, Zea mays
  Clone ID: MRT4577_139946C.1
gggagaccggcccctaaaaccccggggttttaaaaaaaaaacggaaatgggaaggggctcgggtttagaattaacggacaggtccccccccaaatgggcccctttgggaaaaaatttttttactcgcccagattaatacattacaacacattcctaagggaaaaaattaactcgacgattgggtagcactggtttttaaaaaacccgggcccagaggggggggtaatccctcaagaaaaaaaaaccgcccttccttgggggggaaaaaccgggggccaaattaaaaaagaaggggcccccagggtccccaaaaaaggacttttgggggaaccaggatcccggaattttcccccggggcagggggtcggggtacatttcaggggaaacacggtaagggggtttttggaaccttccctgggttaaaataaggggaaaacatttggggagcaagggccattgccaaaagccccgg

SEQ ID NO: 43795 - DNA, 315 bp, Zea mays
  unsure (1)..(315): unsure at all n locations
  Clone ID: MRT4577_139947C.1
cggactcccgggactactgcaaggctgcattgatctggccttggacccattggcccaagacttggtttattgcacaagcctaaccccggacttgttctnttacaggacatggggtacagcgctcggtattgctcactcttgttacctagctgcagcaactggaggccgtcgcttttacaaggagctgcagaagaagtggcacaaactggtataccatctggacctctgcttgagacaccagcgctggatcgatgcataccaaccaacttcaggagcttgcattatacgagctgctttaatctgccgtcctattac

SEQ ID NO: 43796 - DNA, 981 bp, Zea mays
  Clone ID: MRT4577_139948C.1
aaaaaaaaaaaaaaaaaatcgcgggagcccaaggaagcgaagcggaagagaccgagagggagaagcgtttctcctgggttgttcgggtgagccgctagcgagagcgagacggagcgaggctttgccgctgcagagcagagcgacatgagctaccggcttggaggcgcggcggaccgcgaggagggggacgaggagctgttcgagacggcgccgtccgtctccggcggcgagggctcgtgcgaccaggagcgccgcgcgttcgtgccgccgctgcggaggatgaactcggacagcatctacgacatggcgtccatggtgtcgcagcagctcccagccaagaaagggctatcgcggtactacgagggcaagtcgcagtcgttcgcgtgcatgtcggaggtgcgctgcctggaggacctgcgcaagaagggcagcccctacaagcacaggaccaacaagagctacggcgcgctgggactgggactgggagggatgatgtggccaagaagcccgcctccagctcctgcgccgacctcggcctcgccgccgccaacgggttcaggacggcccacggccccaattcagaacgggtaccaccagtgaggctgtagcctgtaggcagacgacgagagcactgcaactgttttttcgttctctcttttttttttttacttctctactcttgttctgcgggatttccttcacgggcttgacttgacttgactgtgagaattttacgaggtggtgtgaactgttgcttgctctgctatcggagtacctgtagagcactagagggactcactcacaacataattgaccgttctgcactgttgctgctcggcaaaacaaactgctgtttgggtaaatacgaagcactgcagtcctggcagaaaataatgatcgactgtttccttcctttggagtgaccattaaccgaatcctctcccgcacctaccacataagctctcaactcaactttgattc

SEQ ID NO: 43797 - DNA, 1645 bp, Zea mays
  Clone ID: MRT4577_139949C.1
tgggtacctcgaggccggccgggccgggacttccgttcccctggcctggccccgtcctctgttccagcgtttgccgccgctctgcacaagccctgcctaccgatgtccgtcgcgtccgtggccgccctccggacggccggctccggccgccgccgcggcgcgggttcccagcagaccggccttaacgggggcaggttcctgatgatgcagaggagggagctggtgaccaaggccgggatcccgctcgccgtctcctgctcgatggctacctcaccggcttcagccaacggcgctgctcaagggctggagattttgccgttcaaagctgacgggtacaacttctggacgtggcggggtcgccggatacactacgtcgagcaaggcgcggggcggcccgtcgtgctcatccacggcttcggcgcttccgccttccactggaggtacaacatccctgagctggccaagaagtacaaggtgtacgccatagacctgctggggttcggctggagcgagaaggcgctggtggactacgaggccaccatctggatggagcaggtctccgacttcctccgggagatcgtcaaggagccagccgtccttgtaggcaacagcttgggaggcttcacgacgctgttcacggccaccgaggtgccggagctggtccggggcgtcgtgctcctcaactccgccggccagttcgccgaccccaacaagccggccgccgcgccggccgaggaggaggaggggggcagcgcgctgtccaggtacatcgtgcagccgctcaaggaggccttccagcgggtggtgctggggctcctcttctggcagtccaagcagcccgccagggtcgagaaagtcttgaaaagcgtgtacatagatcccagcaacgtcgacgactacctggtcggctccatcacggcgccggcggcggaccccaacgccggcgaggtgtactacaggctgatgtcgcggttcatgtcgaaccagagccggtacacgctggaccggctgctggggaagatgtcgtgcccgctgctgctgctgtggggggacctggacccgtgggtcggcccggccaaggccgcgcggatccaggagttctacgccgacaccgccgtcgtgcacctgcaggccggccattgcccgcacgacgaggcgccggagcaggccaaccgcgcgctgctcgagtggctcgcggccctcgacgcccgcgccaagtcggccgagcccagcctacagaccgtctgatggatcgagcgcaaggggcttagcgtatgctagtcaaagaatacaatttggtggcctatatctatagtttgatgtagtatgtcctgtagtaggaacagtaatttcttactgtgagttagtttactgttctacagctgttgcacccgtttgatgtagttatagatgaccaataagcacgaggcccgcgagcccggcacgaggcccgcgagcccggcacgaagcccactgtttagcctcgatccgagtccggcacggcacggttctatgcaggcccgggccgggctcggacaggaaactaggcacggtgggctagtccggcacggcccgtttaactctaagcccgttaagcccgctttttgcactaaaacgtgtttaccggcccgtttagcccgttttt

SEQ ID NO: 43798 - DNA, 1224 bp, Zea mays
  Clone ID: MRT4577_13994C.1
atggaggcttcctttggaggattttcagtgaaaaacaacccaagaggggacaatgaacatgcagatttattagctaagtcagcagcacaggggctcccacgtccttcagatgtattctttgaaactctcaaagaaccttcggtcgagctcatggaaagagcgatgctcataatttcacctgtacatagtgaggattggagaacagaaattgtatctttcttccatggcaattatcctttggatgacgaagtttacataaaaaggatgcatgccaggacaaggccatatgtgattatagaaggggaattgttcaaacaaggagtttgctccacactattaaaatgcctatccagagccaaaggtcaagagctgatgaaggaaatacattcaggactatgcggagcccacatcggatccagaccactacatggaaaagtctttagacaaggattctattgcccgaaggctgcttcggacgcagcagatttggtacaaaaatgtgaaaactgtcagaagggcctagaaatactgggcccacttccactagcacaagggaatttgagatatgccgtagtagcaatggaatatttttcaaaatggatcgaagctaaacctcaagcaaccataacttcgaccacaattcaaaagtttttctggcagaacatcatttgccatttcggtgtaccgaaggctatcacagttgacaatggagcacaatttgattccaaaacatttaaaaccttctgtgatcaaattggtacgaagatacactttgcatcaggaaagtggtcaaacgaattggtaaaagtagtgtggaatcataacactgatgtctcaagatcaacagggttcactccatttaagcttttattcagagacgaagcaataacaccgaaagcagcaagaacgagatcgataagaactgtagcttcagtagaggacgaggacacttgcaaaataataaaagacaccatagcaggagtcggacttcaagcaatagatcacatcaataaataccaagctgaaatagtcaagtggcgagacagaaaagtgagactaaagaatattaagccaggacatttggtgcttcgaagaatagctaacctagacatagtggggaagctacaactcaagtgggaaggtcccttcttggtagtatcttcgtcaagacctagatcgtacagattgaaagacatggacatgaatgatattccaagatcctag

SEQ ID NO: 43799 - DNA, 347 bp, Zea mays
  Clone ID: MRT4577_139950C.1
gcgggtactacgactttctgcaggcgttcatcgacaaggcggtggcctacgggttcatctaagccctccagcgccacatatttgtcagcgcccccgacgccagggaactctgccagaacctggaggggtacaaggccgcgcaggacgaggacccggcgactcccaagctgcggagggagatcgagcaggacggctacaacaccttgctcctggccgacatcgcccggtgatcggccgtgcgacagatcgctgctgctgagggagctcttgtggctacagtccacgcattgagtgccggtcaggccactggcctccaccctgctgctatctacccctaccccctacta

SEQ ID NO: 43800 - DNA, 1326 bp, Zea mays
  Clone ID: MRT4577_139951C.1
cggacgcgtgggtggccccgtcctctgttttagcgtttgccgccgctctgcacaagggctggctaccgatgtccgtcgcgtccgtggccgccctccggacggccggctccggccgccgccgcggcgcgggttcccagcagaccggccttaacgggggcaggttcctgatgatgcagaggagggagctggtgaccaaggccgggatcccgctcgccgtctcctgctcgatggctacctcaccggcttcagccaacggcgctgctcaaggcatcgtcagcgactccgtctctcctgtcgtgcgtgcagggctggagattttgccgttcaaagctgacgggtacaacttctggacgtggcggggtcgccggatacactacgtcgagcaaggcgcggggcggcccgtcgtgctcatccacggcttcggcgcttccgccttccactggaggtacaacatccctgagctggccaagaagtacaaggtgtacgccatagacctgctggggttcggctggagcgagaaggcgctggtggactacgaggccaccatctggatggagcaggtctccgacttcctccgtgagatcgtcaaggagccagccgtccttgtaggcaacagcttgggaggcttcacgacgctgttcacggccaccgaggtgccggagctggtccggggcgtcgtgctcctcaactccgccggccagttcgccgaccccaacaagccggccgccgcgccggccgaggaggaggaggggggcagcgcgctgtccaggtgtacatagatcccagcaacgtcgacgactacctggtcggctccatcacggcgccggcggcggaccccaacgccggcgaggtgtactacaggctgatgtcgcggttcatgtcgaaccagagccggtacacgctggaccggctgctggggaagatgtcgtgcccgctgctgctgctgtggggggacctggacccgtgggtcggcccggccaaggccgcgcggatccaggagttctacgccgacaccgccgtcgtgcacctgcaggccggccattgcccgcacgacgaggcgccggagcaggccaaccgcgcgctgctcgagtggctcgcggccctcgacgcccgcgccaagtcggccgagcccagcctacagaccgtctgatggatcgagcgcaaggggcttagcgaatgctagtcaaagaatacaatttggtggcctatatctatagtttgatgtagtatgtcctgtagtaggaacagtaatttcttactgtgacttagtttactgttctaaaaaaaaaaaaaaaaaagaaaaaaaaaaaaaaaaaacccgcggcc

SEQ ID NO: 43801 - DNA, 763 bp, Zea mays
  unsure (1)..(763): unsure at all n locations
  Clone ID: MRT4577_139952C.1
ggaggcttcacgacgctgttcacggccaccgaggtgccggagctggtccggggcgtcgtgctcctcaactccgccggccagttcgccgaccccaacaagccggccgccgcgccggccgaggaggaggaggggggcagcgcgctgtccaggtacatcgtgcagccgctcaaggaggccttccagcgggtggtgctggggctcctcttctggcagtccaagcagcccgccagggtcgagaaagtcttgaaaagcgtaacgttaactcagcttgatgtctaagtctaatcgcataaagttcatcgtcttagatcgtcacactcatacctgcaggtgtacatagatcccagcaacgtcgacgactacctggtcggctccatcacggcgccggcggcggaccccaacgccggcgaggtgtactacaggctgatgtcgcggttcatgtcgaaccagagccggtacacgctggaccggctgctggggaagatgtcgtgcccgctgctgctgctgtggggcgacctggacccgtgggtcggcccggccaaggccgcgcggatccaggagttctacgccgnacaccgccgtcgtgcacctgcaggccggccactgcccgcacgacgaggcgccgggagcaggccaaccgcgcgctgctcgagtggttcgcgggcctcgacgcccgcgctaagtcggccgagcccagcctacagaccgtctgatgggatcgagcgcaagggctttaacgtatgctagtccaagaatcaatttg

SEQ ID NO: 43802 - DNA, 468 bp, Zea mays
  Clone ID: MRT4577_139953C.1
ccccggcaagttcacctgggagggcgccgacggctacgccgacgaggacgtcggcctcgtctcctccaagaacgccaacaccaaccgcgccaccaagggtggaggcgccgccggcgccaagaaggacgacgacgacgacgagtaggccggcctctcgccgcctcggcccgccctccccccgtcgatcgccagcaagaaccaacaagtccttcctacctagtttgattccagtctcagttcgattctcgtgttgaataaatcatgatcgtgtgggtttaggtgtcgtgctcgcgagtaacactgagcacagagccactgggcgatccacgggccgtgcagggtctgtagatatcatctcatctgttcttcgctagtactttgctgatttgctcatgttcaggggcctggcctcgattcggttcttggatgaactgatttattagtttccggaatcgatgctttcattcc

SEQ ID NO: 43803 - DNA, 485 bp, Zea mays
  Clone ID: MRT4577_139954C.1
aggcccgttaaggccccaatcccggaacctggattaattaaaaaaatttggactggccccctaaagttggggggcctggaatggggggactaaagcccagcctttaaagagccaaaaaccggggacccgacccaagggggcccagttaaaggggaggggaaaggaacaggcggcagccccaggaccatggatctcctggttcaggggggttccggccccggaaattaaaaatttgggcaaagggaaaaggggttccgtttaacccttggccaaggtcccaagaacggttaatttttttccgggaaaaaccctaaacaattggggggttaaccctgaatggaccgagtccttacgggcggaagttggggtcccgttccaggattgggcccttttaagcttaagcttcccccagttcggaaggcttggggggggcctttttgtggcaataaaaaaaggccttttaattggaggaatatttttccaaa

SEQ ID NO: 43804 - DNA, 396 bp, Zea mays
  Clone ID: MRT4577_139955C.1
cccacgcgtctcggctctctctaccgtccggttccccaagcgccagcgcggcggcggcgtctctggctgtcggggggtaacagaggatctccctgggcactgaagggtggcctggttgggaccgtcgtccctttcttctcggggtttggtctggcttcattgctccgtcggtgttcggtgtgcgcttcatcggggggactctcttctcccggactcgggttcctggattgcttctgcgggtctgtggcgcggtgtctttgcggtttgcctagctggtctctccggcgtcgtgggtcctgctttcgggtctttctggctccgtgctggtgatgtgcccggctggcttgtgctcgctttcttttggggtttgcttttttcccctgttcttctggggtc

SEQ ID NO: 43805 - DNA, 185 bp, Zea mays
  Clone ID: MRT4577_139956C.1
gttatggaaagtcgttcaccaaaaggaacaatctacaccgatattgcgagaggcaccgcgaccagacctacaatgcctaatccgacaatgtgcccccacaacatccacgaatacactgtccaggcgagagtaaagacatactgcatagccctaggcaacctcttgtatcactactcctgcactgc

SEQ ID NO: 43806 - DNA, 747 bp, Zea mays
  Clone ID: MRT4577_139957C.1
gacgagaagatttgcagctagtatatcagaacggtggatttgggcccgagtgatagcgccggaggaagcgtgctccgtgtgggccctccctccggagcccgcccgcgaccgtttctgccgcatggaggaccgccgccgcgtgcggcgttagtcggccgggcggccccgccttccagttccagccgcttggaagccgtcgaggtactccccgccggcgtccaaccttacacagtccgtgttacggggcttgcccgtggcagcttcttctaccagtgcgtgtgcgtctacctccttctggagcccacccccgaggaggtgggagcgagcgatcactgctgtgccgacttcggttataggagaaaaactcactcttatatggagactttacagatgatgatgatgaattgatgaggaggcaaagaagaagatagatgagctgatcaaggatatctgtggaatagagtttgatatcactgagcttgtgctttatagaaggatgccatagatataagcttggagtcatgggaattggtggaggtgtgccatcttgagaagaagtgattagtttcctctccaaggtgattctgctgtaagttaattctgagaatttgtaatgctttatagcgtcttgttgactactttctaagcaactggggcacaatactttgaatgtgaataaggtataatgtgctcttctgattggagcaaggaataatatacactatgtgatgctgtgattgttttccc

SEQ ID NO: 43807 - DNA, 188 bp, Zea mays
  unsure (1)..(188): unsure at all n locations
  Clone ID: MRT4577_139958C.1
ttctgcagaccatccggttnaaggtcctctctcggcgcggtnttcggtggttggagantgtntgagtgtgatccatctcgtgggttagagatcgggtctggcgggaacgagancgagtctgcagcgacgatggcgtgactctgttgttgatgaatttgggaaactcacttctctgcttaaagaatgtt

SEQ ID NO: 43808 - DNA, 966 bp, Zea mays
  unsure (1)..(966): unsure at all n locations
  Clone ID: MRT4577_139959C.1
ccggccgggatatcagaacggtggatttgggcccgagtgatagcgccggaggaagcgtgctccgtgtgggccctccctccggagcccgcccgcgaccgtttctgccgcatggaggaccgccgccgcgtgcggcgttagtcggccgggcggccccgccttccagttccagccgcttggaagccgtcgaggtactccccgccggcgtccaaccttacacagtccgtgttacggggcttgcccgtggcagcttcttctaccagtgcgtgtgcgtctacctccttctggagccacccccgaggttaagcatctcttctcctcgtactagttccgtagttaagtttgttttgctccgagtttcaaacttccagcaggtttgaaatccagaggaaatgctgatgcagtattgtattgtgcttgtgcattgngatcatttggctctcttatatcaattatctgaatttgttaggaagtggaagtgagcgatcactgctgtgccgacttcggttataggagaaaaactcactcttatatggagactttacagatgatgatgatgaattgatgaggaggcaaagaagaagatagatgagctgatcaaggatatctgtgggaatagagtttgatatctctgagcttgcgctctatagaacggataccgcagataaaagcttggagtcatgggaattggtggaggtgtgccatcttgagaagaagtgattagtttaagcttggagtcatgggaattggtggaggtgtgccatcttgagaagaagtgattagtttcctctccatggtgactctactgtaagttaactctggaatttgtaatgctttgtagtgtcttgttgactactttctaagcaactggtatggcataatactttcaatgggaataaggaataatgtgctgtgctattctgatacagtaaggaataatgtacaatctgtgatgctctgttagtttcc

SEQ ID NO: 43809 - DNA, 155 bp, Zea mays
  Clone ID: MRT4577_13995C.1
agttgtgtcatacgatcgcgtcatcctagattcgcttcctctcactgcagctccgatgggcgtatgcacgcaagcctgcggcgccatgcgtctcctcctggtcgacgctggggcgcgcgctgctatcggtccgcagctcatcgtcccaatctctc

SEQ ID NO: 43810 - DNA, 230 bp, Zea mays
  Clone ID: MRT4577_139960C.1
aatcattgcctttctcctacacatgatctatacgaatacccttccttaccatcactggcggtatcaccatatcgtactgtcatttcaatatgcaaacctataccaagaccctacacctatatactatcacactccatgtataacttctgacaccattaacactgtcatatctaagaatccctactatcatgacatacatcctgaatacccacatcttctattttaccact

SEQ ID NO: 43811 - DNA, 475 bp, Zea mays
  Clone ID: MRT4577_139961C.1
cctcgaggccggccgggccgggaatcatggatgagaggagagagtgtgggagagcccacttggatcaaatcaatgggagacgagaggagaggggagcaagcatgcgacagcaaacatccacgagatgagtgagacgacgatcgagggcacgcgcccgcatgcgtccgcgcggtagccgtcaaccatggtctggctggcctgctgactgatctctcgccggccggccctagctagctagctagctagctcagatgagacgacgacgacggctcgatcaggcaccacacatgcatgcatatggatgcagctgatggacacgctacggccgccagctacgtggtgcatcggcgcgcctgctgttgctgtgctcgctcgctcgatcggtccctggtggttctgagtcctgatacgcattgtagccggtagtcctgacctgccaatgacaaaaaaaaaaaaaaaaaaggcccctagggcc

SEQ ID NO: 43812 - DNA, 340 bp, Zea mays
  unsure (1)..(340): unsure at all n locations
  Clone ID: MRT4577_139962C.1
cgcctttacaatggnaaaaactggtcctgttgtgttgctcggnttggttggacaaaaagcgcaccgactttgtgttgctcgggttgcctggtcaaaatgctcttcattgtcctgtatcagtgttgctcggaagcaggttcactggaatttcatattatttttgtcagactattgaggggtggggttgaattgcgggtcatctgttcgacccggaaatgacattcataaatgtgtgaggttgccccatgtaaaaaaaaaaaaaaaaaaaacataaaaaaaaaaaaaaaaaaaaaaaaaaaaaaaaaaaaaaaaaaaaaaaaaaggggggtgccgttttaaa

SEQ ID NO: 43813 - DNA, 782 bp, Zea mays
  Clone ID: MRT4577_139963C.1
cctcgaggccggccggggtttctgcttgctattcactttttaactgcccggccaccccctgtttcccccgcttcaagcctgccactgcctttgaattgcattctgcgcctcagcagcccgaaacgccccccaaagccgccgcccactctttgcgcatcaaatctcactcagccacaccaggggtcctcccctctcgtggtatagattggcagagtcctcgggcattaaactttcagaaaacatcatcatgaaatcttcgttgttactctcggcaactttagtgtcagctgcggcggcattagagttcgtcccacgagagaatcccaaagtagtcctgctcgatacccagcgccgcaatgtcattaatccagtcgcgcacgaccggttacgaagacgccaaaataccgttcaagagacgctcgataacctcgaaactctatacttcgcaaacgcaagtttaggcactccaccgcagaagttccgactacacatcgataccggtagcagcgatctttgggtcaacgcggtcaactcaaatctctgtatgcaaggcgggaatcagtgcggagcatcaggcacatacaacgcaaacgaatcgtctacatacaaatatgtcaatagcgtcttcaacatttcctacgtagacggatcaggcgcatcgggagattatgccacggatacgtttcgtttcggaggcaagacattgaaggatttgcaatttggtattggctacgtatcgagctcgacagaaggcattctcggtatcggatatcccgtcaacg

SEQ ID NO: 43814 - DNA, 703 bp, Zea mays
  Clone ID: MRT4577_139964C.1
cattgggacctcgagccggccgggaacccattccccacagcgccgtcaaccgccgccatcgatccatcgcccggaactgacctctacctatgcctggagccggcgaagaggataagaagcccgcggagggccgggtccacatccacctgaacgtccagggacacgatggcaatgacgagctctttcccataaacacggccacccagctgaacaagctgatgaacccctattgcgaccgccatgctgtggacatgaacgccatggccttcctgaccgatggccgcaggcttcccgccgagcatacccctgatgagctggatatggaggacatggacaacatccactgcgtgcttcaccataccgaaagcagcggtcctaacaccacctaagatctcctgctgcgcagcctctcatttctcgccgccctgactgctactaaacccaacggaagaagtcttttgaatgaacttgagctgcactggatccttgagccagtgctgatatacatccctaaccttgatatagtggactgcttcgaaactatcgtctgtcatcactcgtttatctatccctaatacatgaccacaggtaaggacttccaaaactaacctactaaaagctgcccacttagctccaactgacgacccctttagggagggcaacttccacacttgtagtaatcacgatcataactggttcccgg

SEQ ID NO: 43815 - DNA, 858 bp, Zea mays
  unsure (1)..(858): unsure at all n locations
  Clone ID: MRT4577_139965C.1
ccggccgggccggggttgttgctgctgctaggtgctagctcacgagtcacggccgccttccactcccacaagcttcaactagccttcttactcccgccgtcgcccccgatccgagagcgagcatggcgcactctctcgccgcctccttctcgccggccgccgcccggcgccaggtccgcatttcttggacttattcttgccttgacctggtagctagtttggtctacgaggctgccactgtttcttgaaacctgatgcgaggagcgtgccgccgtcagtcgctctagattcgtggcgtttggtttatgatttgtcgggtttttgggttggctcgcttagatgggatcatggatggatggactgatcactgatgccgtagccgtagtttctggtgatgctgggatgctttgttggtttcgattcagttgcttgattgtgattagattcgagctcactcaacagcttaagaacttctctgtgagcatttcttccgtgcttgattcaggggatcttcttttgtaaaagttccctgatctttttttaacgaacaaagttgccttgttctttttggcaaattttgcctatgattagtacttgttgagcatacaaagctatggataccatctatcacgatgaatgatgaacagatgggggcagtttcgcatattttagtgcaacctgcaaagattccaaaactgctgtgactaaagaaacgggcgccgacccagctcggtggttcatatggtttattttaaaaatgaacatctgtcctctggtagtgaattttgctggatcccannaggagcggagggtcggnccgtcaggggtgacactagcacagcaagcgacagcacatgc

SEQ ID NO: 43816 - DNA, 185 bp, Zea mays
  Clone ID: MRT4577_139966C.1
cccaatcgtctgcccactcgtccacgctggtcatgtgttcagcgccatgggcatccaatgtagatatgagaccgtcatcgtgtggaaaagaagattatatggtcatgtccgctttgatgctctagtggcctctggaggcatgtgtgggctgtcaacgttcacccatgtggaacacgtctgcagaa

SEQ ID NO: 43817 - DNA, 466 bp, Zea mays
  Clone ID: MRT4577_139967C.1
cacctcgactcgcagcctcctagggtcagaatactgacattgcgggtgcgcccatctctggagcacagaatacgctagggaagccatggtcaggatgctcgcgctgacctccttctttttatttaacgccagccctgagggaagccatggcctttgctacacggctctcacgtccagcggcatccttcatctcgggggggatgggtgaacagcaccgcttgcacccactcaaagacccactccttccacatggacaccaatcagaagatcgcattcatactccacaacaccaatacaatgaagcgaatagagcagaatgagggatcaatcattaactacaacacttactggacgagctatgaacccactctacagtccaccattactactcttgcgacatacgctgatctgctactcaaacgcgaccagagcctcacgattaccaacgaggacgaagtgatcatcc

SEQ ID NO: 43818 - DNA, 245 bp, Zea mays
  Clone ID: MRT4577_139968C.1
cccacgcgtccgcggtcgtagccgccgtgctcctcctctcctccccggtcgctgcgtcgggtttctgcgtgtagcgttcggaccagccgacagcgggtgctgcagagagcgatcgacttcgcgtgcagcccgcagcaggcgccgactgcacgcccatcctgcaggacggcgggtggtacaacccggacaccgccgccgcgcagtggtcctggtccggcaacacctagtaccagaacaacaaggcc

SEQ ID NO: 43819 - DNA, 137 bp, Zea mays
  Clone ID: MRT4577_139969C.1
caaaggggaaactcttgtgggaggagcagaggggctcacatctcccctctgattcccccatgcacattgccttatctctccccatctagccaggaatctattgtgtttttcttctgccaatttactatgattgtgta

SEQ ID NO: 43820 - DNA, 250 bp, Zea mays
  Clone ID: MRT4577_13996C.1
atggcacaaaggatttcgtcgaggagctttcacccaacgcaaggatcgggtacgccgtggacgacgtcgagggtgagggagacggcgaggaggaggacgacgacgaggaggacgaaggcgaggtcaaggacagaggcaacggagagaagcaaacactgaagccatggctggacccgcgtgagctcgccagggcgttggacggctgggactcgcgggaggtggccgagctagagggtgccgggctcgtctg

SEQ ID NO: 43821 - DNA, 1718 bp, Zea mays
  unsure (1)..(1718): unsure at all n locations
  Clone ID: MRT4577_139970C.1
cattgggtacctcgaggccggccggggttctattctttgtttggttggatagcccactcctccgatgctccaatcatcaacactctctacctgtgtccgtgtgctcttctcctctgcaccaccaaccaaccagtgctgccctccgccgatccactgacctaccgcgagcgccaatggcgaccgccgcggtcctggccgccacattagcgctgttcctccgcgccgccgccgcaacggccgcgacggctgcggcggaggcggaccggatcggcaggctgcctggccagccgccggtcaacttctccatgtactccggctacgtcaccgtggacgcggcggcggggcgggccctcttctactggttcatcgaggcggccggcgtgcccgcggagtccgcgccgctcgtgctgtggctcaacggcgggcccgggtgctcctccgtcggctacggcgcgtcagaggagctcggcgccttccggatcaacgccgacggcaggacgctctacttgaacccctacccctggaataaagtggcgaacatgctgttcttggactcgccggccggcgtcggctactcatactccaactccacctccgatctgtacactgctggtgacaacaagacagcccatgactcgtacaatttcttggtgaactgggctggagcggttcccacaatacaagcatcgcgatttctacatcacaggagagagctacgcaggccactacgntgcctcagttgtctcagctagtctaccggaacaaacaaggcatcgagaagccgatccctaacttcaaaggcttcatggttggaaatgcggttattgacgattaccacgacttcatcggcacattcgagtacttgtggacgcgcgggctgatctctgacgaaacctacgagaagctgcggcttgcctgccagttcgacgtatctgagcatgcgtcgaaggagtgcaacaaggtcttcgacatcgccgaggccgaggaaggcaatatcgatgcgtacagcatctacacgccgacttgcaagaagacttcactccacaagcgcaggctaatcagaggaagaacggtagtacacttgcttcgctaccaacacacgacatttctttgctctgaaactgtagcgcttactgtattgtccgcgcttctgaaagtatagtgcttgtgaagcataagagttcaagcacctcctcccgacaccacgcttggttcaaatgtagccctggttgcccagaggtacgatccctgcacggagaagtactccacgaagtactacaacttacctgaggtgcagagagctctgcatgccaatgtcaccggaataccgtatccctgggtaacctgcaggtgtttgttctgctggttttttgtttgtttgtttgtcttgctctcatcacaagtatgtattttcctttgatcgcctcttccttgttagttgcactaaacaaccactggttccttgcagtgacccagtgtatgatttttggaaagattcgccgaggtccatgcttcctatctaccgtgaactcatcgccgcgggcataaggatatgggttttcagtggcgacgctgattccgttgtcccgctcaccgcgacaaggtactccattgacgccctctttctaccgactatcacgaactggtatccttggtacgacgacgaagaggtcggtgggtggtgccaggtgtacgaggggctgacactggtgacggtc

SEQ ID NO: 43822 - DNA, 442 bp, Zea mays
  Clone ID: MRT4577_139971C.1
gtaatgggaatttttgttttttttttttttttatgaattttagaacaaaaaaggggaaaaaagaattaagcggaggggccctgggggtcacaggagcagagcgggagagagaaataaaactgggagcgagccatggtaaactaagaccaaaactaggaagaccaacattttaaataaaaccaaaggaaggggcgcagggggggtccacgaagacggaaggaaggggggcggccccacaagaaaaaaaaaaaaaagggaaagaagccccaacaagggaccttaaacaaaaaggagggggaggcggggggggggcccaccttggggaggggggggccacgggctccaaccgggaaaaccgggaagggacggggggggggtccagctttcactatagggaggggggaaaaagaggggggggcacatgggtaaaaggggggggggg

SEQ ID NO: 43823 - DNA, 2308 bp, Zea mays
  Clone ID: MRT4577_139972C.1
cattgggtacctcgaggccggccgggctagtcaccggccttgccgttgtgtccataggctgtcagtcacttccagtcctagcccactcctccgatgctccaatcatcaacactctctacctgtgtccgtgtgctcttctcctctgcaccaccaaccaaccagtgctgccctccgccgatccactgacctaccgcgagcgccaatggcgaccgccgcggtcctggccgccacattagcgctgttcctccgcgccgccgccgcaacagccgcgacggctgcggcggaggcggaccggatcggcaggctgccgggccagccgccggtcaacttctccatgtactccggctacgtcaccgtggacgcggcggcggggcgggccctcttctactggttcatcgaggcggccggcgtgcccgcggagtccgcgccgctcgtgctgtggctcaacggcgggcccgggtgctcctccgtcggctacggcgcgtcagaggagctcggcgccttccggatcaacgccgacggcaggacgctctacttgaacccctacccctggaataaagtggcgaacatgctgttcttggactcgccggccggcgtcggctactcatactccaactccacctccgatctgtacactgccggtgacaacaagacagcccatgactcgtacaatttcttggtgaactggctggagcggttcccacaatacaagcatcgcgatttctacatcacaggagagagctacgcaggccactacgtgcctcagttgtctcagctagtctaccggaacaacaaaggcatcgagaagccgatcctaaacttcaaaggcttcatggttggaaatgcggtaattgacgattaccacgacttcatcggcacattcgagtacttgtggacgcacgggctgatctctgacgaaacctacgagaagctgcggcttgcctgccagttcgacgtatctgagcatgcgtcgaaggagtgcaacaaggtcttcgacatcgccgaggccgaggaaggcaatatcgatgcgtacagcatctacacgccgacttgcaagaagacttcactccacaagcgcaggctaatcagaggaagaacgccctggttgcccagagggtacgatccctgcacggagaagtactccacgaagtactacaacttacctgaggtgcagagagctctacacgccaatgtcaccggaataccgtatccctgggtaacctgcagtgacccagtgtatgatttttggaaagattcaccgaggtccatgcttcctatctaccgtgaactcatcgccgcgggcataaggatatgggttttcagtggcgacgctgattccgttgtcccgctcaccgcgacaaggtactccattgacgccctctttctaccgactatcacgaactggtatccttggtacgacgacgaagaggtcggtgggtggtgccaggtgtacgaggggctgacactggtgacggtccgaggcgcagggcacgaggttcccctgcaccggccgcggcagggcctgaagctgttcgagcacttcctgcggggtgagcccatgcccaggcctgtagatagcgtccagtcgttttagaactggttgctgtctccccgcttggtgaaggaggagacctggctgcgctgcgcattcttgttgctgtaaactcatccgtcacactccgttgttaggatagatttgctgaaaatcagaacataatgttgctcgtttcagtgagcagattgggtatttagcaatgtctcgttttgacagtgaaaaaaaaaaaaaaaaaaaagcggccctctttttaccgactatcacgaactggtatccttggtacgacgacgaaaaggtcggtgggtggtgccaggtgaacgaggggctgacactggtgacggtccgaggcgcagggcacgaggttcccctgcaccggccgcggcagggcctgaagctgttcgagcacttcctgcggggtgagcccatgcccaggcctgtagatagcgtccagtcgttttagaactggttgctgtctccccgcttggtgaaggaggagacctggctgcgcattcttgttgctgtaaactcatccgtcacactccgttgttaggatagatttgctgaaaatcagaacataatgttgctcgtttcagtgagcagattgggtatttagcaatgtctcgttttgacagtgaaccatgcttcagttttttgggattttcccccggtagaaggacgtttttttttgtttgggagggagatgagattctgtaaaaaaaaaaaaaaaaaaaaaaaaaaaaaaaaaaactcgca

SEQ ID NO: 43824 - DNA, 156 bp, Zea mays
  Clone ID: MRT4577_139973C.1
aagtatgggcagcaaactgaagcaacaacaaactaaaactgaatacatccatccatcacaaaaagataaacaatataacataaaactgtaatacaagtctctttattatgaactttgagatttaactcttttttcacaagcttcatgtagactgtc

SEQ ID NO: 43825 - DNA, 2045 bp, Zea mays
  Clone ID: MRT4577_139974C.1
gcgagctttggcagctgctggaggtgaaggtaggggaagcgtgtcagcatgcgagtcctaccttccaatgggcaaactaacacggagggtactcagagccaatgggatggaaaataaggtcaaagtatttcacaagcgatcagatgagctcggagttggagtcgagcttgattctcgacctgatatattggtaagtgaaattcttgattctgagctgctgggtgagggtctcatacctactctacagcatgcgcatgacatgctattggtgaaaaatccaaagacagttccatatcgagctactacttatggagtgttggttgagagcacgtccttgtggaagatgcatgatctgcacagcaatgaagcaaatgctgaagatggtgtgaggcttattcccagtggaacacaaattgttctttctgtgaagtcacagcaacatgcgatgcaatgtgatgcgctggcagatgaaataagattgctgtcagaacccttcaaagtttttgaatttgacttttcggaacgtccagatagtcatcgtgaaacaaagattgagataaaagcaacagctgatgggcatgctcatgctattgtttcatggtgggtgcttcagttggattcttctggatcagtcttttactcaactgctcctagatgggtgagacaatccagtggtgtcgatttaccacaatatgccaatggcacgaaggattggtgtgatcattggaagcagtgtgtttggtttatacaagggacaggggctcctgcaaagaaagatcaaactctttctttgagcgctagccataatcaaactagcatctcatatcagttgaagggaaatgatgaaggaagtagaagccccaaaagtaatcatctaacactgttaccagaaagggtagcactttatggtgataaagtttggagatcagcgttgataagtgtaatcaggaattatacgagcgaaagatcctctccgacctgcattgtggctgatgacagcgtgttcctagctctcattgtttcttttctgttaccatcttcaaaagtcctcgctatgtttccatgtcttagagacattggcctcaactatcttcaagctgttgcagatgcaaataatttatccatggaccggattaaagtgattggtaaaaaggcatcgtcccttactacaaatgacttaaatcatgaaaaggttaatatgttagtgggggaacccttttatcatggaagtgaagggatgctgccatggcaaaatctgcgtttctggaatgaaaggactctgcttgatccgttgctctctgaggatgcattcatcatgccttgtaagggaatattaaggttctgtgccatgtcacttccggacttgtggagaagccgtcgtagccttaaagatgttgagggttttgaccactcagttgttaatgatactttaggggcctgtggtgacctgcctggagagcaacaaggcccttgcctaccttattatgtgtggcaatgcggttataccaagaaattaagtgaagtttactctctcatggatttgaacttttctgagcctatccactcttgttttggtgaaacaaaggttgagtttgcccacgatggaacatgccatgggttcgctgtttggatcgactgggtacttgacaaggaaaattccatagtgataagcaccgggccagagagcagatactggaagcaaggggtgcagctgcttagcacgcctgtacaagtgaacccagcgaattcggtgatgcacgtggaggcgaatttcgatgctgtcattggggagctcacgtttaaatccaccacgctctcatgatgccaactgtaatgtgtggacaaccaagcctcatgcgtgtgttgttcttaaaagttagcatttgtcgctgcgttttgttcgtcggagctcctgatgtgagtcaagcactcaagctcatgattacgtgtgtgttctgtcatgctagcacaagcaactgcctcctcggtggagctgttttttcatggtcttgtttgttagcccctcacgtcgtgaggaagatgct

SEQ ID NO: 43826 - DNA, 1013 bp, Zea mays
  Clone ID: MRT4577_139975C.1
gtcaactcgaagatcctctccaggtcatcgagtactgcaacaagcacgtccacgccgccgccaagcccgctgaaggcgcggacgccaacgcagccgccgcagccgggggcggcgaggacctcaagaactgggacgcggagttcgtcaaggtcgaccaggctacgctcttcgacctcattctggctgccaactatctgaacatcaagggattgctggacctgacctgccagacagttgctgacatgatcaagggcaaaactccggaggagatccgcaagacattcaacatcaagaacgacttcactcaagaggaggaggatgagatccgcagggagaaccagtgggcctttgagtgatggtcttccgtggtggtgttgcggtgctgcttaaaagaaagatggatgtctgcaccgtgctctacaatgctattagtgctagtctacttactaaatatatatggtcggtcgtaatggttgtatgccttttggaagcgggttatggtttggattggatggaggtcaaactgagtgctagtttgtttgtctggagttaatatattaattaagtactacatatctcagctgaaatagtagaataatggtcgtatggatgtatccttttttggcttggatgtatgtcaagctggtgggtgctagttcgtgtgggccgacttgtaactcggtgatatctcataatacatctaagtttcgtggtgtctactactatgtctactttatgttgtcctaatggttgtaagtattttgggagtcactttgcttgcgaatgtctcgcgtaagacttatgtggtcaatggtcggttattaacttattaccatgaaagcacttcgtctgctgccctaagaggtttagtcccatttgcattataaccaattcaatccttgtggatgatttgtgtgattccatcgtgaatctcatggtaaaatattttcattgttgccaaaaaaaaaaaaaaaaaaaaaaaaaaaaaagtactctgcgttgttaccactgct

SEQ ID NO: 43827 - DNA, 543 bp, Zea mays
  Clone ID: MRT4577_139976C.1
ctcagaaaaagccttcatctagactctagtagcaggtgtgcgccgcgaagaaggccagcctcgacgtcgtcgccggtgtagtagtccctgcgctgctgctgcgcgacgaccacgcccgcggcggcggccatcctcttccgaggagcggggcagtcccgccgcttatttcagctgaaacaagtaacagctagctccgggcattcaacggctacttcacagagaggcaacacgtggcggtcgggtgctgcatggacccaattcgctgccccctcgtctggaaggatccaatcaggaccccgaaggctgctccctgtacccagtccggtggtgcaccggaccggtccagtgctcccgggatcagtagattttcaacaacttttctatggaatgggaaataatatggggccttttggggctataaaaggaacccatgacacactcctgtacccaagcattccaagagaaacacatcactttgacattattccacaacaccttctagtgattctagtgagatccaagtgtcgtttctaagctgttcct

SEQ ID NO: 43828 - DNA, 2780 bp, Zea mays
  Clone ID: MRT4577_139977C.1
gggtaccctccgaggccggtgtccggcccatatgtcgtgtcactgaggccgccaggagaagaaggcagctgccgccgccgccgccgcgccgtccgccgatgccgagctgcctcctccctggcatcgcgccacgcccaccgccggccgctctccgcagcctcctcctccgccgcagcagaatggcctcctccggtacggcccgcgctttccagctccgcctcaacccactcaccggcgactccgagtggctcgtcgtcgacgaggcggaaacggaagcggaggcgcctgcgcctgcgccgacccaacataagcagctccttgccgccacctcctacctcgacatgctcaacgacgcctcccgcaaccgcgcgtaccgcctcgccatcgacgccacggtaacggaccccacctctcgcgtcctcgacatcggagctgggaccgggttgctgtccatgatggcggcgcgagctttggcagctgctggaggtgaaggtaggggaagcgtgtcagcatgcgagtcctaccttccaatgggcaaactaacacggagggtactcagagccaatgggatggaaaataaggtcaaagtatttcacaagcgatcagatgagctcggagttggagtcgagcttgattctcgacctgatatattggtaagtgaaattcttgattctgagctgctgggtgagggtctcatacctactctacagcatgcgcatgacatgctattggtgaaaaatccaaagacagttccatatcgagctactacttatggagtgttggttgagagcacgtccttgtggaagatgcatgatctgcacagcaatgaagcaaatgctgaagatggtgtgaggcttattcccagtggaacacaaattgttctttctgtgaagtcacagcaacatgcgatgcaatgtgatgcgctggcagatgaaataagattgctgtcagaacccttcaaagtttttgaatttgacttttcggaacgtccagatagtcatcgtgaaacaaagattgagataaaagcaacagctgatgggcatgctcatgctattgtttcatggtgggtgcttcagttggattcttctggatcagtcttttactcaactgctcctagatgggtgagacaatccagtggtgtcgatttaccacaatatgccaatggcacgaaggattggtgtgatcattggaagcagtgtgtttggtttatacaagggacaggggctcctgcaaagaaagatcaaactctttctttgagcgctagccataaccaaactagcatctcatatcagttgaatataaatgatgaaggaagtagaagccccaaaagtaatcatctaacactgttaccagaaagggtagcactttatggtgataaagtttggagatcagcgttgataagtgtaatcaggaattatgtaagtaatccctctatgtacttggtatagtatgttcttatccaactagtattccatattatgattgctcaccgcttctgaagattataataataataaataattaaacatcccaatattcaaaattataagcatgataattaaacatgcatcattttttagtacttacgagcgaaagatcctctctgatctgcattgtggctgatgacagcgtgttcctagctctcattgtttcttttctgttaccatcttcaaaagtcctcgctatgtttccatgtcttagagacagtggcctcaactatcttcaagctgttgcagatgcaaataatttatccatggaccggattaaagtgattggtaaaaaggcatcgtcccttactacaaatgacttaaatcatgaaaaggttaatatgttagtgggggaacccttttatcatggaagtgaagggatgctgccatggcaaaatctgcgtttctggaatgaaaggactctgcttgatccgttgctctctgaggatgcattcatcatgccttgtaagggaatattaaggttctgtgccatgtcacttccggacttgtggagaagccgtcgtagccttaaagatgttgagggttttgaccactcagttgttaatgatactttaggggcctgtggtgacctgcctggagagcaacaaggcccttgcctaccttattatgtgtggcaatgcggttataccaagaaattaagtgaagtttactctctcatggatttgaacttttctgagcctatccactcttgttttggtgaaacaaaggttgagtttgcccacgatggaacatgccatgggttcgctgtttggatcgactgggtacttgacaaggaaaattccatagtgataagcaccgggccagagagcagatactggaagcaaggggtgcagctgcttagcacgcctgtacaagtgaacccagcgaattcggtgatgcacgtggaggcgaatttcgatgctgacattggggagctcacgtttaaatccaccacgctctcatgatgccaactgtaatgtgtggacaaccaagcctcatgcgtgtgttgttcttaaaagttagcatttgtcgctgcgttttgttcgtcggagctcctgatgtgagtcaagcactcaagctcatgattacgtgtgtgttctgtcatgctagcacaagcaactgcctcctcggtggagctgttttttcatggtcttgtttgttagcccctcacgtcgtgaggaagacgccctagcctcatgcgtgtgttgttcttaaaagttagcatttgtcgctgcgttttgttcgtcggagctcctgatgccaaaaaaaaaaaaaaaaaaggcccctagggcc

SEQ ID NO: 43829 - DNA, 319 bp, Zea mays
  Clone ID: MRT4577_139978C.1
ccgggaactacatcccacgattctataactatacaatatctaaccaaacatcaatatgacttcccaaggccaaggcaacaaggacatggtcgacaagggcctcgaaggcgccgagaagaagttcggtggctcaatgggccagaacacggagaagaacagtggtgtgaacgaaaagattaccgacggtgcgcgcggtgcttttgagaaagctaccgggaagaatgtacccgacaaggtttcgaactagattctgacattctaggatatctctgggacgtcgaacggccataaaccatagcctacaacgaactctattatc

SEQ ID NO: 43830 - DNA, 706 bp, Zea mays
  unsure (1)..(706): unsure at all n locations
  Clone ID: MRT4577_139979C.1
aattcggcacgagggatggctaaggaccggccacattcaaagccctagcgagatccaaggcggcaaggccctgaatccttctcagcgaaggggaatccccatcgaagaccaccttattagttattacgatgaagccaaatacacccaccctaagatgatgacactgttaaacccctttcttgtgcttttgggcacatgacactccacccgtttccaccactctgtgaaggaaggagcatcaacaactggcgtgagatgacccaaaccaaaaggggataacaagatgtgccagaactgacgagcgaagatgcaggagattaggaggtgttggattgtttcttgctcttggtcgcataaggggtacaccaccgggtgaggaagatctctcttttctaatctgtgagcagtccaacatctattcttcatagccaaccaaagaaagaatttgcattttggtggagcgcaggttttccaaagtcttttccacggttgaaaaggagttgaaccagcaaacaagctttgataacatgatttagaagagaaaactcctganataacgtctccattctatgttgatctggggtccctgtgataaatgaacctccctcaaggaatcccaaagcagcanatattgggtgaaggcccaacagagaaagaggagctctaatatcactgacccagcggaaattatcaagggcctgagcta

SEQ ID NO: 43831 - DNA, 373 bp, Zea mays
  Clone ID: MRT4577_13997C.1
gaacatcgtcatatctgagtctcacccatttctcttcaaagggttccactagctcactcgggcttgaggtccttagctctacacttactgtactctagaacagccgataataccttgactgctaagatccatcgcttctgctctcctctactatgagacactctcttgaacatcacgtcttaatcctagatgacccgtaagaccagtgcacatctccaccatggttctccactctttatatctgctactagtaccgcatatcatctcggctcatgcattagagatcatgctacttgcaaccttctgttgcaagctgataaggtgctcacgtcgaatctcaacttatccactgtttttaaaattattctagcta

SEQ ID NO: 43832 - DNA, 283 bp, Zea mays
  Clone ID: MRT4577_139980C.1
ccggtctggaattaaaccccgggttctgtgagctcacttgatggaggccgccctttttttttttttttttgggagacttttattcttgattgcgcaagcttattcttcactacaacttagaattggcaagctcaagtctacaggaaaccatgacctccatactgaggccaattgtcaatgcaaattctaatgggatttcagaatacagggtggtctataaaaaggaagctggtgcattagaaacaaatatccaatcgacgcacatcgagcgcttcgtcacttc

SEQ ID NO: 43833 - DNA, 595 bp, Zea mays
  Clone ID: MRT4577_139981C.1
aaagaacaataaagattttattacaaaaaagttctgtataaatgcaataataaaaagactgaaaaaataaatatgcaaatgagtttttttttttctctaatcgctttctgtatcgggttcttttacacctccttcaatgatccatttaagatgacgagcacgacgacgctcttcttgtgcttttaattcattacgtgtcttcttctttttctttgagagtttggccttcactttagcttcatcaatcttgctttcatcatcaacagctgactggccttctttgtaaagtttaccgccaattaacttccagctttcaggacataaggcacttacaaactcattagagtgagaaatcatgactacagcaccttcccacttcttgatagctgttgccaaaccaccaagagcttcacgatccaaaaagttagtaggttcatccaaaaccaacatatgacagttattccacatagcagcagcaatgacgaccttgaccttttgaccaccagaaagggcactcatcttggtatattgagcaatatcaggatcaagtccaatatcagcaaagtgttgacgaatggtaggcatactcaactca

SEQ ID NO: 43834 - DNA, 389 bp, Zea mays
  Clone ID: MRT4577_139982C.1
cggggccgaccaacccgtcgggttagatgccgcagcccgtcggcggcagctgccactcctgacatgtttgacgctctcgagagcggcccaggacctcctctagaagtgcctccctcgccatcgtcagccaagaagcgtttgtcccaggcgttcgaggtcaacccgagtgcctcagcgccgatcaaggtggcgttggagagggtaaagcggcactcgcagctaatttccagtcacaggatgtcgctgtcctgagtcaaagcaggagatgggacgcaaagtgttgtgattatacgatacgtcgggtgacacttgtgttttccttttgcgtgtgtacgtattacttgttacgtgtgacatggtgggattttttgtgcctacatatggtgggg

SEQ ID NO: 43835 - DNA, 387 bp, Zea mays
  Clone ID: MRT4577_139983C.1
agcagccaaagcagggccggcccgacgggagcctgcaagggctacatcttcgccatgggggtcacggaggagctggacacgtggccggagcaggacacgcacgaccggcggtgggtcgctcccgccgaagcctaccagctctgccggtacgactggatgcgggaggcgctcaccgcgctgctggagaggctgccggtgctcgaaccggtggtggctgccgcggcggctgcagccacggcggaactgacgaccgaccaagctggcatgtacatgatgctgcaggcgacctcggacggcgctgtggcgctgtgctagctgattgatggacgacattggtgttcgattctcagctagtcacgaggtcttagtatgccctgcaagtgtcgt

SEQ ID NO: 43836 - DNA, 406 bp, Zea mays
  Clone ID: MRT4577_139984C.1
gtcgttcggagttgctagctggtaggtttggcagattctggcattttcaggctaacatcattaaattcataaagctagagttactagaagagctgtatgcaaatccctggtgagtaccaatgcattagagctcatgaaggttctttttactcagcttatcatctttttcagaagcgcaagctgcattaatagccacctttcagatttattcacggagtgaaattcttattgtcctttcctttgagagagaagaattttcatggttagaatgtgtaacttatctatcaattgtcatatctctcttttatttttttaactacgatgtacccaactttgatctgtagtagctcctctgttgggacatagataaaaatcaaattgagaaaaaaaaaaataaattaaaagt

SEQ ID NO: 43837 - DNA, 204 bp, Zea mays
  Clone ID: MRT4577_139985C.1
tcgggagaaccgagagcagagagacatggctccctaccaccagcagcgggcgctgctcctggtccactcgtcttcctcctcctgcttcttgccccgtcccttgccggctcgtggggaaaggagggccacatcatggtctgcaagatcgcctagatagtcctgtcggataaggcagttgctgctgtgaaggcgtttctgccggag

SEQ ID NO: 43838 - DNA, 186 bp, Zea mays
  Clone ID: MRT4577_139986C.1
cccacgcgtccgttctagatcgggagcgccgcccttttttcgttctggtggtttggtgttacctaaactttagtggtaagaaattggctcccttatctgtgggatgccagaaaaatcatcatgaaaatatattttttgtgcctgttactcataagaaatctagggcggggcccctccaatattcgg

SEQ ID NO: 43839 - DNA, 205 bp, Zea mays
  unsure (1)..(205): unsure at all n locations
  Clone ID: MRT4577_139987C.1
gtacaaaaatccattctttgttggataatattttttaatggcaacatttttaagtagcacgtaatgatgttaacaaggaagttttttgtttatcaaatgaacaaaaaaacccaaggggnggaaaaaaaactcattttaggaacactggggagaggggaaatacaggtgggtaaagcaagcccccagggtttttaaaaaccttagg

SEQ ID NO: 43840 - DNA, 205 bp, Zea mays
  Clone ID: MRT4577_139988C.1
atgcggggggcgcgatctatctgatatcggggcacctacaaggagcgaacaagacgttgttagacatcttggtgactgtgctaaccctgtcgttaccacacttactaatccggtagcaaaataagcttcgcccagctggcgtagtcacaaacaggatgggacctatcgtcctatacagcacaaacgcacactcgatggacaatgg

SEQ ID NO: 43841 - DNA, 107 bp, Zea mays
  Clone ID: MRT4577_139989C.1
gcttcagattaggaagttaaggatacattcacgaggtagagatgattaattagggtgaatggtttgcctgtgaaacccgtgatacgtcccatttgagaattggtcca

SEQ ID NO: 43842 - DNA, 811 bp, Zea mays
  Clone ID: MRT4577_13998C.1
gccggccgtggctcgttaccgtgagaacacgcagctccgtagctcagttacacacgacacccgctcgtcttcgtcagttcgtctcctccacctctgtatccctctcactccaccggccgccggccctcgcatcggcgcgttcccaatgatcacatttgcggacctgacggagccggccgcggccggcgccgagcggtgcgtggaccggcaactgtggctggcgtgcgcgggcagcatgtgcaccgtgccgcttgttggcgccagcgtctgctacttcccgcaggggcacgcggagcacgcgctcggtctcgacggtgcggccgacctctccgcggcgcgcgtaccggcgctggtcccctgccgcgtcacggcagtgcgctacatggctgatccagacaccgacgaggtcttcgccaggatccgcctcgtcccgctacgcggcggggaggcgcacgcgggtggcctcgatgacgatgtggccgcggcggacgagcaggagaagccggcgtcgttcgccaagacgctgacacagtccgacgccaacaacggcggcgggttctccgtgccgaggtactgcgcggagaccatcttcccgcggcttgactacgccgccgacccgcccgtgcagaacgtcgtcgccaaggatgtgcacggaccccgcctggaagttccgccacatctaccggggcacgccgcgccggcacctgctcaccactgggtgggagcacgtttgtcaaccagaagaagctcatcgccggggactccatcgggttcctccgcggtgacagcggggaactgcacgtcggcatcg

SEQ ID NO: 43843 - DNA, 111 bp, Zea mays
  Clone ID: MRT4577_139990C.1
ttatttttaaatgcagctgttggtattcgtgtgttggtagtaacacagaggtccgtccaaccaaaattatcaggcacacacttatttcgatttcctgctcaacttataaac

SEQ ID NO: 43844 - DNA, 157 bp, Zea mays
  Clone ID: MRT4577_139991C.1
gaacacagtgtttcgtcaatgttttctgaacaacttatgttatgtgcctgatttttaaaggagtcacttgacaaccagtgttcaaatcttttcagctttaatagtaactaactgatcattaagtgcaattttctatgcaagcaaccatgttacatga

SEQ ID NO: 43845 - DNA, 1003 bp, Zea mays
  Clone ID: MRT4577_139992C.1
cttccccgctcaagttcatcagcgagctggacccgggggcgacggctctcctggaagcggcactgatggacgccaatagggagagggaggagaagatcctcaagggcatcaccaagtattcgcagccatcgcctacttcgccttgcgagcacgatgccattgacgaagcgtccttggaggccagcgacggggagctgtgctgcatctgcttcgagcaggcgtgcagcatcgaggtgcaggactgcgggcaccagatgtgcgcggcgtgcacactggcgctgtgctgccacagcaagccgaacccggcgacgctgacgccgccgtcgccggcctgcccgttctgccgcggcagcatctcgaggctgctggtggcccgggcgagccccgacgccgatgacggcgacggcgtggacaagcccgagcacgacctgtgatcggcatttgatgctgtgcgtggctgagcagacagccgagcgcgaccattttctgaagcaggcattgccactggctttccaagccaagcgtgactgcttgctgctaaaataaccgcatcctcttcttctccccatatgtccctgtctgtcaatcctattcttgggcgtgccaggatttgttcacctggccattgccgtattccattgtcaccgaccggctatagtatatagtactagattccatttccattccttcgtgcccacgcagctgtggtatggttccaatggttgagccgagtttgagtcacagacagacatgtaaaacaccatcggtggtgtgtgtaaaagctgtcggcctggagagagctgtggtgaactgtggctccgttcatggcatcgcagtatcgcacagtcgtgaactgtggctgcccgtgacggcgacggagctggattgctgtaacgatggcctgccacggccacgggatgtgacctcttgccacggcatgtgatgtttgttgcaacgatgcactgcactgggactgcagggcaatggatgatagattcaagtc

SEQ ID NO: 43846 - DNA, 177 bp, Zea mays
  Clone ID: MRT4577_139993C.1
gtattaactggctagaggacgcctccgggggcgccaccgctgctgagtactcttaagaccgatccgacccaaagccaaacccgattgccctcgtagtcgtttgtcatcgcgcgaccgattaccccgccgccgccgcgtctgcagcggcgatggcgtcgtcgttgtcgcgggcgctgt

SEQ ID NO: 43847 - DNA, 967 bp, Zea mays
  Clone ID: MRT4577_139994C.1
cgtgcccgatggaggtgcaggactgcgggcaccagatgtgcgcgccgtccacgcttgcgctgtgctgccacagcaagcccgacccggtgacgctagcgctgccgtcgccagcctgcccgttctgccgcggcagcatctcgcggctgctcctggtggcccgggcaagcagcgacgacgcggacaccgagaagtcggcggcggcggcagcggctgcctcctccccgcagctcgtccggcggcggtcccggcggtcgcacaacctcagcgacggcggcagcagcagcttcaaggggctgtcgtccgccgtggccggttccttctccaagatcgggcgcgggtcgagccggacgatggccgacagcgacggctgcggcgtggacaagcccgagcacgacccgtgatcggcattggatcctgcgcatgtggagccgagcgcggggccatttgcggacatccaatcgaatccaagccaagcgtgactgcttgctgcgaaaataaccgcatcctcttctcatcatcttcttcttctccccatgtccctgtctgtcaatcctattcttgggcgtgccaggatttgttcacctggccattgccgtattccattgtcaccgaccggctatagtatatagtactagattccatttccattccttcgtgcccacgcagctgtggtatggttccaatggttgagccgagtttgagtcacagacagacatgtaaaacaccatcggtggtgtgtgtaaaagctgtcggcctggagagagctgtggtgaactgtggctccgttcatggcatcgcagtatcgcacagtcgtgaactgtggctgcccgtgacggcgacggagctggattgctgtaacgatggcctgccacggccacgggatgtgacctcttgccacggcatgtgatgtttgttgcaacgatgcactgcactgggactgcagggcaatggatgatagattcaagtc

SEQ ID NO: 43848 - DNA, 379 bp, Zea mays
  Clone ID: MRT4577_139995C.1
gtacaagcttttttttttttttttttttttttttttttttcttttttttttttttttttttaaaagtgtccacttcagtttaataaaaacgaggcctgattttctaatgagacattatgggatcagcccaaacgagcaaagggcaacaacccaggtaataatcttaagggaaacagccagtggcaaacccaaaactgactccaaccgggtacaaatgaatcacggccaggctgcccgcgtgactgcttccaactccccttcctatccctcaaaactgtcgcccgactggattcccaaatgcatcccgggcattgaggccagccagccaaaacagaccttggggcaatggacccaaaagccggtctgccctccatgtaaa

SEQ ID NO: 43849 - DNA, 460 bp, Zea mays
  Clone ID: MRT4577_139996C.1
ctcctcccccctctgctcctttccccgccgccgccgccgccgccgccgccccctaggatttgcgcagccgacctccgccgtccaccatgccgaagcagatccacgagatcaaggacttcctgctgacggcgcggcggaaggacgcgcggtcggtgcggatcaagaggaccaaggacgccgtcaagttcaaggtgcgctgctccaggtacctctacaccctctgcgtccacgacaccgacaaggccaacaagctcaagcagtccctccccccaggtttgaatgtccaggaggtttaagaagcatcaagccagatcatgcctttaccagtagcgggaatgttggatttagcaacgtctgtgttcagtaaacgagtccgccatgagtatgttctagactgaaatgtaatgtttgggacctgtgaggattctatgttatttcacttgctgaaaaaaaacaaaaa

SEQ ID NO: 43850 - DNA, 277 bp, Zea mays
  unsure (1)..(277): unsure at all n locations
  Clone ID: MRT4577_139997C.1
attgaataaaaagatatttatttttttttttttttttttgtttttttttttttttttttttttttatanntttccaaccccacccagggatcccacttgccaaattgcttccgttatgtccaaacggattacagtaaactgcaaaccttaattnaatttttccaaaggcatttggtgaaaaaaaaaaactaggtccccccaaggttattctttatgaaaaacacccccccttaaacggttataaattaataaacacaacaccagtcccaggaatttt

SEQ ID NO: 43851 - DNA, 227 bp, Zea mays
  unsure (1)..(227): unsure at all n locations
  Clone ID: MRT4577_139998C.1
gtgcaatcccttgattcaactcctgatnntccggncgctataataaattgtgttgagctcaccnaccccaaaaatatttgatctattaaaataagaattgataaaaaaaaggccccccaaacaaaagtttcaaagggtatatcttcttataaggaaagtgattgaagaccacacaagggcccccctaaccaatattttaaaaagagaaggaaaaaaacatattttta

SEQ ID NO: 43852 - DNA, 302 bp, Zea mays
  Clone ID: MRT4577_139999C.1
tcgggttccaccttctcgtccactacgtgttgaaaccctatcgacccaccatggcttgggtcccagtcaccgctcggttgtccttcttttagacccagctggcgtactccgctgccgttgcttgacagtcgccttcctgatgttcccagcgccatacggggacgcctccgcaccggcgatgctgaatacagtcgacttcgtggtctctaacgtggacgacctcatgaactggccgcgtaaggtctcgatctggcccatgacctatcggctcgcctgcttcacgatgcagatgatgcacgccg

SEQ ID NO: 43853 - DNA, 597 bp, Zea mays
  Clone ID: MRT4577_13999C.1
ggggtgcggggggggttttttttttttaaaaaaaaaggggcctttttggttggccccaaaagggccaaaaggacccacggggaaaaaaaaaaagaccaaacgaaaccttttatttaaaatattttaattcccaaacaattagctaggggccccccgggggggggaacccccttggggtggggaggacggccgggcaaaaaggaaatccggggggggagcccccccccgggaccccccgggtgggaaaagggcttgaacaatttaaacggaaaaacccctgctcccaaccggttcctgagccccggggggggggggcccccggaaaaaaaaccctgaatctccttaatccggcccccaaatttttaaaacccccccttaaccaggggctcccccaaccaaaaggggtccccaaactttcccatggacccctgggggggggagggcaaaaaggggatgcccagggtctaaaacacccggagggcctgaatttgggggggaaaaatgtccaaaaggggcccccccgggtgtttaaaaaactttttaattttttgggcccggcccccctcctcctccaggggaatgtttttccggaggggg

SEQ ID NO: 43854 - DNA, 609 bp, Zea mays
  Clone ID: MRT4577_1399C.1
cctcgagggccggccgggccacgcaactagtcctctacttgctaggaggtggttacacacccgaaaacctgcccccgccgccttggcctcacgtcacgatgtcttgcacggtgaccatcccgaactcgccagtcttctcgccttcacgccgcccgctgtcctgcaaggccgctcccgcgtcgccggagcccgccgtcgccgtctccgcctcttccgcggcgcccgcgcccgccgccgccggttcgccgctccgccccttcgcgctccgcgcgctgctccgggaggaggtatttccgtctccatcgccccagctggcctctgccgcagcggtggcctcggtaccaagcggggccgtgctgaagcggcggcgacctgcgccgctccttgtgccggcgtccggcgcggctgctgctgctgcggtggctgccgtggaggcagatccgacgaacgaggtggaggaggagggggaggagttcgcagcgtattgccggagggggaaggggagaagggtggaaatggaggaccgacatgtggccaaggtcgctctcggcggagatccccaatggcgctctttgggagattcgaaggcaccaggggcaaaaatgcggc

SEQ ID NO: 43855 - DNA, 784 bp, Zea mays
  Clone ID: MRT4577_139C.1
tcggccgggaatccatcgcagagcgccgccggcgggtagcgctactgctagaggagaggaagcggaaagggcggcggcggcgctcgtggtcagtcaaagatccaacctccggactcgcgatggggcggcggatcctcaacgatgctctgcgcacgatggtcaacgcagaccggcgggggaacgcgtcggcgcttctccgacccatctccggcgtcatggtctccttcctcaacatcatgaagtaccgaggtagtattccgcctcttactaggtatctgccacaacctccttcatgaccagctagcataccgccgcctctcccttcaccaatcttatctcgtcgtcggatgttcccaagaagcacaccaagctttgatgccgcttctaagtcgttaacagagtaatcaacccatttctaggagaatcacatctaatagtgacttgcgagtggcgtgctggtttaaggagaaaagggtactgatcccctcatgttgacatcgaagtttgctatgctccttatacgttgatagcagcttatcacaccgtaccacctcagcttcaaattaactagtaaattggtcgtgccttgcgcgactcgatcaccaatatgttttacattttaaaagtgttgctttagacatatacattttaaaaatgttgctttagacatatatgtgcagcataagactgactgtctgcactcgcgtactcgaaaagttatcgttaaggtcttgaggatacaataggatatagagtttgggatcaggctgcagcggttcactcg

SEQ ID NO: 43856 - DNA, 273 bp, Zea mays
  Clone ID: MRT4577_13C.1
ctgcaaaacagagcgaccagagcttccttgtttccgacaaagtagtcgagggctttgagctcacctgaatcgactaccccagctcggatctcgtcatccatacgcacaacgaggatgcactcggcgaggcctactagtatagtcagcaattaatgcaccacgtacccacgttctccttgcattgcatgcatgtaataataataataacgacgccgccatgtagtaataactaactatacatgcccaatcatgcatatgcaaaataaacaaaac

SEQ ID NO: 43857 - DNA, 265 bp, Zea mays
  Clone ID: MRT4577_140000C.1
cctcgaagccggccgggtttacccttcacaagcccactatattataaacattgtgcgagtctgtcatagactaggatccgaatctaggtatcaactgaaattgttagctcaaatgtgtctatattcttgcaatcttgttataggtgaagatgcacttgaatgtttacaaatctgctactctattcaatactcatcatctgtttcataacaaaaaaaaaaaaaaaaaaaaaaaaaaaaaaaaaaaaaaaaaaaaaaaaaagcggcc

SEQ ID NO: 43858 - DNA, 451 bp, Zea mays
  unsure (1)..(451): unsure at all n locations
  Clone ID: MRT4577_140001C.1
agcaaggaaaacggcacgagcgcatccagcgaaaacagttgcacttccagaccgccaccaaccaggcacccgagcagccaacaaggagacaccggccagcaccaccggaggagacccagcagcgcagagaccggacggaccagcaggagacagggagacaaggcaaacgaccagacgacgagaggacgaagcnacacccaccaagcccgcagcgccccgccccccaagcgacggcccgcgacacaagagcggcgaccgacagcgacaccgcccaccccaagccaggacccggccccaccccggaccccggaaaacaccacccggcgccgccacacccgaaaggagaaggacccgccggcaacaccaagccccccaccgagaaaagccacccccagcagaggacagcggcaccccagaccggacgaccaccactgccccgcccccccgggca

SEQ ID NO: 43859 - DNA, 530 bp, Zea mays
  Clone ID: MRT4577_140002C.1
gttgttgctctggtagcttcaccatgtgccctggacagactttgcccacctgaatcacaagacacccgtggtgccccaacactggctggcaagaaacagtatcacacgggccctgagactaaaaaccacatggtgatgattgtcgcagtgaatcaagcagaccccttaagcatgactgagaatgctgtcggaggcacaacaggcgagactgcagtgctccccctatccatcctgctcaatatactggagctgaactggaactaatgatggaatgacaaatgactatgggaatatcgattgactcagcaccaaattgtggctggaagggaagaccaactacctaacactgtgagaattgaatttgtatagacaaactgagcctgcacgatcgctctgccccctttattgattgggccaatgaatataagtgttctggaggccatctactaagtcatccactacctatatgcacgccatactggacactggtggcagcctgatacttctgcatgtaacagctactcgcatat

SEQ ID NO: 43860 - DNA, 3976 bp, Zea mays
  Clone ID: MRT4577_140003C.1
tcctcgcgtgcgcggacgcgtgggctgggttatagccatgctcatgaaactgcaattgaggaaaaccttcctgaggagggaaccatgactcctgcaaataaacaagaaaacttcttgttcactctgcgcaaatgaaacagtgcatatctacttagcattgttggtggcattttaagaggaatgcttgacaaggactggacctggtctgcgggtcgtaacccctcagctgcgacttctgaaggttcacaacttttatagttccagcaagatgtgattgctcgacactatattattacttcagtggaggaatgcattcacgtcgtcaattgagcaattcaacaattggtgatagagcggacaattcggcacgagggaggacttgagttaaattgggactcgggacttcgtgagtcggggactcggtaccttgcgagggccggagaccggagcacacaccaaaacccccagtgccgccggcggacgccctccagtttccggtctgactaactccccgttttccgtactgctgcggcgcctcggcagtcggcaccacagccggcaagatgccccccttccgaatgccttcccacttcctcgcgcttccgctcctactcttgctgctcctccaggcgccgtccccggaggcggccgagtctacgccggggacccggacgcgcaagatcggcagctcgggggcgtcctcggtgttctcgctctttaacctcaaggacaagagcaagttctggactgagtcgatcatccgtaaagagttcgatgacttggaaggttctgcgtcgcgggactctagcaaaaacggcctgctcaacttcacaagagctggtaatattgcaaactatttgagcctggcagaggttgattccatatatcttccgatccctgtgaacttcatctttattggatttgatggaaatggacggcatgagtttaagttggggcctgaagaactggagcgctggtttacaaaaatagatcacatatttgagcacacaagaatccctccagttggtgaagttcttaccccgttctataagactactgttaagaaacttcagcattatgatcttcctttagtcagccatgtgaaccacaatttctctgtgcatgccatacacatgggagaagatgtcttatctgtttttgagcatgctataaaagttctatcctgtaaagatgatctcgtggattccagagaaaatgaagagatttttttgcaagtggatagtgctcaaatggaacatatattttcaactcttgttgatcaccttcagatacaagaggcttacaatatctttgttctgaaccccaagcctattggcaagaggattaattatggttatcggaaaggcttctctgagtctgagatcaatttgctcagggagaacaagaccctgcaagctcggatactccagtctaaaagtgacaacaaactcttccttgatatcgagaagggagtcaatagaaggccgttatatgaaagtcatcctctatcatcattttcatggacccgaactgacagtatggatatgggggattggtcaaagaaatgcaaggaagcattaagcaagtttgagctgctgaaggaagggaagagtaaagaggacattgtttatgaaaaggctgttcagatattacacggtacaaaggatgaggtgcatgacattgttcaaagtgctcttaagtccagtgatttgaagggtctccatgcccaatgtcttacagatatatggataggcagagagaggtttgcttttgttgatctgagtgcagggccatttgcctgggggccttctgttggtggtgatggtgtccgtacagaacttagtctgccaaatgttgcaaagactgtcggggctgttgcagaagttacagaagaagaagctgaagaaaaattgcaagacacaataagggagaggttttcgtcctttggtgaggattaccatgctgttgatattctattagcagagattgatgtgtatgaactttttgctttcaagcattgtgtgggaagaaggatacagcttgccctttttaaagaacttgatgagaggatgcatgacctgaaaaaggaactggagggttacaatactggagattttgatgaaactaacaagaagaaagctcttgatgcactgaagagaatggaaagctggaacttattcagagatacttcagtggaacatcatagttacacagtggctcatgattcatttcttgcacaacttggatctatgttatggggctctatgaggcatgtaattgctccttctgcctctcatagagtgtaccattactatgagaagttatcgtttcagttgtattttgtgacacgagagaaagtcaggagtataaagcagttacctgttaatgtaaaatccatcagggagagcctgaattctgtgctattacatcatcaaaactccatgtttagccaaaacatgctgtcattgtcagaggatccatcattgatgatggcattttcaatggcacgtcgtgcagctgcggtgccgcttctattagtcaatggcacctataagtcaactgttagcacataccttgattctgctattctccaacatcagctacagaagctaaatgagcacaattcactgaaaggaaggcattcaaatcacaggtcaacattagaggtcccaatattctggttcatacataatgaacccatattattggacaaacattatcaagccaaggctctctcaaatatggtcgtagtacttcagtcagatgatgattcctgggaaagccatttgcagtgcaatggaagacccatcttatgggatttgaggaaaccggttaaagctgctattgctgcaactgctgagtatgtatctggtctacttcctccacatctggtttatagccatgctcatgaaactgcaattgaggactggacctggtctgtgggttgtaatccctcagctgtgacttctgaaggttcacaactttcagagttccagcaagatgtgattgctcgtaactatattattacttcagtggaggaatccattcaagtaatcaattcagcaattcagcaattggtaatagagcggactactgaaaaaggcttcaaaattttcaaggctcacgaaagtaagatggttgagaagtacaatgccgttgttagcttgtggagaagagtatcggctatgtccaagggattgcgatatggtgatgcagtaaaacttatgtcaatgcttgaggatgcttcaaatgggttttctagtgctgtgaactccaccatttcaagtctgcaccctgtccaatgcacccgcgaaaggaagctcgacgtgcagctagacttgacaacacttcctgcttttctagctgtatttttgttgctttggtttcttctacgtccaaggagaccgaagcctaagatcaactgaacaccgagccaatgagcagcataggccatagactttttgtgaatacgcgcatggattacagatggcgctggagcatggctcgggaattccaaggtccaaaacaccgggtggcagggaacaaggtttcagaagattacaatcctgacacttccccaagttgtagcagagttggaatgtcatgaaaactttaattcatccagtcctgtcccggggaacaaggtttagccaattctgccccgttccgggtaactgagattaatttgtccatgctgtaatgtttagccagtcctgccccgttccggggaactgagagattgtctttatcgcaacattaacggctagcggttagtatcatcttccagtcacctggaatgttactagtacaatccagttgtctgtttcctgccgcttacatgtaaaagtccatattcaagttttacagaaagaaacatgttctgtcatttattacaaaataaagccaaataaaatgttatgggttgtcgcggccagctgaaaaagtgaaaacctgcttttgactatgatcatgaaga

SEQ ID NO: 43861 - DNA, 366 bp, Zea mays
  Clone ID: MRT4577_140004C.1
gaccattagctttatatacttcagagcgcataccaaccggagaaacaccatccgggagtgggttgatggccgcgctctcctggctgtcgctggcagcgcgagcttcacccatacaaacaggtggtggaggtggcacaccaacgccgaaggtttatataacgtagccagtgtatgtgtcatctttggtataaatggcacctgcagtgcatttatcaccggcaattcatctgtcgacgacggtacacctgccatcgtctgtcacatgtgacttcgaggttcatgcagagatcgcagtatgctcactacgccactcaacctggtcggcgtcacactcatgcaaacctacaccgatgcccttgacaacag

SEQ ID NO: 43862 - DNA, 1068 bp, Zea mays
  Clone ID: MRT4577_140005C.1
gtaatagttactgtactatgcctcgtctaattcttaagtacattatgaagatttaaacttttatgaagtagtacacaaaatatattatgtgtacattacgaacggataaaaaagtatagagatatcacaaaaacaaactgtgcatgtaccacgtacgtgcgcgtcaaccgtcaacactgcttctgcgtgggccgtgtccattcagctgccccagcaggggtggccgctggcagtggcagcagcgtccttccccagctcgcgtcgcgccagcatctcggcgagcgcgcgggagtgcggccactcgggatttccgcgcgccgcggcctccctgaacatggcctcggcgcgcgcgagcgagtcgtccaccgtgtcctccaccgtccgcccctgcgcgtccgcgtaccggtccgcggcgctgccgtcggtggcgcgcgtgatgggcttcctcgtgtccgcgaactccacctccgccagcggcgacggcttgtgcgtccggtagtactccctgtcctcctccctcaccttgcgcgccgcggactcgggcccgccgggcgtcgccgcctcgcgcggctcccgctcccgcgaggaggaggaggaggagcaagacaaccgccgtttctgcgtgaacgacgcggctcccgccgggtccgcgagctcgtgttcggacccggccagtggcggcttcttccccgagggcgcgaacggcgggacgcgctccgccgcttttccccccgggtgcttgccaacgcgaccccccgcgctggtggcctcctcggcgccggagaaccgcggcggccggtccgtgtagtcgtcactcggcgcgtctccggactgcactgccgcgtcgcccgcgccgccggcttccgtcgaggcggacagcaggcggcggcgcgcggcaaccaggaagccgtctttggcggctgggaccgacgaactcgtgagtaccaggcggagtgctcgtgccgttgccatcctagtactaggagtctaggaccacctgacttgtctgcttgcaagttgcaagactagttccttccgatggatcagctcggcggtgctagggacaac

SEQ ID NO: 43863 - DNA, 424 bp, Zea mays
  unsure (1)..(424): unsure at all n locations
  Clone ID: MRT4577_140006C.1
ccgcacgtccggaggatccccatatttccatggcgatgccggaaagtgcaagcgcaccctctgaagatcttcatggtggtgagggacttcctgtccatgctggaccatgtatgcaaggaggtcggccagcaggacaggacggcggttgttggatccgcaaggtccttccgcatgtcagcgaccacggcaatggcgaacctcaaagtgtacggccagcacgcaagagacaacgacgacgacgaagagagttggtcgctgtaggaaatcggggtcagggacggagccaaacgaacagaaccacaagaacccaatatagatgagtattattgtttcatatagcgcacatatgtaacttttgataagtacgaagataggatcaaattacgttgtataattatggatgcaccggattctttcttgtncg

SEQ ID NO: 43864 - DNA, 401 bp, Zea mays
  unsure (1)..(401): unsure at all n locations
  Clone ID: MRT4577_140007C.1
cgggncgcttctcttgcagctcccctttaatactcagtatcagggtctgagctctaggctctagctagccgcgccactccttcgtgtagccatcagccttctcatcgccaccaatggccactgccgaggtccagaccccgaccgtcgtggcggccgaggaagcgcccgtggtggagactttttttccggccgtggggcgcgaggagtctgtctctgtcgagggcacagctctgcgctgggatgacggggctgcagcagatgtttcctcagtgtttgaagatgtgggcatctatgctgactgcgtggctactactgaagtcagcatctcggttactgtagatgcatcaaaactatggagtcgtgaattgacccagcaggaactcggtcatgtcggggaagag

SEQ ID NO: 43865 - DNA, 342 bp, Zea mays
  unsure (1)..(342): unsure at all n locations
  Clone ID: MRT4577_140008C.1
ttcttaaggcccanattccgtgaacctccagtaggggtgagtggctcaggataggctgtgcgttcccgccctcttctcgctccggtactgnttctcatggaagctcatgagacagcatattctatacaccctggttgcttgtattttttcctttacctgnngaagatattctggtggggcggggtgaactgngtgattccttagtttgtggccttctgcctctgctgtcnttggttcctggcctncctttcctcgccctttcctttgttgccgcccttgccntttccccnctcccccctccctccgtttgtgctggcctttcttgtccccctccccccccct

SEQ ID NO: 43866 - DNA, 740 bp, Zea mays
  unsure (1)..(740): unsure at all n locations
  Clone ID: MRT4577_140009C.1
cccgggctgcacgcggcacgagcagaatagattacccaatcgaaacaagtgaacttgaataatatctactttcatttttttcggggcttcatcaggtaacagcatttacaggcaaacgcttacctccatttgtctttattgttttgtttttctctatatccaaatcttagtggcagtcagtcatcagttctaaagtctgaactacgttgttttgcagtagttttaggggtttccttgtgcccagctccagtaagctgtttgttttgtgcccaactttattaggttctaattttgagtgagcgtctacactcggtaactgcacaatttgatcatcttcggtccattcgttttcaagatgctattaacagagcaatgccaaggaagaagattcagaagagaccagaaatcaaacctgctgaaccatccaagtccaatcttgttctaaaatctgatgtatcaaaggttgtagaccatgaagtatctacaacacctatgagagttcaagaacagctattggacgatgaaacaaaagccctccagtggagttgacaagtcttctgatgcgtccaagaaacagagacaaagatgatagaatgtcagcactaatcatcttatgtcaacacaggttctaccaacaagngcaacaattccagtaattaataaggatccaggtggttggaagcctaccgnattaanggtgggaaaccgtnggggaaccaanggagcctaatnccccaggg

SEQ ID NO: 43867 - DNA, 263 bp, Zea mays
  Clone ID: MRT4577_14000C.1
gggaaggggttcttacattacagaggggggggaaaaaaaacaacctggtggtccgaaccacacctattacacgtccggtaactttggcatggggggagtccccaaaaaaaaaaagaggagctttacagggggggggacacacccaaactgaccaccggccggggcccgacccgacacgagcagtcgattgtttgagcaaaaaaacgggagtggctggtgcaagcaaaaaggcaagggagccccaccccactaatattagtatg

SEQ ID NO: 43868 - DNA, 388 bp, Zea mays
  unsure (1)..(388): unsure at all n locations
  Clone ID: MRT4577_140010C.1
cccacgcgcccgaccgaacacaaggacccgccccggcccaagccaagccaaacaccgacagcgagagagacacagagagagcnagaggacgatgccagcagaaggctccccgacgcagcggacccacagccccagccgctgacgatgagtgggtaaaggaggccgcgcaaccccaaggccggcggcgcgcagacgaacccccacgagggagcgcgacgcaaagagcacctgaccaggcaacccggccagcaacaggaacagcggcaagcagacgacgcacgaccgaaacaaccaggcgaaccaccgaaaggcccgccagcgccaagccagagaagccgccgcgcacggaggaaccgacgggcgaggcacgagcgccaccacgcgccgc

SEQ ID NO: 43869 - DNA, 396 bp, Zea mays
  unsure (1)..(396): unsure at all n locations
  Clone ID: MRT4577_140011C.1
ggcaaaataatttggagggatttaagacaggaaggaatatnttgttnnaatacacaggctcacaaacatttattattaaacattccccttcgcaaacatatagttaataaacacgcgtggaaggtctccaccaccggactacatatgctggggggcctatataccggcgggacaagggtggtgtaacctaaatcgttgcacaagggaaggttgaaagtgccccatacaatgatattttcattatgtgctcactccataagcaagccggacaaggtgcactgcatatttttttcttctctgaagcgctattgccctgctaaaaacttgtatgaagtgcccacccgttgtttaatcctttgacctgttggtggccttgcgcttttgggcaagggcttt

SEQ ID NO: 43870 - DNA, 507 bp, Zea mays
  Clone ID: MRT4577_140012C.1
acccacgcgtccgcccacgcgtccgcccacgcgtccgcccacgcgtccggcaagggagagaaaggaaggagggcaggaggagaggcggaacaacccgtctccctccatctctctaccttcttctcctgcgcccctatccatcgctcgcaccacccactgaccggccggcggcatccttattaccataacatcacgggacggtggcgcgatgcaaggaggcccactgagcccggatgagtactgggtgatatcgccgccggcgctgctgcaccagccggcgtccaccatcgtcgtggccatcgaccgggaccggaacagccaactggccgtgaagtgggtggtggaccacctcctctccggcgcctctcatatcgtcctgctccacgtggccgtccattaccacacgacccatgggttcgccatggttgaaaccacgcatggtgcgctggaggctgaaatgaaggagatctttgtcccctacagaagattcttcaaccggaatggggt

SEQ ID NO: 43871 - DNA, 200 bp, Zea mays
  Clone ID: MRT4577_140014C.1
cgcggttataactttttagataacttcatcagggaattaggggactacataaggtttcggatcaacaacaatcgtgcgtacacaataccatgaaaagggggccctgggataacacaggccgatctgttggttataaacatgacagacctacccactgctgttgtcgctgatctgactggaaatggagcgagacccactac

SEQ ID NO: 43872 - DNA, 458 bp, Zea mays
  Clone ID: MRT4577_140015C.1
atatgcacaaaagcctcacaattagaaaaacagtcacaactggatcatttaccgatagcttgccagagcattcacaaaagccccagagatgaccaggcacaaaagccccacagggacatcactccagcgggaagcaggtcaaaagcccacaactacatcactaagggttcatatcaccctaggggtggggcaaaagcccacaactacatcactttagctggtccagagctggtcaggcacaaaagccccaaagctaccctaatgcttcaagcaggtcaaaagccttcaaacaaccaccccagctttttggatccccctggtttaagggacaagctttcattggccaaaacacccatctgaagggctaggctcccaaaagtaccctccacgagattcaggcgagcacggacatcaaaaatgatggggcattcaaaccacggaatcataaaggggggccc

SEQ ID NO: 43873 - DNA, 307 bp, Zea mays
  Clone ID: MRT4577_140016C.1
ccggccgggacacaccctgtaccccggctatgcgtatgtccctgcgggatgcggacctgactcttatcttcttccgttcccctcgccgcgagagctctctctgtctctctctctcctctgtggtgacgactgggtgcccggacccctggtagacgtcgccgtccagtccccgtcggggccttcggaaggacttcttcagacccttcgccagctacgatccgcaccaggcgtacatgtgtacacccagcccacgaccttaactgcgaccgtccctgcaactgggtgtcctgctggaatctgagaattt

SEQ ID NO: 43874 - DNA, 280 bp, Zea mays
  Clone ID: MRT4577_140017C.1
ttggtgagcacccgcccgcagagggcggaacacggcaggtcactgagggtgcacgatcgaaccgcgcctatgtcaagagggcaccacgtaggcaggatgtaacaacaccgttctacgagttatgcggccagagatgcacattaccaggatgagctcaacaagagggcgagctaaatggaccctgcaaaccactgagctacaggtcatgggaaaggccactagcaaggtgaccctgctaatccaaatgcgcacaacaatgggacggcgacggtcccgccag

SEQ ID NO: 43875 - DNA, 106 bp, Zea mays
  Clone ID: MRT4577_140018C.1
tggcggtgacggtggcggtcgttatggttctgaacgtggtggtgaacgatactctggcagtagccgacatagcagcactatcgtaatcacgatcgctacagccgtg

SEQ ID NO: 43876 - DNA, 408 bp, Zea mays
  Clone ID: MRT4577_140019C.1
aaagcaaaatttattttggccaggggataattaaaaaaaaaacgggggccataccgggtggatattggttttggcaaggccacgggaggggaaaattagtacccaaatcatagaatgaaagttctcgttttagggggatcaaaacgggaacaagggagggcatccatttccatctcggtgggacacagggaaaggaggagggacgtctcgtccccaccccgggagcccaccgaggagatccttcgggggggggaaacccttttcggggaaaaactggacgggtttttgaaagtcattgcctctcctacacaggacaaccaagggtgaccccccccgtggttccttgagggggggtttaagcgggggcagctttctttccaccaaggaaagcgggatgttgggggacgg

SEQ ID NO: 43877 - DNA, 820 bp, Zea mays
  unsure (1)..(820): unsure at all n locations
  Clone ID: MRT4577_14001C.1
ttggtaccgtgctcggatccctagtaacggnccgcnncagtgtgctnnggaattcgctcccttagcgtgggccgcgcgccgaggacctctaacagngtcgcagctaatagcgctgtatcaggcggagactcgactcttgactatcaaagcgctatagacataccgtaactttgcccggcggaaaagtgatatgcaacacgggtccaataatttgaccagtacaccctacgctcttttcttcaactgtggaaatcccggaacgcgaaggaataagattgggtctcagaattatcacataaatttcaaaaaataagggaaattgccgaaattactattcttagagaataaggccacaacagaaaagatccaaaaatccaaaagtcaaaaggaacatgaattagctaattcaataacaaaagaaaaggggactcgcacttgatttcgatgcccaagcgaatcccattcacccgtttacttatggaatgaatccggtggaaagatcaagccatttttttcatataaagatcggcttttgtgaaggatctgtgcctactctactttcctatctaggacttcgagtatacaaaagatatactactgcgaagcatagattgctgtcaacagagaattttcttagtatttaggtatttagattcaaaatatcaaaggtgaagaactttagaaattgtaaaataaagattaaggggttgggctgcgctatgtctatcgaagagcatacaataatgatgggatttgccgaatcaaacccacggtttaataacgaaaccgtgtttaacttactctaccaaccagctgaatt

SEQ ID NO: 43878 - DNA, 467 bp, Zea mays
  Clone ID: MRT4577_140020C.1
gctattcgtcggaaacaaccccttaattaccatggcttacatgacgtgcatgtaggcttacgacagcggtcatggtcattgggaccacacagacgtagcgctcagcgacgcgaacacgcttctcttggacaagaagcattttcaggtttatgggcttgagatccccgatgagatcccggagggcgagggtgccgctacgtatgaaaatgctggccacagaggggttcactgacgaggtctaggcatggcgcacatcggaagggagaagccaatatcgttggtatgtgtgtctcaggcaactaacaccctatgttggttggtgctgtccttgcggacaagtacacatagcgtgctatacatggcaaaagaacgctagcatgcacgagaaagtgccttgcaccgctagctaaggtgatacgtgaaagcctgcgctttattgaggtcttgttgacacctgttcatgccat

SEQ ID NO: 43879 - DNA, 243 bp, Zea mays
  Clone ID: MRT4577_140021C.1
tgtgaattaatcagtgttagtttgagtgaacaaacctatttcttgtaccagtgcagttagttgaattagttgcacagtttttgtaataccaaataatcagctgttttattttatttgagaaagtcgtggttctgttaaaaaaaaaaaaaagaagaggaccaaaaggactaaaaataatatggaaaaacgaaagaggtaatgaaaaaataatggaaagagaaaaaatctgggcgccttttttta

SEQ ID NO: 43880 - DNA, 464 bp, Zea mays
  Clone ID: MRT4577_140022C.1
ccctgctttccttcaccgccgttacgcaacaagcgtcaaactaacggccataagcgcggggttaaaaaccgtcgagcaaacgacgttaacagaggataacagattctcaaccgtcggatctgactctgatgaatacaatccaactcttccaaagccgaggatcctcgtcaccgagaaactgggagaagccggcgtgaatctcctcagggaattcggcgacgttgactgctcttacgatctttcgccggaagatctgaagaagaaagtggcggagagtgacgctctgatcgtgagaagcggaactaaagtgacgagggaagtgtttgaggcggcgaaggggaggttgaaagtggtcggaagagccggagttgggattgacaatgttgatctgcaggcggcgacggagcacgggtgtttggtggtaatgctccaacggctaatacggtggctgctgccgaacatgg

SEQ ID NO: 43881 - DNA, 2718 bp, Zea mays
  Clone ID: MRT4577_140023C.1
aagtaaattggtattttgtatttcgttgtttgatgccttttacagctgactcagcctatatttatatctcctcaagcccacataacccatagctcatctactacacctaatatatctaacattccccactccttgaaatacggcttgcccccaagccgctgacggtgtaggatcaactttatctgtggattagcatcattgttgaatgcatcatgcctctcctcggccctccatctgaactgggtctggcgcatcttcggagaggaagttgtagcagcacctcttgcatatgtgcctgacataatagcagtaactcttgcaatactgacaactctcagaccataggtaaccaagccacgatcaccaggatcccaaacaaagactgaaaatttgccttggtcactgctgacggcactcagactagaggtaaccaagccgctatcaccaggatcccaaacaaatactgaaaaattgccttggccactgctgacaacactcagaccagaggtaaccaagcccacgcaagcaccaatccctgccttcagaagacttggtaaatcttcaacacaaaactttggcatgattttccagttttcatctctgcaactcactgtgtacaacaatgaagactctgcaacctttcttgatataagcatggaccctctcagagttgagtcattagttgtattcatggcttcccaaaaaaattgtaatggaatgaaacgagcaacatccaagatgagcaccatatcttgtctaacctggtagccaccaattggggagaaatgaccagttccagtctgtccgaaaggccacctgtggtaggatgcaataatttggcagtcagcacccaagctgatgaccaccagctcatcaccaaaaccggcagcatccattataatatcatggtcatagcaaactgcgacaagaggatgcaaggcagtcaatggtgataagatcttatgattcgcaccctgagcatagccaagcagtgcacccattgaccatccaattaaaccatactgcatttggaattgatatccacagctttctggcagcttgagcttatggcagttgaaccaagaatcatcggtctcagccatcacgacactattaactgtcatcatcttctggatgtatttgaagagcacattgactcgcagtggctcattcggctcgctctccagcgcctgcccttcaggtacaaagttcctcttgtagttctcatacgtagtggtgttctttttaaccttcttagcaatttcagtccagtactccttcatcatcaaacatctgaatgacaacccatttcccactcccacacgctcaggctggacaatgatggccttggccttcttgaggaggaatgagtaaccgacggagctgtagtccttgaaaatggagcctgcaaagatataggcatctgcagactcaacaatctcagtacagaaggcggtgctgacgacgcccctgtaggtgccgatgaagtggaggtgcgtctctgccacaagacccttagcagatggcatcactgcataggacctgacacaaacttgtaccggatgcatatgaattttcccatgaatcacatgcaaattagcaaggtattccaacaccatataaggccactgaatcttggcaagtgagcaaacaccaccgaagaatatggtgaacactagctgacattcttccaacaatgaagttatataacgaccgccagcatgcaaattcacccacaaaacgggaggtggccatggaattttccaacataaagtggttgggagcttgccaacattaacccaagcagcagggaagcttagaggcaatacctcgaacacctcatgggtagcacaagcattatctagcacgacgaagctcctgtccagggtctccgggtcgacccactcatagctttggtcgcacccaactcggaggctgacatcccgcttgttgctgccgagctggcagctgagctcactgccacaatggcgggcggtggtgagggtgtccaggtcgggcgcgctccccgccagaccgatccgctccagttgcaggcccttgataatggagtgcacagctgggacatcgttgacagcgtgggtcctgatgcacttggaggtggcgcgctcgaggtcgatgacgagcagggactgggggatctcctccgacgccgacagcgccgcagtagcgatggaatcgaggtcgccacccgcctgcttcggatcggacggatttcttggtgtcgccgtggtggaagaagacgactcttcctcgaagatatgttcctcgtcgaagaaaattatgggtggagttggtctctcaaatggcacctccgggaaagtctctgggcagtatgttggttggccgagctcggtgaagatccagctccgtgagctgtccatcaggctgtgtgcgtcaggtccgccgctcgtctaggcgattccgatgacgccccgcaaggacggcgtctgcacggagcgatggacgcgtgtgtgcagccacgacatggaggtggtcggctggtgggtgtcacaggcggagatcctggcgcaccgcgcgatggaggtttgcgtcacctcctgcggatgctcactcccgccgttgagcattttgacgaacgccttgagtgcggagtgcacgatggggacgtcggtgacatcgcaagtcctggcgctgtcggcgtcggagaaatccatcgtcgaacacttggtaggcgac

SEQ ID NO: 43882 - DNA, 549 bp, Zea mays
  Clone ID: MRT4577_140024C.1
ctagcacatggtagtaggaggttttgcggcggcgggagggggctgaggcagcgggatcaagggggctgactaggatatcgttctctctgtacgacaatgtaccaccacaaggacgaggagacggtgatcggaagcccgatcgagaacttgctgttcatagggttgtcctctggagacaagaacatgctgatgagggacgggagggagccggtatatttttttgggaatccggcgccaccgacaactacagcggaattttacgtcgtctaatcagccactcccaatttgttcagaacgtcgtacctcagatgcgacagccagttcgtactttgcagctactgtgatggatagcttagactatgggacctgtaaacagatcttaccacacggcgtttagagagtcactagaaggatgtcctatacgctgacttcttcgttaacaaccggcagagagacttcgtgttccgtgacaagaccattaaggtatggaacaccctttgagagagcaagtacaccataggaggtgacctcgatgcagaagagggccac

SEQ ID NO: 43883 - DNA, 319 bp, Zea mays
  Clone ID: MRT4577_140025C.1
caactagcaacatacaaagcacaatactgtaccaacaatggcagacacactatgggggttccttatgctccttggcctttctgaaagtgttgctacggtaaccatttactctcaatgctcacatgctcctatacctttaatcattgctccattacctcttaccaacaactgtacttcaatgaagcgatacacgcaccagctaacattaccagatgcaatatgacctattaaaggtatcttacatcatcactcttgtccattaaaactgacctccttgcacagattgaccttaacatcatgggacagcaactacaataac

SEQ ID NO: 43884 - DNA, 163 bp, Zea mays
  Clone ID: MRT4577_140026C.1
acctgtttttttttttttgtttatttattttttttttatgggttttgagggttacagactcgatttattttatgccattaagagaaaacattttaggtgaataacactaaagggagaacatacgattgaaggacgggtgctgaagaaaagagcatgcaccgga

SEQ ID NO: 43885 - DNA, 1608 bp, Zea mays
  Clone ID: MRT4577_140027C.1
gaaaaggagaggcatgcagaggagagcgaggagccgaggaggcgtgcgattgcttgctttgcttccgagtttcgacacgcgtgcccaggaatcggtcggattccccaatcccgtcaccatggccgcgccgccttctccttcgtcccgctccccgtccagcgaggttgccgtccacagattcagcggcaccttggatgtatcatcatcgccctcaaggaccgagttgttgagcatggtgaagaagcactcacatttgattgggtggacgattattggtgccgaggatgatgcatcagatgtgggaatggatgataaattctggcatgaaatgcttgacctattctttgtgcgtggcaggcaatcaaaaagaagtgaagaggatgaccttgtcttctttgttaataacatgaaattgcatggttatggtttcaatgataacatggaagatccacctcccttttttgtacggagatgggctcccacgcttgaaaagatcagtattaatacagtggaggttgattgggagcgttcattctatttgaatttaatcgctcacacgtcgtacactgtcactgttgcaatatttggaattgaagatcttcgcaaccgtgcagcgaaaaacaaacagttgcctccagtttataaggttacaaaaaatgtatacgcgtctcctagccgtgtaaattttcatcttgacagaagaaaggctgtagaaacactaccggcatatcccaacatctttttctctgtagacgacttcgatgatacttttgatgctgtggttttgtcagatcctgaacactgctattgtgtgattcttaacgcacatgatggggcagcatttcccgaagaaagtgagtgcaagaatcctgtttcaaatacacagcctggaatgagctgtggtagtgcccaagaaaaaccaccaaagagaactctcttctcagcttatgtgggctaccaaaatgttcgtggagcttatgatgcttgcagatcaaaatttgggagtttcctctcacttgggcatgaccacaataagctcgacagactttttatgaagggcccagaaggacgtggagaggtggaagtagctgtctctggcattgcagatcaaagcagtgggaagtcgaagaaagatccaggagatagctttcgagtccttgttcacagagcagcttctgctgcatcaaagctagtgaagcatgcttatgagtcttcatctgctaacagacaaatggatgatgagcttgtgcctctgaagtgttgcttgatgtctgtgtctcttccttgggactacattgcccacgatcttttgcacaaggacacacctccgatggatctgtgatagcaattccagatcttcactgccagtcatgggaggaatccaggcgtgatgagatgcaaggtaaagaatcgaagtggaattaggatgtagatgcttttagaccaaatatgtgaagtgtagggtttgtaatgtgcttgtgcacaggtaaccatacaatgtaaatacaatgtacatatcatgcatgccttacagaacttgattgtatttcttaaacttgctgttttttccttagcaaataattaaataaggaaaaacccacgcgtccg

SEQ ID NO: 43886 - DNA, 548 bp, Zea mays
  Clone ID: MRT4577_140028C.1
agagagaaaaagtttgccaaatcatggaaagttagacagcaaaccaaacgtattccaccacaaagaatataaccaactaagctagaagacaagaatatctaataatctacttaaccagaaggtacacaaatcaataaatcatggaagcatgacgcaatggaaaataagttccactccccattcaccaccactcaaccaatatttacagaattgccagctttccccttcccccctgcagaattaacactacccttcatttcacccaagcaacacttgtccatctccagttgttttctcatgctcagccagtttgaattctgaaacttccccatgcttcctcatgcaagcgaggaggaagttgaggaaccggtgcccttgccaaaatctacgaggctcggtggctgttgcctgggcagatgcagtgttgcttgattcattccactgctcgatgaactccgcatcacagaaacctgccacgttgcatgctgttgagccacagatttcgcagatcttgttgcctctgatcttgaaccaggtctcggcgcact

SEQ ID NO: 43887 - DNA, 105 bp, Zea mays
  Clone ID: MRT4577_140029C.1
gcggacgccagcgcgaggcattaacgctctgccgttaccgaaaactgcgtgaccccggcgaccgtcgcgtcagtcacaggactcctcagcacgtgatgctgctgg

SEQ ID NO: 43888 - DNA, 423 bp, Zea mays
  Clone ID: MRT4577_14002C.1
cggactagaggcctgatatatctagctctctacatagaggtctggctgattctgtatctttctgacgcccacacatacatgactatggaggtacaaagacgaggggacaccactatgccacacacatttgcgcgaccgaagcatccatccctctacatgttgaatctactatcacaaaggggcaaaatatatggctactatcatacaacttaccgtacctgggccactgactatggcttcaccatacctgccgcaaagacactgctatatgctacattaggtgtatgaccgtaaccaaatacttttccctgctgaggtgatggagaaatcaggtgggggggcggaggcaacagtctctcaaatagccgtgaaatgctggttgcccctgaaatcataactgcacattctcactgttggggactg

SEQ ID NO: 43889 - DNA, 784 bp, Zea mays
  Clone ID: MRT4577_140030C.1
atgcttgcgttgcaagtttactctgtgctcgcctttgaaaagaactagtacccgctgtcgtcttcctttccctccttgtctggttccacgaaggagagggagtacttcgccaaggcaacacacggggcaaacaggcattgcgagaagtcagaagctgctctgctataatggctctgctataataaggtggagaagagaagccgatggccgcagccgaggtcctgacggccgcatgggaggaatggggcctgcgggcgctggtgctgctcagcctaacggtgcaggtgacgctccacatcctggcggagttccggcgccacgtcgactccggcgcgctgagggccgtggtatggtccgcgtacatggcggccgacgcgacggcggtgtacgtgctgggccacctgtccgtggccagccggtcgccggagcgcgagctgacggcgctgtgggcgccgttcctgctgctgcacctgggcgggcaggacaagatgacggcctacgccatcgaggacaaccagctgtggctgcgccacctgcagacgctcgtcgtccaggtggccgccgccgcctacgtggtctacgggtcctccgccatcgtcggcgcgcgccggctccccttgctcctggcggccaccgtcaccatgtccgccgtcggcgtcgtccagtacggagagcgagtgtgggcgctccggcgcgccggcactagcccgaccgggaactacagcagcgacatcgggaagaggaagttcaacctgggggtgcccgattctttcatcagccgctt

SEQ ID NO: 43890 - DNA, 777 bp, Zea mays
  Clone ID: MRT4577_140031C.1
aggtcgacgacgccgtccagcgagcactccgacacgcacgacttcctggcgcgttcggccgtggccgtgtccccgccgccggcactggcggcgccggcgtcgcggctgatgggcgcggacgtggagatacagtcctccaactccaaggcggagccttggcgcgagtgagagtgccaggaccgatcctcggcgtccgagaagcgctggctcccctcgtcgtcgtcgtcggagctctcctcccccgcgagccgccgagagacgccgctcacgcggccccgctccacggccgccgtgatcgccgattgctcgccgccgttcaccatggccacccaccaaagaaccgctgccgcaggcggcgtcgggaaaaaagcgaacgagaatccctcagcgcaatgcggccgatcacgggaggacgaagcggcaacaggaatccaaccaaaggcgggtggagccgtggaggccagtagtacacggctgacggcacacgctttggaggagaatcccaggtgtggaggctgctgcaagatttgtgtgtgtgtgtttttttaagtaatctctcgaagatccatagtcgtggaccgcattccgcagcaggtaaaacaaaagagaagaggcgagggcgcagaggggagttgagaagcggtggaggtgttctatgcttcgaatcgcgcctggagttggagactagtagcagaagagaagaggggagggggagagaaaggacctggccgtggctggctggtcgaagagtcccggccggcctcgaggtacccaatg

SEQ ID NO: 43891 - DNA, 126 bp, Zea mays
  Clone ID: MRT4577_140032C.1
cccggtcgcccactcgtccgacaaaaaccctgactcaccttataaactaatcgcacctctttctatcggagggctttctatggctactcctactacacaccattcttgccaggattataactgtca

SEQ ID NO: 43892 - DNA, 326 bp, Zea mays
  unsure (1)..(326): unsure at all n locations
  Clone ID: MRT4577_140033C.1
ttggtcctctanacggccccctttgtttgtggtggaaaaaaaaaatccttgggcaatcttcctcacatttcgtctttctaaatccaaaatttcacctctgacttgaaatcgaagcccccnctgtccctattaattatttctccatcccaaanccaacttttgttttgttgggggtatnaanaatcccatnctaatttatccanaccgatggcttgctttaagcactctaatttcttcaaagnaacggggccggaggcaccacccctccagttaaggccaggagcgcttcnccgggggagggttnagccnntttttttttttttttg

SEQ ID NO: 43893 - DNA, 596 bp, Zea mays
  Clone ID: MRT4577_140034C.1
tcgcttttgtgatctagcttatcctcgcttttgtgacccagctttatagctatctaagttcaagtttgcattctcgagtaaatgttgcaaggagctttttatttcatgcatgctcaagcatgcttgcgttgcaagtttactctgtgctcgcctctgaaaagaactagtacccggcccgctgtcgtcttcctttccctccttttctggttccacgaaggagagggaacactaggaaaccaagccagcatctgatctttattagctgcttctctgttcctagctcctcccatatgggagtacttcgccaaggcaacacacggggcaaacaggcattgcgagaactcagaagctgctctgctataatggctctgctataaggtggagaagagaagccgatggccgcagccgaggtcctgacggccgcatgggaggaatggggcctgcgggcgctggtgctgctcagcctaacggtgcaggtgacgctccacatcctggcggagttccggcgccacgtcgactccggcgcgctgagggccgtggtatggtcggcgtacatggcggccgacgcgacggcggtctacgtgctgggccacctg

SEQ ID NO: 43894 - DNA, 1600 bp, Zea mays
  Clone ID: MRT4577_140035C.1
agaagacaagaatatctaataatctacttaaccagaaggtacacaaatcaataaatcatggaagcatgacgcaatggaaaataagttccactccccattcaccaccactcaaccaatatttacagaattgccagctttccccttcccccctgcagaattaacactacccttcatttcacccaagcaacacttgtccatctccagttgttttctcatgctcagccagtttgaattctgaaacttccccatgcttcctctgtggttttggagcttttattaagaacgatctgcaccaatagtactcatccaggaacattgaagtggaagagccaggatataacaaatgcaaataccatgcaagcgaggaggaagttgaggaaccggtgcccttgccaaaatctacgaggctcggtggctgttgcctgggcagatgcagtgttgcttgattcattccactgctcaatgaactccgcatcacagaaacctgccacgttgcatgcggttgagccacagatttcgcagatcttgttgcctctgatcttgaaccaggtctcggcgcactgcttgtgggcacgggagaggtcgtccttgcaggagcagccgagcacgatgccggcgccggactcggcggaggcgctgtcgaggccgaggtggcagatgcggcagttcctctcggccttgtccgggctggccttgacgatctcagccagcccggcctccaggtcgacgacgccgtccagcgagcactccgacacgcacgacttccggccgcgctcggccgtggccgtggccgtgtccccgccgccggcgtcgcggctgatgggcgcggacgtggagatacagtcctccaactccaaggcggagccttggcgcgagtgagagtgccaggaccgatcctcggcgtccgagaagcgctggctcccctcgtcgtcgtcgtcggagctctcctcccccgcgagccgccgagagacgccggtcacgcggccccgctccacggccgcggtgatcgcggattgctcgccgccgttcgccatggccgcccaccaaagaaccagtgccgcaggcggcgtcgggaaaaagcgagcgagaatccctcagcgcaatgcggccgatcacgggaggaggaagcggcaacaggaatccaaccaaaggcgggtggagccgtggaggccagtagtacacggctgacggcacacgctatggaggagaatcccaggtgtggaggctgctgcaagatttgtgtgtgtgtttttttaagtaatctctcgaagatccatagtcgtggaccgcattccgcagcaggtaaaacaaaagagaagaggcgagggcgcagaggggagttgagatttgagaagcggtgggggagttctatgcttcgaatcgcgcctggagttggagagtaggcagaagagggaaggggagagaaaggacctggccgtggctggctgtgtcgaagagagggagaggagaagagagaaggccccacccctctggtggtgctgggagtgggatgggatggttgcccgcctgccgcctcgtctctcggagtcggagcatcatcagcctttctccctagcttctccacgcattacccggccgg

SEQ ID NO: 43895 - DNA, 724 bp, Zea mays
  unsure (1)..(724): unsure at all n locations
  Clone ID: MRT4577_140036C.1
cctcgaggccggccggaatattatttccacgcctgaacgaggcaaggagtgcgagcagcaattactgctgctactcttggctttaacgccactcctcctgcccaaattccccagcggcggaggaataaattcttcgaccactgccgcaaggaaggcacctcccttccccctctcttcaccgccgccgggaaggccgcagcttccactccaatccttgtctccacttgcccgcgattcctctcaccctcgactcactcactcacccttttctccacttgtgtatccgcggcgacggcggcggcctccactccactccgtccggtccactccctgtccctggtgatttcccctccctccctccctccctccccttttggcgcgcgtacttgcgaggtgaattcgcagatggccgcgctcgggaagctcggcccgcgttttgggtctcgtctctcgtcgaagaaaaaacgcaccttttcttgaattctggtgccacaattttgcgttgtccttgcggcgactgatgggtctccatagatctgtgtgtgttctgtgcggnggcgagtttccgcagaattcgcggcagatgctgcgcccgcgcggaaatggcccctcgtgattccttacccgtttattggactactttgagtgttcgccaaaattagggcccgacgtttcgtcggtgaatcctcgagctgctgccgtcacgtatgaggaactggagcgt

SEQ ID NO: 43896 - DNA, 2331 bp, Zea mays
  Clone ID: MRT4577_140037C.1
cattgggtacctcgaggccggccgggaccgccctgtgcctgcagctgcaccctgcagcgctcactcgctcactgactcactcccctcccctggcctcctcctcctcctcctctctctctctccactatctcccacagccgaaccaacatgcaggggcgcagcagggacgccgccaccgtcgctgcagcggtggcgtgcgcagctgtgctgctcctcggcgacgcctggaccgtgtcggcgcaggcggcggcggaggaggacaagataagcgccttgccggggcagccaccggtgggcttcgcacagtactccggttacatcccggtggacgccgcggggaagcgctccctcttctactacttcgccgaggcggaggcggatccggcggccaagccgctcgtgctctggctcaatggagggcctgggtgctcatccgtgggagtgggggcgttctcagagaatgggccgttcaggcctagcggcaatgcgctaacgaggaacgagtacagctggaacaaagaggccaatatgctgtatctggagagccctgcaggggttggcttttcatactccactgatcctgccttctacgagggtgttggtgacagcatgacagccagagacaacttgaagttcttgcaaggctggttcgccaggttccctcagtacaagggcagggacctgtatatcacaggagagagctacgctggccactacgttccacagttagcccagcgcatggttgagttcaacaagaaggagaagctattcaacctgaaaggcattgctcttggcaaccctgtgctggagttctccaccgacttcaactcgcgggccgagttcttctggtcgcacggcctgatatcggactccacctacaacatcttcacgacggtgtgcaactactcgcggtacgtgagcgagtactaccgcggctccctgagcacggcctgcgacagggtgatgagccaggtggcgagggagacgagcaggttcgtcgacaagtacgacgtcaccctggacgtctgcatctcgtcggtgctcatgcagtcccaggtcctcgtccctcagcaagggagcagggagctggacgtgtgcgtggaggacgagacgatgcggtacctgaaccggaaggacgtgcagcaggccatgcacgcgcgcctcgacggcgtgcagaggtggacggtctgcagcagcgttctggagtacaagcagctggacctccagatcccgaccgtgaacaccgtgggcgcgctcgtgaaggcgggcatccccgcgctggtgtacagcggcgaccaggactcggtgatcccgctgacgggcagcaggacgctggtggggcggctggcggccaggctccggctcaacgccacggcgccgtaccgggcctggttccaggggaagcaggtgggcgggtggacgcaggtgttcggcggcggcgcgctgtccttcgccacggtgcgcggcgcgtcccacgaggcgcccttctcgcagcccgagcgctcgctcggcctcttcagggcgttcctcgccggacagcagctgccggaatcgttccagtgacgacggaacgtgcctcttcctcgtctagtgtatgttcattgtaagcgtatgtacgtgcagctgaccgtctgtcgtcatcatccggccgctcgacactggcaaaaacaacccaaatgggttcttctccaagtgtaatcaggacgaaaataatatcattggaaggaatgagactgtgtgtcgtcggatatactgcggacggctttccggaaaaaaaaaaaaaaaaaagcggccctcgagctccacccctttaggaggatgatgcgcgctcgatgggatcgatatggtgcaggagcagtgccaggatgcagcgaccgtgcagggcgagtggccaccgctggtccggccttcacttccatcccctgttgccagtccacgagaaaacacactggtgctacacgaatcaatgagaagcaaagtggaaaaccaccattaccaactaatttagtagcagagcttcgaaaagtctcttacagagatgaatagcccttctgctgaaaaaatgagcagtgaggacacgagaatctgaagaccagtctggtacctggaatcttgagtctaaggcaagttgtgcccttgatcacttttctctttacccaataatgctcctatcaatcactgtgacatgctcatgttaatttgatgggacctaataggtttccctagcattattaatcccacaccttgcagataaaaaaactattagttagttttgctattgttctacatggttttgggaaattaatgttacattatgatcatgttccagtt

SEQ ID NO: 43897 - DNA, 283 bp, Zea mays
  Clone ID: MRT4577_140038C.1
ggatggggaaaaaaaacattgcatggtactttggaagaaaggcaaacaaacacgcctttttattcaaagcaaaaggtgccaccaatcccccccttattaagaacccggcccggtctgcccaaaaactcttaaaaccgggaaaaaaacctggaggaaccaaaggttttggaaaccagagccacattattccaataaacgactcacaatgcgaattgtggtgaaacagattgaaatgcacgcgacggatgtccggcctgggcttgtttttcttgttctttacccg

SEQ ID NO: 43898 - DNA, 2132 bp, Zea mays
  Clone ID: MRT4577_140039C.1
cgggaaataaaattccaaaaaaaataaaaaaaaaaaaaaaaaaaaaaaaaaaaaaaaaaaaaaaaaaccgccctgtgcctgcagttgcaccctgcagcgctcactcgctcactgactcactcccctcccctggcctcctcctcctcctcctctctctctctccactatctcccacagccgaaccaacatgcaggggcgcagcagggacgccgccaccattgctgcagcggtggcgtgcgcagctgtgctgctcctcggcgacgcctggagcgtctcggcgcaggcggcggcggaggaggacaagataagcgccctgccggggcagccgccggtgggcttcgcacagtactccggttacatcccggtggacgccgcggggaagcgctccctcttctactacttcgccgaggcggaggcggatccggcggccaagccgctcgtgctctggctcaatggagggcctgggtgctcatccgtgggagtgggggcgttctcagagaatgggccgttcaggcctagcggcaatgcgctaacgaggaacgagtacagctggaacaaaggtgagcgtttcttcttgtatgttgcggtagctataccaaatggtgtacgtgtactactacaatggctggtgcaaaaaaagaagaaggaggacaggaaattaggaagtgttaaaaactccccttttggtacccctgtttgctgtgtgtgtgtttcagaggccaatatgctgtatctggagagccctgcaggggttggcttttcatactccactgatcctgccttctatgagggtgttggtgacagcatgacaggtgaatcacagattatttctttctttcttttccacacttgcagacccatataattcgtctttgggtgttttggatttctgaagccagagacaacttgaagttcttgcaaggctggttcgccaggttcccgcagtacaagggcagggacctgtatatcacaggagagagctacgctggccactacgttccacagttagcccagcgcatggttgagttcaacaagaaggagaagctattcaacctgaaaggcattgctcttggcaaccctgtgctggagttctccaccgacttcaactcgcgggcggagttcttctggtcgcacggcctgatatcggactccacctacaacatcttcacgacggtgtgcaactactcgcggtacgtgagcgagtactaccgcggctccctgagcacggcctgcgacagggtgatgagccaggtggcgagggagacgagcaggttcgtcgacaagtacgacgtcaccctggacgtctgcatctcgtcggtgctcatgcagtcccaggtcctcgtccctcagcaagggagcagggagctggacgtgtgcgtggaggacgagacgatgcggtacctgaaccggaaggacgtgcagcaggccatgcacgcgcgcctcgacggcgtgcagaggtggacggtctgcagcagcgttctggagtacaagcagctggacctccagatcccgaccgtgaacaccgtgggcgcgctcgtgaaggcgggcatccccgcgctggtgtacagcggcgaccaggactcggtgatcccgctgacgggcagcaggacgctggtggggcggctggcggccaggctccggctcaacgccacggcgccgtaccgggcctggttccaggggaagcaggtgggcgggtggacgcaggtgttcggcggcggcgccctgtccttcgccacggtgcgcggcgcgtcccacgaggcgcccttctcgcagcccgagcgctcgctcggcctcttcagggcgttcctcgccggacagcagttgccggaatcgttccagtgacgacggaacgttcctcttcctcgtctagtgtatgttcattgtaagcgtgtacgtgcagctcaccgtatgtcgtcatcatccggccgctcgacactggcaaaacaacccaaatgggttcttgttcttctccaggtgtaatcaggacgaaaataatatcattgggagggatgagattgtgtgtaaaaagatatattcaaaaaaatgttgtaggcttgtagtagtgtaatatgcatatgctggttcaaatttggcatgtgaggcgaagaacctggagatttggaacctcaaaa

SEQ ID NO: 43899 - DNA, 573 bp, Zea mays
  Clone ID: MRT4577_14003C.1
acgcgcacgtcccgtcttcttcagaattccctgatcacgttccagctgagccgccgtactagccggacaggaggcgacaccgcgagagcagagcagggacaccggaccgtgccatcatgttggaaggaaaggcggtggtggaggacaccgacatgccggcgaagatgcaggcccaggcgatgtcggcggcgtccagggccctggaccgcttcgacgtcctcgactgccggagcatcgcgtcccacatcaagaaggagtttgacgcgatccatggccccggatggcaatgcgtggttggctccggcttcggctgctacttcacgcacagcaaggggagcttcatctacttccgcctggagtcgctcaggttcctcgtcttcaaaggggcggcagcatgatgacaagccccacggctaacatcgcgagttcgcgaccaggcaaagcaggtggaggatggtgttgtttttttttattttttcttttctttcaccggcctttgtggacggcttgcctcgctgtatacgatatcaccatggtaataccaaccagtagattgaaacgttgtgggagatg

SEQ ID NO: 43900 - DNA, 456 bp, Zea mays
  Clone ID: MRT4577_140040C.1
cggcgggggcttttttgggctcttcctcgccgggtgggccgcccgggtcttcgcggaccctcagttccctttcaaggtgctcatggaggagctcgagggcgtaaccccatgcatgctgggcgacatgggctgccgccccaacttcggcctcaacgagctcgacttctttttctacaccctagtcgtggggtccatgctcaacccccacctcatgtacctactcgcccggaccgacaccgtgtataccgccgtctgcgcgctccccagccacatgttcaagcccggcggcctgtggctcggctcccgagttgccacactcgtgtccaagggcgccaccttgggggtggccggcttcacggacgggctcgggggaaccgcgctttacaacggccttatggcgacccggaagcacatggacccggggttcgagacgcccaacaagccggcggccacgct

SEQ ID NO: 43901 - DNA, 313 bp, Zea mays
  Clone ID: MRT4577_140041C.1
cgcatcttttatttatttgctatatacgtttctgtaattgcttgcagagttgcaggggatagtactattagaatttttaaggtaagaagtagtactagtggaacccacaaccgatgttaggccacgataaagagaagatttgcgacctcattttttctatacggcaagctaaatgcaatgctgctgctgacgtgtgtagcgggccgcaagctgacgtggcgaaaacttgagccctgaggagtttctgaccgtacgatttggagaaggtagtgatgccacgtgctttattttattatttggtttttttttacag

SEQ ID NO: 43902 - DNA, 308 bp, Zea mays
  Clone ID: MRT4577_140042C.1
ggggcggcccaagccgtccgcggacccgtggccggacccgtgggcggattcttgggccgcctcaccgctccgacacaggctgcgccgcctctcctcctgctccgcggctacccctctcgttggggctgcccgcttcctcgtgccctgctccgagagccgtctccccgcgttcacctcgtctcgcttcctccggtcggcggcggctgcgccgtgccggtgttgctcaagcgctgcgatcaccgagcggcctgcgtctgcgtggcgcggagtcgccaccatggccgatggtagtagccgcttcgggcatg

SEQ ID NO: 43903 - DNA, 240 bp, Zea mays
  Clone ID: MRT4577_140043C.1
atgcccgtgccccccgtggctggtggccggtggcccctcccccctcctccttcccttgccatgtccttgggcctcgggctatttcccaagtacctctccataaagaactgttcgttgagtgaccacccaggacaacagtacaaccatgaggatggttgtccccattgcaaccattgctcaggagaagatgaaggcaacacagaggattttcaggagtttcaggacttccaggagttctaa

SEQ ID NO: 43904 - DNA, 321 bp, Zea mays
  Clone ID: MRT4577_140044C.1
attcggttattgagacaacaacatttgcgtgcattttacccacaagttgagggaaacattaatgccttcttgcaacatcaacaattgctaccattctacccacagaatgtggggaacattaggtgggcttcttacaacaacaacaagtgctaccatttagccaacatgctttgacgaattctaccaccttattgcaaccgcccaccattggtggtgccctcctctagagattttatgaattatactgtggtaataaagagctcatgctgatatgtgcgacccctcagctataaaaagttgtagacctatctttttaatatc

SEQ ID NO: 43905 - DNA, 518 bp, Zea mays
  Clone ID: MRT4577_140045C.1
agatcgactgcatccagatcatctgcaatcatctgccatgatgcaagctcgagctcttcccaaggaggaggagtagaaggccatggcaccggccgccgatgctgcagccaagaagaacccacggcttcagcggatgacgcaggagcagatcgactccttgatccggtaccagaccgtgcacatgcccgaggaagccttccgcaggttgagccgaaggaccaaggagctgctgaccccggaggagctggcgtaccagggcgacttccccgtccccatgggccacatcgacgactacctcgccaacatctgcagagagatcaaccagaccgaggcgcggttcctgcgggagagggaccgcatcctcaacgactactacaacaaaggctacgcctacgccgatcaacaaccttcgtcgtcatcgtcgggtaaccggaggaggttcccacctgtgctcaccaagaaaaagcaaaccaaaccagtgggttaattagctagcgagagataccacttggtggaca

SEQ ID NO: 43906 - DNA, 177 bp, Zea mays
  unsure (1)..(177): unsure at all n locations
  Clone ID: MRT4577_140046C.1
ccgggtgttcgtgnaggttctctcggggtttctgggttcgtggggtgagcggtatcgagtatgggcggcgtcggaatgttagagtacccgctgcttcgtcgggcggcctcgacctgggccacggaacgacacactccctccacaacgaccttcagctacctactggcgaggtacctc

SEQ ID NO: 43907 - DNA, 319 bp, Zea mays
  unsure (1)..(319): unsure at all n locations
  Clone ID: MRT4577_140047C.1
cgtacgngagaggctgatagccnaaatgtctattactcattgctttctgccccccaatatcaacccgctgctgtttatcaaaaggacggcggacaaaacattcaatgtatcgaccaaggcctcaaagtcccccaacaacgccgccatgtcccccaagaacgcataaactgactgtatgaagagatctgatgtttaccaggaccttgataccattatgcgctgatgcgtatgctgtacatggatcaaatgtgctcgggcgtatatctgccctgcttcaagatgcccttctctatttaaaatggaataagaaatgccttgt

SEQ ID NO: 43908 - DNA, 717 bp, Zea mays
  Clone ID: MRT4577_140048C.1
attttagtccctccctccctgatagccagcaaatcccatcaccatatcatatactcgttcgtcactcatcactcatacacatacatgggctgagtacatactcgatcagttagctagctggcgatcgatatggggaaggtggtcgtcgcggaggccacggcgcggcaggtggcgtccttcgtcctcggcgccgccgccgcgctcaccgtcgtcatgctcgtccagtaccgggcgccggccgccgggctcagccgcgccaggacgccggcccacttctccggcttgagattatcatccgacgaccagcaccaccgccgcaacgccacaacaacagcgcgtcccgttgttcatcatcaggcgccaccggtcgccggcagtgctgcccgagacgacgatcatcgccgtcgggcgaacgccacaacaatcacaaagcccaattctaccaccacaagtcatcttcccagcacgcgtcggcatgaagaaaagggagcgaaggaggatgcggagttccgggggctggcggcggcggtggcacgcgcggcaacggacgaccggacggtgatcatcacgtgcgtgaaccaggcttgggcggcaccaggctccttactggacctgttcctggagagcttccgcatcggcgacggcacggcgcggctcctcccacacgtgctggtcgtggccatggatcccggcgcccatgcacggtgcctcgccgtg

SEQ ID NO: 43909 - DNA, 505 bp, Zea mays
  Clone ID: MRT4577_140049C.1
aagccttttttttttttttttttttttttttttttgttttttatttttttttttttttttttttttttttttttttttttttttttttttttttttttttttttttttttttttttttttttttttttttttttttttttttttttttttttttttttttttttttttttttttccccccccccgcggcctccttgaagggaacttttccccccccgccggggccccctaaataggacccaactgaccacccacgcgaagggcacactgcccgattactgtccccgaaacaaaaattgccccccccctaaacccccccaccaaccccccccaagaaaaaaatgggaacccgggggggcttccaatagctcccccactcactattttgggtgggcccccccccccccttttcccggaagaaaaccctctcccccccttttttttttatcccccccccccccggagaaaggggggttaaactttgggccctcttccccccttaggcc

SEQ ID NO: 43910 - DNA, 288 bp, Zea mays
  Clone ID: MRT4577_14004C.1
cgtgataggggctactcccctaagaccaattcctcctgggaggccactcacaatctcacagcaggaggcagctaaacacaagatcaatattaatataaaatcaactgctatatttttaaagagtagtgtttggattacataagcaatcataaaactcccgttggctttagcaagaggtttagtcctgtaaactccaaaggtgttctgtgtgtgctgagcagacaagcatcctagcagagtaagccagaactttcctagccatcctagcatgtttgtgccttgtaagag

SEQ ID NO: 43911 - DNA, 329 bp, Zea mays
  unsure (1)..(329): unsure at all n locations
  Clone ID: MRT4577_140050C.1
cccattcttccgnaactctnctncntacctacaacatcttcttcagttactaaanccactagcgggggctaacccaattttttctgcctcccaacaacancaacaatctccgccacacaaccagatcactttgatgaaccctgccatcctcaaacaacaacccatcgatccatttgcacccaatcaacaacatctacaaaaaccataagcccgtgtctcctcttctcgtctcgcatttgctataaccacatcgccttgcggcacgtctgctgcaacagcttctcaagacccctcctgctcctggatcttcttaacaaatatataaatat

SEQ ID NO: 43912 - DNA, 272 bp, Zea mays
  unsure (1)..(272): unsure at all n locations
  Clone ID: MRT4577_140051C.1
caccaccgcncgnngggggcggcgggggaggagaaaaggggagagagaggggaggcgcggngnccgcccgancngcgcngccccgacgcagcngnnacgacccccncagncncagncaggagcaagangggcgccggcggcaggangaccgagaaggagcgggagaagcagggggggggggcccgagcnaccggnggcgccgcgangcagcggncgccggnggagaagccnnccggcacccngggncagaccaagaaggccancccgccaca

SEQ ID NO: 43913 - DNA, 219 bp, Zea mays
  Clone ID: MRT4577_140052C.1
aaacacaggaaacttgttgtcttggtgcccctttttagccacttttttttttacccgcgtttttgggttttttattttacataacccttgtttttttttttttacaaaaggggttacgtttttatgccttttgccaatttacatttgttacccttgattggggatcaaaaaattaatatgctatttcacatttttaaaatgccacgctgttttttttaa

SEQ ID NO: 43914 - DNA, 405 bp, Zea mays
  Clone ID: MRT4577_140053C.1
cccacgcgtccgaaaaaaaaaaaaataaattaaaaaaaaaaaaaaaaaaaaaaaaagaaaagaaaaaaaaaaaaaaaaaaaaaaaaaaaaaaaaaaaaaaaaaaaaaaaaaaaaaaaaaaaaaaaaaaaaaaaaaaaaataaaaaaataaataacaactaaaaacaaaaataatggtacaatgacaactgcatatgaaattacttaaacacataatatctgatgactgaccctcagccaatgactgaaaatttggcaaggctaacacctttaacatcattcctaacaacaccggtgctaacaaagcttttggaaaagtgcttcctaatctgaatggcccgctcactggcatgttctaaaaaattcctactgtggatgtctaaattgaacacctcactttcagaat

SEQ ID NO: 43915 - DNA, 292 bp, Zea mays
  Clone ID: MRT4577_140054C.1
tgctaactcagtgggtggcatccggtaaggcctcttggaaataggtgtcgttcccggttgcaactcgatgtcgaattcaatatcccggtccggtggcattcctagtgattcatcaggaaaaacatctgcatactcgcagaccattggaatcttcttcaaaggtaactctaccatagcaaaagcacatgatcgagtagaatcttggctaggcagaaataaggtgaaactcccacagattggggatttaatttcaacgatgtggctggctacatctagcaccacttggtgtcgg

SEQ ID NO: 43916 - DNA, 289 bp, Zea mays
  Clone ID: MRT4577_140055C.1
cccatgtttacgcgcacacacaggcgtctaaatactcgccttaatccgatcctcaaagcctgcccaaataccatggcttaccaccttcatcgctaccaccgtagatgaacacgatgaacagaagcatgaaggagcacatcgacaaccacattgtccaggctggtatccagctctgaaacccgtactgggtgccgcactgccttgagcgtggcatccaggctgacggacacacgaccgttgacaaaaccattgatggaggtaatacagctttcaacaagattgtcactga

SEQ ID NO: 43917 - DNA, 311 bp, Zea mays
  Clone ID: MRT4577_140056C.1
gggggggcaaacaggggggaaaagggggtggctttggagggcctagagaagaccgatgaactaaacctgccggccttgaaacaggtcccccgtagctttgcaagaacccaaaaaccccgccgtgggaggaaacggccgaggcgcatcccggaggtcatccaaaggcgaacggaagggatccacaactggagattcagtggcctggggagccgccgccttatagaaaatagccacgggtgtgccatcccgccagagggtgggcagcgagacccgtttccccacataatgtgttggaggggccctccatgggg

SEQ ID NO: 43918 - DNA, 650 bp, Zea mays
  Clone ID: MRT4577_140057C.1
aaagctctttgtcatttaattctagaccgaattcgtgggggcgccccacctgcctgcctgcctccgctccttgtccttgctgtgcctagacatctgcttctcctcatctcctctctcgtgcttcgccttttcggagacggtcgtggcgccagcggcgttaaaattcgatttccggcgagcttgtcggaggaaaagttggttttttttttttggttgggattgctcgtggctacaggaaaccgtggcccatttctgcttcttgatttcggtccgtgctgttagtttggcgtgatttttggccactaaactgttggaccgaagattccattttcgtttcttgcaaacaccaaagaagcggtgctagtggggagatttggctacaaggcttggtgtttgcaaacaccaagaagtcaagaaccgaatgcaccggcgctggtgacgagattcgaatccattttgagtgtgagatcaagcacctgtgaactctgaataccggttctaaagacaagattttccattcgaggaactgtcgctgaggggagatgagctcaatggcatcgctgtcagaaagtgagctgacaaaccggggaagcatgtgggagctagatcagaaccttgatcaacccatggatgaggaggcaggcaggctg

SEQ ID NO: 43919 - DNA, 366 bp, Zea mays
  Clone ID: MRT4577_140058C.1
atggccgaacatggtcagcaaacggtcgataccgagttaggactcgggagcaagttttcacaacttgaacatgatcggttggcaaaaaatgatcactgtaactttatacccatctcaaagactatctccacagtgaacgaagtacataaaaatgacaaaactgcaagaagatatagcagagctgcagaggaggctgtcaggagcaccaatgggtcaagggatgcacctgtcggatcaagagctcggcatttgactgatctggatggtgacttgtgggatctggtcaggagagatctccagctaaaggccaccttcctgtacattgacttgaaccgtttgattgcctgcaacgagcgaggagcctag

SEQ ID NO: 43920 - DNA, 191 bp, Zea mays
  unsure (1)..(191): unsure at all n locations
  Clone ID: MRT4577_140059C.1
tttgctaggtttttgcccccaccgcccactgcgcgtgctccttgcnacctcccacccctccactccccggcggttggcgggtgtctcgccnaancgacccaaccggcgcatccgatatggcgaagggcgacgacgcgctggcgcggtcgcgcgctcggtgcgtcccttgtgcctcctgtctcgtcttgtac

SEQ ID NO: 43921 - DNA, 683 bp, Zea mays
  Clone ID: MRT4577_14005C.1
gcggccggccggggcgcagtcttcttcagaattccctgatcacgttccaggcagctgagagcccgcgtactagccggacaggaggcgacagcgacaccgcgagacgtgccatcatgttggaaggaaaggcggtggtggaggacaccgacatgccggcgaagatgcaagcccaggcgatgtcggcggcgtccagggccctggatcgcttcgacgtcctcgactgccggagcatcgcgtcccacatcaagaaggagtttgacgcgatccatggccccggatggcaatgcgtggttggctccggcttcggctgctacatcacgcacagcaaggggagcttcatctacttccgcctggagtcgctcaggttcctcgtcttcaaaggggcggcagcatgatgacaagccccacggctaacatcgcgagttcacgaccaggcaaagcaggtggaggatgggtttttttttcaccggcctttgtggacggcttgcctcgctgtatacgatatcaccatggtaataccaaccagtagattgaaacgttgtgggagattatattggaaacaatggaatttcatcacttgtcaaatagcttttgtgtacgaaatctagatggatgtaaatttgaaatcatttggatttggaaactggtcaattaaaaaaaaaaaaaaaaaacctaaagtccac

SEQ ID NO: 43922 - DNA, 157 bp, Zea mays
  Clone ID: MRT4577_140060C.1
ttccccgtgaatgcaacgtaaatttttttaatagggccaccaaaataaaatccactgcccgtcgtttaaaaacgtggtaactggaaaaaccctggctaaaccaaattaaatcgctttgaagaaaatccccttttcgcaagttggaaaaaaacaaaaa

SEQ ID NO: 43923 - DNA, 398 bp, Zea mays
  Clone ID: MRT4577_140061C.1
gttggttgttgcaatatattcaaatgagaacttttaacggcttagatgatacaggatacatgtgaacggcacttgcacataggtaagccgatcctacgcacgggcgaaacacggtaaatcgagcaatcacgcgcgacacatgaaagggaatcggtttaaaattcaccgagccaggacttcccaacctaccgttacattaggaagctacaaaacaccggcattgacctcggtaacaattatctataaataattaactgcccgccaacccttcaaaagggacaaccgggattcctgaccaaagctacgaagacaaccctgatggaacggagtaaccatcacattggtagaacctggtatacccatagcatagccttcctatcaggcagaattgtacttat

SEQ ID NO: 43924 - DNA, 436 bp, Zea mays
  Clone ID: MRT4577_140062C.1
gcggggtgcatagtcatgtttatgttgtataggcgtaattgtgtaaagcagccaagttattggttacaagtgtaacacgagaaatacacattaataaaaaaaaaacctccagctcgtttgtacagagattgtgcttgaacccagaaccttatgggggaattgcgattggtaatatatctaaaaaaaaaaaaaaaaaaaaaaaaaaaaaaaaaaaaaaaaaaaaaaaaaaaaaaaaaaaaaaaaaaaaaaaaaaaaaaaatttaaaaaaaaaaaaaaaaaaaaaaaaaaaaataatttcccgggggggccgtttaaaggggaaatttcaaaaaaattgggggcggtttttagggaatcgaacttgggtccaaatttggggaaatctatggcaaaagttgtttcctggggaaaatggtattccgttaaaatttcccca

SEQ ID NO: 43925 - DNA, 213 bp, Zea mays
  Clone ID: MRT4577_140063C.1
cacacagcaatccacacaagcacttcactaacgctcgtgcgctgcacacacacataccaagcgtcggcaccagtggctacatactacgacgtccgactactgctcggataaatgcacgtcggtcgccacgtcaggcttcagcgcccactcatcctctgtggatcagaacgtcgtaaagtcgtcattcgatgacgtaaactcggtgtcatggac

SEQ ID NO: 43926 - DNA, 149 bp, Zea mays
  Clone ID: MRT4577_140064C.1
cgtgcatgactggtattttttgaaacaggaacttataaaagaacagaaggaaaaaagacaatggtggaattaaagcaaaacaattatatcaatgatgctattataacaaaggcaggaaaaccattaaggcagaataaaacaaaattttt

SEQ ID NO: 43927 - DNA, 250 bp, Zea mays
  Clone ID: MRT4577_140065C.1
ccggccttgctgccactctccactgagatccagccccgcgtcgcatggattcgtatgtaaaccacactccactccagcactgaacacttgcattgattcagtgggtagctagctagctgaatcacaatgggctcctaccaagatccgaccgaccagaagacaagacatcaccctgacgaccacgaacgcggtccctcccgtccgcaaccacatccaggcgctcactgtggcccctcatggactcatcctg

SEQ ID NO: 43928 - DNA, 226 bp, Zea mays
  Clone ID: MRT4577_140066C.1
tggagggggtcttgaagccgtcgataataaatgtctgggggggagtgcagcagcaaaaatgattgtcatttcatgtggtgtcttgattaaaaaaaaaaaggcgcagtatttggtggtttagctcctggccttagtgtagtgttaggacgagttagacttacacggcgttagtcccggactaacccctctacatgtgcctgttggaagagtcatcattataatagta

SEQ ID NO: 43929 - DNA, 749 bp, Zea mays
  Clone ID: MRT4577_140067C.1
ctggccggggtcgtggtgctcctcgcgcgtagtcacgttcctctgtcttccacctccgtccattgtccctctccctgagtctcttccccagccggccccctgctcggacagcgcccggccgagctctctggtgccgcgcgagcgcgcccctggctccctccgaactcgccccagcgttctgctcggtcgtccatctccctcctcggcgagctccctgccagctccatcgtccccagcgctgactgcccacctcccatggccgcaccctaggatttgcccagagcctgcatccccttgataccggagctctctggcttgcccctctgcgcgccgagcttctccctggtcgcctcttcggctgagcgtcctcctggccggagctccctgctcggttccgtctgccgcgccctaaactttctccccgcgcccggcctcggctcgtcggcgctcggactaaagctcgccctgcacacccatcccctgctctctctctagctcgcggagcttccttctctgctcccatgacgctctctgctcactcggccacggagtcgtcctggcagccacgcccagccaaagcccctttccccgcgagcacctccctgctggccaaagccgtagaatttccttgctgcgcccagccaggccatcccagatctcgcccgcgccttggccttggtcggttccttcacatcccagccgtgggctcgttcctaatcacgtcagagctagcgcgcaggtctccctcg

SEQ ID NO: 43930 - DNA, 1393 bp, Zea mays
  Clone ID: MRT4577_140068C.1
gaaaatcgagataacgagagctagggttttgattccagtactcacgccgcatcctgtcgccttctgcccctccctctcggcaccgcctccgccccctcattctctctcgcgtcatccggcggaggctcgaggaaactgaggccgggagcgccccgaagaatattctccacccagtcgccgacacccctgcgcgcgcgagagtaagtcgcctcccccgccgccagtgctcttcgtgatgatatatttccagatccggtttgtccgacgcagatggtagggctggagaggctgccgatgtgatgcatgaattttgtgttcgtaacgtggattggtgtggggtgggagaggctcctttgccggattggccaggttaccattgtactgttgtagcttggcagttggttgactgtgtgacaactttgagctatgtcatattacgaaagaaggggtggagacaggggtagtggccgtattcaaggaagtggtgggcgaggtggacatgtcctgcgtggaagatcaggattggctccccgaggacttcttggggttaactcccgtccatctgcacgcactattgctaagtcatttagcagaaccaaagacatgacatggcgacctgatctatttagtgatagcatggcggctagtggaatagaaactggtacaaaattgtacatttcaaacttggactatggggtctctaatgaggatataaaggagctgttttcggaagttggtcatttgaaacgctttgctgttcactacgatggttatggccgcccaaatggcactgcagaggtggtgtttacacggaggagcgatgcaattgctgcactgaagcgttataataatgttctacttgatggaaaagctatgaagatagaagtcatcggaaatgacttaggattgcctatgacacctcgtataaatgttgttggggcttctaatggcagagctacaagaacagttgttatgacgcctgagtttagtcaacgtggcagaggttcaagcagtagacctctaagcaacaggtttaacaaccgtggtggtttccaagctggtcgaggccgtggccagttccagagctgggggagaggccgtggtcagttccagagccgggggagaggccgtgcccagttccagggacgagggagaggcaggaagcctgagaagactgcagatgagctggataaagacctggaaagctatcacgcggaggcaatgaaaaccgattgattgcaaggccggtagtgccacaaggttgtggttttatccatcattttctgggagcaacgaacatgctttgtgctttggtttcaggagactagactcttgtagtaaattcgaacaaaagattgccagtttgtagtgtttgcatgaagtttgcaacctg

SEQ ID NO: 43931 - DNA, 872 bp, Zea mays
  Clone ID: MRT4577_140069C.1
cggaagctcggaatgagagtcgagggaacctcgcgcgcgcgctgtgcacccatcttccagcccctccagccaaggaccgagcctcgatccttcctcaccgcgcgttccacgccgacttcgagctggacaccgacgccgacgcccacaccatggaccccgcgggccggtgccaggccaacctcgcggcgtaccacgccgtcgcggtgctcacgtgggaggaggtcctcctccacggcaccaagcactacagcgaggggctcagccgcttctgcgacgccaagatgagcgaggtggtgtcctcgctcggctgggcgcgcgcgcggccgtggcctgagccgctgctgcaggccttcttcctcgccgccaagggcgtgtggggcgtccgcctcctggcgcgctccgtccacccgccgctccccgttgtgcgcgccgagcgaggcgcgcgcttcgacccgcggttcatggaggacgccgcggccagccgggcggggacgctggaaccggccagcgtgaagatgatgatggcgccagggttccacgtctacctggccggcgcgggcgtggtgaaatgcagggtcgtgtgctgctacagcagcaataacggccgcaccgccggccacagagatggcgggagcagcgccaacggcagcgtggggttggggagtagctgtagtggcatgaatgggagtgctacagacgtggttgatagctgtaacaggctaacagcagtagggcagggtagggtagttgcacttgcacaggtagaaagaacacggggattttaacttgttcgttaaaaacacgattactgctgcttgtgtgaatatgggttgaattattaatcacgaacagattctgttaattttgattac

SEQ ID NO: 43932 - DNA, 392 bp, Zea mays
  Clone ID: MRT4577_14006C.1
ggcactcatgtgataaacatacctcgtttcattgtatttctaatgaacttgccgacggtgagccttcaatgttgacaaagattgcatagactttctcggttcatcatggcattgctagacctgacatgcctttgtctctatgaaacttgcgtaagctatctaccaaagggtgttctgtaatgaaagcatctcactcatctacatgggctaatcattattcatgacaacaatgcacctgagggttgcgacttaaatgaccttaaagcattgtgagaactaatgcaccttcatatatagagaatggatagggctactacctgcgcatatgcactcgtaaacaatccattcctagaggatctgtacctgtatagacaagcactagcaatcgaaaa

SEQ ID NO: 43933 - DNA, 310 bp, Zea mays
  Clone ID: MRT4577_140070C.1
agcacgcgttcggaagctgatgggtacgctgcactcgaatgccttggttctaggtatggatcccagacagacgatcagcggtgggccatggcttgcgtgcatgcgcaggtcatagggatcagcgacagcgccatctaggagctgtgatgtcggcatcgagaggctgatagagatcaagctgcgtcgaatggagaagctgcaagacctgcttgtcagcatgctggagctgtgaaacctgatggacacgcctgctgatgagcaacgggggttccagggcatgggctgcaacatttacgcatgcgaggacgag

SEQ ID NO: 43934 - DNA, 1121 bp, Zea mays
  Clone ID: MRT4577_140071C.1
ctcccatggaagttcttctagtctgcttccatagcaagtgcacaagccatttgtctcctggacttttgtgatattggtggagctctttccttctcagctgttaacttaatgcagtacttcatggttttgctatttctcggttataattattgctactcttcctctaaagaccaatgataagtcaatgtggttcgtgatgattggcatgatcatatgaaaagtttgaagagatattcttttataatgacatgttccctcacatgcttggatgtttggcatttttcagtcatttagcagaaccaaagacatgacatggcgacctgatctatttagtgatagcatggcggctagtggaatagaaactggtacaaaattgtacatttcaaacttggactatggggtctctaatgaggatataaaggagctgttttcggaagttggtcatttgaaacgctttgctgttcactacgatggttatggccgcccaaatggcactgcagaggtggtgtttacacggaggagcgatgcaattgctgcactgaagcgttataataatgttctacttgatggaaaagctatgaagatagaagtcatcggaaatgacttaggattgcctatgacacctcgtataaatgttgttggggcttctaatggcagagctacaagaacagttgttatgacgtaagtggtacttaaacatttcatgtatcatgcaattttttattttatttgtagtccagtgataaactgtggtgctatacttacaaagttcattttagcctggaattagttcatttagtgcaagctaattagttcattgaggacaatcttctgtaaactgtcatgttgaatcttcttgttaagttttcaagtactgtagacttgccctacagtcctggctagatcaccgtaaccagctttgtgtgttccctttgtgaaataagacttctacttcatatcagctccatacttcatctaaaggcagtgtgtgagtttccgcctgttttctttatgtatttattttttatctatatttttcttcttacacttttcctatgattcttctatgcagtttttttatcctcttttccttctatcttcatccttttttttttcttttt

SEQ ID NO: 43935 - DNA, 1892 bp, Zea mays
  Clone ID: MRT4577_140072C.1
aaagctggcggactccagtttgatgtgtctaaatcatgatatgctgaagggaagactccatcaatcttcttgccatatatggaaattgcaatgtgccccttattcaacagttctggattccatactcccatggaaggtcttctagtctgcttccatagcaagtgcacaagccatttgtctcctggacttttgtgatattggtggagctctttccttctcaactggtaacttaatgccagacttcatggttttgctatttctcggttataattattgctactcttcctctaaagaccaatgataagtcattggcctcgaggccggccgggcttcctcgtgccgggcttggatctcatcacaagcagaagaaaatcgagataacgagagctagggttttgattccagtactcacgccgcatcctgtctccttctgcccctccctctcggcaccgcctccgccccctcattctctctcgcgtcatccggcggaggctcgaggaaactgaggccgggagcgccccgaagaatattctccacccagtcgccgacacccctgcgcgcgcgagagttaccattgtactgttgtagcttggcagttggttgactgtgtgacaactttgagctatgtcatattacgaaagaaggggtggagacaggggtagtggccgtattcaaggaagtggtgggcgaggtggacatgtcctgcgtggaagatcaggattggctccccgaggacctcttggggttaactcccgtccatctgcacgcactattgctaagtcatttagcagaaccaaagacatgacatggcgacctgatctatttagtgatagcatggcggctagtggaatagaaactggtacaaaattgtacatttcaaacttggactatggggtctctaatgaggatataaaggagctgttttcggaagttggtcatttgaaacgctttgctgttcactacgatggttatggccgcccaaatggcactgcagaggtggtgtttacacggaggagcgatgcaattgctgcactgaagcgttataataatgttctacttgatggaaaagctatgaagatagaagtcatcggaaatgacttaggattgcctatgacacctcgtataaatgttgttggggcttctaatggcagagctacaagaacagttgttatgacgcctgagtttagtcaacgtggcagaggttcaagcagtagacctctaagtaatcccagcaacaggtttaataaccgtggtggtttccaagctggtcgaggccgtggccagttccagagctgggggagaggccgtggtcagttccagagccgggggagaggccgtgcccagttccagggacgagggagaggcaggaagcctgagaagactgcagatgagctggataaagacctggaaagctatcacgcggaggcaatgaaaaccgattgattgcaaggccggtagtgccacaaggttgtggttttatccatcattttctgggagcaacgaacatgctttgtgctttggtttcaggagactagactcttgtagtaaattcgaacaaaagattgccagtttgtagtgtttgcatgaagtttgcaacctgatgtgtttatttttgtatcggttgctttggagattgtgttaatttttaggttcatgcttagaataaccgtaattggccaaaacatgcacccggccctgttcgtcgttgcgacctgcatttgcagcattgtgttatttttagcatattgctgtttgtcggaggttagactcttgtagtaaattcgaacaaaagattttggtacacattttagcatttatccttgtatcggtgctaataaccattttattgttaggttcatgcttagaataggccaaacctgtcactatgtttt

SEQ ID NO: 43936 - DNA, 846 bp, Zea mays
  Clone ID: MRT4577_140073C.1
cggacgcgtgggcggacgcgtggggaacccgcgcgacctctctcccgagtctactgctgtgcccggccagccccctcccctgttttccttcccatctcatcacaagcagaagaaaatcgagataacgagagctagggttttgattccagtactcacgccgcatcctgtctccttctgcccctccctctcggcaccgcctccgccccctcattctctctcgcgtcatccggcggaggctcgaggaaactgaggccgggagcgccccgaagaatattctccacccagtcgccgacacccctgcgcgcgcgagagttaccattgtactgttgtagcttggcagttggttgactgtgtgacaactttgagctatgtcatattacgaaagaaggggtggagacaggggtagtggccgtattcaaggaagtggtgggcgaggtggacatgtcctgcgtggaagatcaggattggctccccgaggacctcttggggttaactcccgtccatctgcacgcactattgctaaggcaaggccaaacctgtcactatgtttttgttcatggtcaggttcctgactaaagtagaaactgaatggggagagcatgcctaagcttacattatatggaggggcaggagtatctgtgatgtctgtgactaatgtgttctctgtcagtattgtttggaggcttggaggggcagatgcaactttggtagaaattttgcagtagatcataaggttgaatttattgaggggcagaagtaaatggtggtcatctctaatgggaattttgttggaacaccaccatttcttcaaacatatggaagaaaaaaaaaaaaaaaaaagcggcc

SEQ ID NO: 43937 - DNA, 185 bp, Zea mays
  Clone ID: MRT4577_140074C.1
acagacggcggccgagacggatgattaaggcggaagggaaggaaacaacggggaccatgggcatgaagcgcaggaccaggacaccaaccacgacgggcgtgagagatgttgccactgaaagtcaccaagccgcggacgtcgaccatgggctatacggggaaatccccaaccccccatggcagagt

SEQ ID NO: 43938 - DNA, 711 bp, Zea mays
  Clone ID: MRT4577_140075C.1
cgatctactacagcaggcacttgcaatgtcaatggagggtggtgcttcaggatctgcagctgtgactgactctgctatggcagaagctggtgcagttgaccctgacttggcattggctcttcaaatgtctgtccaggatgcaaacatgtccagtgacactgatatgagtaaggtgtttgaagacagaacgtttgtgtcatctatccttaattcgcttcctggtgttgatcccaatgatccatctgttaaagatttgctggcatcgttgcacagccagggagagcaagagaagaaggaagacacgtcagacaaaacagaagacgagaagaactgatgtagccatgttcacgcctccatgcgcacaaagaaattgaagaccggtctccattgactgcgtttactctcttggtcgtggagtttgtttatcctcatataaccgtgctttgattataacttaccgccgagggaatttgtattatgacgctgcaacaatcttctctccatatatgttcaagggattttcgtgtttcaatgctctccatatatgttcaattgatattcgtgttacaagttctctttgcactgtttaatttgaagcgacacactatatattattttattttgaagcgacaaacaggaaattcgctctcgtgtaagccgatctggttagttattgtaagcctgttgccctcacaaaaaaaaaaaaaaaaa

SEQ ID NO: 43939 - DNA, 300 bp, Zea mays
  unsure (1)..(300): unsure at all n locations
  Clone ID: MRT4577_140076C.1
atttcggcacgaggcgcgagggtagagcggcgggcaccacaaatctcnggcacctcctcttcaaaattcctatctttccgaaaaccctgactggcaagactatcaccctgaaggagcagccaaactgacaccattgacctcgccaatgccaatatccacaacaaccttgccatgcgggaagacggganactcctttnnctcnttancaaacaccatcacaacaccaacaagcagagcgaccccaacaaggacaacgacagcaccctgcacaatggggaggangccagcgggggcaaacag

SEQ ID NO: 43940 - DNA, 738 bp, Zea mays
  unsure (1)..(738): unsure at all n locations
  Clone ID: MRT4577_140077C.1
tcgaggccnggccggggatcctatactacggcagttctctgaaaaaaaaacttgaatgcatatcccttgctgggcgccgtggagattctttctccccaccgctcatccgcctgagattttattctccagccgccgcgcagtcttcgatcccatctctctctccgatagttttttaccagccgccggtgctttatctcctctgccgctcggcctttgcttcgtccatggctgcgcgcctcgagctcgcctttgctccagctccaacgcggctcctcccatggcgccctgctcggatttcgccatggccgcgccctgctgaggtctcctcccggcgcacgtcctcccagccaagcaatttgccctgttctctgctcgccgtggctcttctccagctccggcgcccggccgagctccctggccgccgcgccttgcgcgccttccctgtcggggcctagccccagctcgtaatgagccatctctgcccgtccgcgcctgctgttcgcccctgctacgcacgtcggcttcctgcgcgctgagctctttggttcgactctgcgttcgcccaagtcgccgccgttctccctgctagcgcgtgcagccgcgcccctactgcttgccgccgcgtgtacactttttcttccgagcagcagctccggtcttgttgtcaacctcacttgctactatgtcgcggcttgcgcacctcctgttcgacgaaaagccagagtgatggacatgctt

SEQ ID NO: 43941 - DNA, 516 bp, Zea mays
  Clone ID: MRT4577_140078C.1
aattcggcacgaggctttttctcgctcgctcgctcccaaatcgtcaaaggaagtttggtggtggtggtggcttcattgcttcaagcagcggccggggggtgaggaggacagacagacaagggggaaggagtgatgcgaggaggaggaggaccgggcgtcggcacgccggggcgcccgcgatggggctccggcgccacgacgccgcggtcgctgagcacgggctcctctccgcgcggctcggaccggagctccgacgacggggaggagctggtcgaggtcacgctggacctgctggaggacgataacattgtgctgcggagcgtcgagccggcggcggccgcggctgctccggctccgccccgccgccacccggaccctaccccgtcctcgtccgcggccccgtcgcgctcgcgctcgcccgcgatgcgccggaccttctcgcaccgactgctgcagttgtcgcaggagctcaagggcaccggcaggcgggccaaggggtgggtggggggacctggc

SEQ ID NO: 43942 - DNA, 495 bp, Zea mays
  Clone ID: MRT4577_140079C.1
accccttaaagagtttaacaaaaaaaaggtttggaagggtgggggggccacaaatttttttattccacattcaaaacactttttagtggggtccgccgctcacatataaaccgacccaggggttaaacggccaaatccaaccgttgttttataagggggggccaaatagacccctacattgggcccattaccccgacagggatttggctcacagccccttttttttttctcccacaccaaaaaacgccgttcttttattaggggggccccgccggcccacgtgggacacgacgtgaacccgaacacaaaagcaggtttttcctagggacttatgccggccccatgccttcttgttgccgtggaagtggacccagcgcggcacacgccagtcccaaggtgacaggttgacccagcgggctaaatcggccgccgtccgggcttgggttggcctaattcgagggacttttcgacgggggcctagggggcaggggccgc

SEQ ID NO: 43943 - DNA, 293 bp, Zea mays
  Clone ID: MRT4577_14007C.1
cggcgagagagattgacgcaggatctgcggcgatcgtcaccgtcggacgctttagggactcctcaacgtccatctcacgatcgacggaggtcacatgtccgtcgaggactatgtcatccctgtcaactgggaagcgggaccctcgacaacggggcccaagtaagctttagagctgaaactactttaagcctacctatgctaactatactagattgcgttggcttccatatagtgcattatacatgcatgcatttggccctgatatcgatttgcgaccacttacctaatacaac

SEQ ID NO: 43944 - DNA, 445 bp, Zea mays
  Clone ID: MRT4577_140080C.1
agaaagaaaaattatgacatttgaatgcaatgattatgtgtcttttgtgatcccttggagcgttattttcatcctgattatgctgatcaaatttaactatgttacttggtttgctgttaacattattctatgaacaaataaactcagtaagattcatagattggaaaacaacatgtattcttctgctaacaagcgtctcatgtaacccacacattagattgtattcctaatatgatcattgtgataatactgagcattattaagaattagtgtgttctagatgttagagaagtgtcgtgtatatgcatggaatgggggagccaataaacaactataatacttttgttgaagcaatcatagtgtttataggatctcttttcagctttcacctagcagaattactgtatctactgtaagcatacttggaatcacattctcggggttg

SEQ ID NO: 43945 - DNA, 293 bp, Zea mays
  Clone ID: MRT4577_140081C.1
tcgctgcaccgtcgtaagctggaccttagacgccgcctttttttttttttttaccgaaacttttttttttcttcagagaggtcgtgtgcacggtttttgaattaattgtgaatccgctgggtgtgctcttgacagtgcatgacgtgatatcacggcaggctgtccggtgccctaatccccgcgaaattaacttgcaacagtgtacactggggagcagacgggctggctaacagttaaaacagagcgtcagcgagggaagggacaaaccccacgtttcacagatgtgacaagag

SEQ ID NO: 43946 - DNA, 393 bp, Zea mays
  Clone ID: MRT4577_140082C.1
cccacgcgtacgcggacgcgtgctctgacgcttgtggtaacatcatagaaaaatgagcatggggatcaattacttttcgatagcaataatgctatctacaaacctccaaaacttattcttttaataataccaatattctattcgtacgtatgccattgtacttccaatatctatatcttctctgtatctaatatagcatgaatcttaattccacttatgtactactccaacttctgtagtctgtaaccacatggatctgcaaggaatactacatgcagtgttaatcatgatcctccttcatttacaatgccaaccttcaataccgcttatgttgacttgatcctgaaacttactgaatatgatttgaagatctggccacatatttatgaatac

SEQ ID NO: 43947 - DNA, 400 bp, Zea mays
  Clone ID: MRT4577_140083C.1
aaaaaaaaaaaaaaaaaaaaaaaaaagacaataaaacaaaaatgacaaaaaaaaaaaaaggaaagaaaaaaaaaaacatacacaaaaaaagaaaaaaacataagtaaaaaatagaggaatgcaactaggtgttcctggccctcagcgtgggcctgctcatcggcccggtgctcgtctgcctcaaggcgtggtacggcaagcccctgtccatctgctgaggagtgaggtggtggacgcctccggtgccaagaggcacgacccgcaagaggaggagatgacaccgtacgcgcgcgaggaagaaattaagaagggagtatttccgtccttttttggcggttgcgctcattattgacaggttcacttccctgccccctttccaccgtttctccccctttttttg

SEQ ID NO: 43948 - DNA, 230 bp, Zea mays
  unsure (1)..(230): unsure at all n locations
  Clone ID: MRT4577_140084C.1
gtggaatcgaccaaggatgtgaagaagcacgaagcgcatccggcggctgcggtcctacagaagcaggactgcatagtagaacgaggacgacgagagcgtctcagacgcgctcgacacgctctcccgcaccgagtcctntgccatgaacagcagcgtcacaggcctcagcggcgctctggacaccggacattgcgccgagccaggcacccgnggcttcatgatggaccggt

SEQ ID NO: 43949 - DNA, 199 bp, Zea mays
  unsure (1)..(199): unsure at all n locations
  Clone ID: MRT4577_140085C.1
ggcaagcaagacaccctccccggcggaagggaacctcgccagccgacaggccgcggaggccagagccggccaaaaccgacgccanggccgaccacgacgacgctgccgggcacacggacggcgacgaggaccaccaaccaacaacaaaccccaacaagacaacgggcaacaaccacaaaaagcaaccggaagaccaacc

SEQ ID NO: 43950 - DNA, 199 bp, Zea mays
  Clone ID: MRT4577_140086C.1
tttacgcctcgcatccgctggctccgctcttgtcggtgcatcccccaactccccccgtgcggccttgtcgttttccagcggcaccgcgcatgcgccactctcgcggcccctcatggctgcctcaaaccacccctgcatcctcgcggcctcggttgatgtcccgtcgctggttagctctgcagcctgtgcgctcgaggct

SEQ ID NO: 43951 - DNA, 126 bp, Zea mays
  Clone ID: MRT4577_140087C.1
aatggggtacataaaacaatttgaaggggttcaacaagggaccatacatcaaacaaaggggaatgactcttttgcacatattattacttaacatctaattatttaaagccaaacttcgagtttaca

SEQ ID NO: 43952 - DNA, 354 bp, Zea mays
  Clone ID: MRT4577_140088C.1
ggcgagcgcactcgccaatgggcagcaagctctctgcgggaggaagcagagcccggtctgctgccttccctatctaccggaacatcatcactgcagacgatggagagaagtacactcagtgctaactaatggctcaagacaacgaatgacgtcgccaccgttgacatcaggaagcatgctcagagccacctgagagaggtggtgatcgtggagctgtcagaaccccgcacgaaggcggccgagggaggatccttccagaacacggagagtgtcagggccaccagcaacttaaactccccgatgtccggcgaggtcctcgaggtcaatggcaaactgtcagagacccccggcctg

SEQ ID NO: 43953 - DNA, 2135 bp, Zea mays
  Clone ID: MRT4577_140089C.1
agacctggacttactgtgactgtgatcataaacgactcgatactagtaggccggggcccctaccggcctacccgaatgcggctggaggcagcccggcccagcacagcagacactccgccacgtcaccgtcgccatggcgctgcaccacctccgcctcgcgccgctcgcgctccttcgcgccgcaagcctcccgcccctcgcctcctcccgtatcgccgcgcgcggccaccgccgcgttctcctctttgcgccgccgtcgtggccgtggcgccttctgtcgcccggtgcgaggccgcgcgcgcttgccaccgctgcggcagaggccgacgatgctacctcgggctcgggcaacgaattcttcgcagagagcacgtcgtgggcttcactcggcgtatccgaacgcctcgcgtccgccctttgcagcgccgggctctcgaggccttcccttgtccaggcaacctgtataccacatgttctcatggcaaatgatgtaattgtcgcagcagagactggtagtggcaaaacccatggttaccttgtacctttgattgaaaagctgtgctcaaaatcttctaccaccaaagatgacaattgtcaggacaccaccccaggagcacatgacatggtgttggtcctttgtcccaatgtcatgctctgcgagcaagttgttcgcatggctaattcattacttgacgagtctggcaaaccacttaaaagagctgctgctgtttgtgggccaaatggctggccagctgttcatccagatattcttgtagccaccccagctgctctattaaactatctatttgactatgaacccggaaatggatcgaggggctcacttcatgcgtaatgtaaaatttgtagtgtttgatgaagcagacatgctactctgtggaagttttgagaaccaggtcgttcgtctcgtgtatatgttgagatttgatgaaaagctactttctagagcacaggattctggaaaggatatatcacttgggagtgatgatgaatatcatgaggattcaaagtttgagactgctgaatttggtagttctgacaaggaaattgaagacaatattgtggaagatagacttgtcaagttggagaatagtcacgttggagcacacaaggactggaggagagttagaaaaatatacagacgcagcaagcagtatgtctttgttgctgccacccttcctcagagtgggaaaaaaactgctggtggtgtgctacaacgtatgtttccggatgctgtatgggttagtggcacttatctgcaccgtcacaaccccagattagaacgaagatggatagaggttactgctgatacacaagttgatgctcttctgaatgcagttaaatatggcctgaagagtgaagttcatgatgctaaagatgttccaagacgcactatggtctttacaaacaccgttgatgctgctaattcagtctctgatatattgcatcgagttggtattccatgtattttgtaccatcgtgagagttccttgaaggagcgggctaacaatttacagtcttttcgggaaaatggtggtgtgcttgtatgcactgatgctgctgcccgtgggcttgatgttccaaatgtttctcatgtcattcaggcagaatttgctgcctgtgctgttgattttttgcacagggtgggccgcacagccagagctggtcaatctggtatagttactagcctatacacagaggcaaatcgtgatcttgtaagagcagttcgtcaagcagaggagttggctcagccagtggagggagcattcagcaggaaaagaagctttcgcaacaaactaaagaagcaagcattacaaaaacgcgaagcactgctatcttgatagcgtgactcactatatttgtagtaaggagaaaatatatgttttttttctctattactgggtgatgaatgtttttgtagtactatatagaaagctgctacatattaaatggaagttgtattcagaccgagtgcgttgaagtaatctgaccaacatgtagtctcttggataattatatccttatggcgttttcgtggtatttttaccgcattattgcaagtgattacaggtatttttgagaaaaaaaaaaaaaaaaaaaagtctgccttcctttct

SEQ ID NO: 43954 - DNA, 335 bp, Zea mays
  Clone ID: MRT4577_14008C.1
gggctcccaacagcggggttttttttttattacacgttggaaccgggggcaaaaaaaaaaatccgatgcccccgggcgtttaccctgggtggttggggaacaaaacaggcagattttttgttaatttacaccacaggacggattttttttttaggggctttttttttatttgaacttagggggggggcaaacatttcgcataacccaacttttggtccatttactcagggggatcacctttttgggttttttaaaacttcctcctgcaaacgggggacaatccccgatccacgagccattttttcacccaagggtgggggaaagggggggaacaa

SEQ ID NO: 43955 - DNA, 471 bp, Zea mays
  Clone ID: MRT4577_140090C.1
ttttcataccgatagcgatgtcagctccattaggggtagcctcagcactgacttgggtgaccctagcaatgctgaatcccttgtcagaggttggagtctgttgcttgttctgagctggtgtgttggaattccccatcggacaagcgattgcatagtgcccaacctgactacacttgaagcatgtggggcctgttctctgtctgcgggccttgccggggcgccagagggggcaacctgaccagtgtggggtgtctgcggagtctcctgagctggactcggccctcctccaagacgagctggagtaccctggggcggaacatatcgaggacgaatactgctgctaccctgaccctgagaacggccttgctatacattctcccagcagaacacgctcgtgctcaatagctagagccttttgctacgagtatctaaactgatggaaaggcgtgagcaaccactgcatactatagt

SEQ ID NO: 43956 - DNA, 1213 bp, Zea mays
  Clone ID: MRT4577_140091C.1
caaactgaaagcacaacatatatgttttttttggcaaatggatgtcatgcaaatttatttgcgcaaatttactcttcctgtccaacttgtttcaccagctgcttactttaatcgtgttaaccatgctttccctttttaaatattcatgtggtaccttagtcccctgtttctaattttacagtgaagttaatacttaatagtatttatctatttgggactacaggtctcaggagatgctacccttcaagttgaccatttcacattttcaccaagcatcgctgacaatatgagaacagcttccttagttatcagccatgcaggttcaggaagcatatttgagacgctgcggctgggcaaaccgcttatcgtcgttgtaaacgaggatctgatggacaatcaccagagcgaactagcagaagaattggctgaaaggaagcacctcttctgcgcacgcccacaaacactgggagagaccatccgggcaatggacctggagacgctggttccttacgagccaggggatgccaagccagtcgtcgccctgatcaacaggtttcttggcttcccagttgcctgacaaataaacgacgagatacctccattaaggcgtcagttcctgtacctgtttgatgtaaaatggattaactggcatatggaaacagcaagactgtcctcgatcgttgcagttgggtttaattggggtggggggcgtcgattcgttgttcttgtcatgcccttgacacgagaaggcaatactgtgtggttggacggcatcactgaagccaatactttatgatcgtgagagggccgaaggagacggaagtcacgtcacccttcttcatagtgatttgaaaagtaccattgaaatgatagccagcaggggccaacgaaaccaagaaagttgtagtaactgacaatgaattcgctgcaattgaatgctagttgccaaatacaatctcccctggttcagctgccatcctcaatgcactatgatgaccagcttatgctaatttttttttttcatatttctgaccattcgtcttttgtaataattatttgtgtagatagacaaacgcatgcatgaaatgcctaataattatttgtgtagatagacaaacgcatgcatgaaatgcctaataacatgcatatattgtaaggaaaatggatcccagtctatttgacttaatgagttttggtgtttggtgctcccacc

SEQ ID NO: 43957 - DNA, 182 bp, Zea mays
  Clone ID: MRT4577_140092C.1
aatgcaccctcaatgggggctgtttttgaaatgggttcctttaacaaggtcaatcatttttgaaagaaaacaacttattgtcacgggaaatccattatatttgaaggtgtcaaacaaaaaacctcacgtagctggggccactgtttcaacaaaccaagctaccaaacattaaaggggtcaca

SEQ ID NO: 43958 - DNA, 172 bp, Zea mays
  unsure (1)..(172): unsure at all n locations
  Clone ID: MRT4577_140094C.1
gttctagatcgcgagcggacaccgnggtgaagagcccttcggctctaagcaaacaaaaacccgtttctaatgtataccggcgcggagaaatgcaaaagcctgggtgtcttatccctagcagcacaacccgtgtatcttgttcggcctggaagccaagagcaccacctagggg

SEQ ID NO: 43959 - DNA, 265 bp, Zea mays
  Clone ID: MRT4577_140095C.1
ccacgcgtccgttgactcgtgggtcgcagcgctctacaccgggttcctcgaagcccgcgccgacgccggcgccagcctcgtctcgctggcgcgcgacaatgacaggtactctaagctcatcatagaggaagatggagtgccggcgttgctcaagctcgtcaaggaggcgcatctggaggggcaggagaactgggcgctcgacatcgggcttctaggccgcgatccggagtgcgtcgcgcagatggtccaagacggggtgtgcttg

SEQ ID NO: 43960 - DNA, 786 bp, Zea mays
  unsure (1)..(786): unsure at all n locations
  Clone ID: MRT4577_140096C.1
tacctcgaggccggccggtgaaaaaaaattactnaaaaaaaaaaagaaaaaanaaaaaatttcacaaaaaaaaaaaaaaaaaaaaaaaaaaaaaaaaaaaaaaatcttccttttcgtcctcttctccagtcgtcccccagtctcagtccaccaccgtcgcagccggaggggagaggacggaaggcaatgccgtgctgccagactgtgctcagtgccgcggcggccgccgccgccagcagaacgccgtcatggctccatcggctgcacgccaaagggggtctatccttcccctcccacctcaacattgacgacctcctctacgggggccgacaggcccaaactccccctccccctccctcgcccctgccaccttcttcttccaatgatcacaacgacctcgtcgttgttgtcagggagtcgcctacaaaggccgccgctaagcccaagccgccgccggcggctcagcgtccgccccgcaacccttcgcgaccaaaccctagctctagcaattcctcgcagccgccgccgcaaccacagcttcagctcgttgccgtgatctccgatgtcttcgcggtcccgtcctccgccccgccgggccccccggcccccaaagccttccgcaagcagtcccggccccgcccgagaactgacgaggaccagccgatctctgcccttcctgcacagcgtccccacaaggacaaaaaggacaagatcgccaaggccaagaagcgccgccgggcggagcgcgccgcggatgccgacggtgagaggtgtacccggaccgat

SEQ ID NO: 43961 - DNA, 448 bp, Zea mays
  Clone ID: MRT4577_140097C.1
tttctttttttttttttttatctcttttttttttttttttttttatttttttttttttttgcggtaaaccaggcgctttgggttccaatccaactgcatccctcggtaatgataatggtgccctgaaaaccaaatccgattgttgggctaaaaaaactctaaacattggcaaaacaggacccggtacgactgccacgaacataaaagtttccagcgctgagcgtaccaggatacaagttccatctaagggtgggccttggcaacactcttaactgtgtgcttttgtttgacggtcacaactgcagaaaaaacccttggcggagttataaagtttataggctggggactctaaagagggatctaacttacataaagcgctttcccttcacccaccggtgaggaggtagaagacctgtctcaccctcttcaggggtgaataatccaccgc

SEQ ID NO: 43962 - DNA, 311 bp, Zea mays
  Clone ID: MRT4577_140098C.1
gcgacgccgccagccagacccgatcccctccctcgctagggttttcgtccccgcgccgccgcgctcccggatcccaccgaaacaaccatggccggcggtgccgagccggggcaagggtatcgtttcatcgggggtgccgtacaagaggacgcctccgatgtggatcaagacagctaccaccgaggtggaggagagggttacccaggctgccaagaaggggcagatgccgccgcagattgaggatctgctccgggaccaagacaggatcccgctatgcaagagcgggaatgggaggaagatcctccgcaccc

SEQ ID NO: 43963 - DNA, 184 bp, Zea mays
  Clone ID: MRT4577_140099C.1
gcaaggtgttaacccgattgcatcacaaggtggggaagcaatagctgtcatgatctgggagagagcagtccatctaaatgtatcaaaggctttagcaaagtctagtttgatcaccaaagctggttgtttgcatttggtacaggtctggatcagctcaagggcttaggcgaagttttccgaaatg

SEQ ID NO: 43964 - DNA, 486 bp, Zea mays
  Clone ID: MRT4577_14009C.1
ctggtgataaagatcgttttcgggagcaaaattgtactcagttaatgcctggagacaaaatctggtgttaatgcgatcaaatgacatgcaaacaaaaaatatagaaaatggccgggtggggaccaaaaaaaaatccttccatgtgcaacctaaatatactactggcaccaactaacagttttgaaccgaacactgctgttgacattctggttgacaccagaacattcatcttcatacggaccaaactgcttgttgatatcacgaacttggcctttacgcttgacaagctagagattgtgctaatacgtgttgttctttggcgggtctttgttcttcttatatctggaacgaggcaaccacctggtcttcaagatctgataccaaagtgtccacttgtcatcggccttaagtctgttcctacaaacggcaacgtgccggatttggagagtacagagcattcttgggaaataggtttcgagacctgtt

SEQ ID NO: 43965 - DNA, 458 bp, Zea mays
  Clone ID: MRT4577_140100C.1
aaccaaaaaaaaagaaaccccccacccacaagggaagcaggtttttttaagggccgaataaaaaagcttaaaaaagaaaacaaccctaaaaaacctactcgggggggggggtcccaaaaaaacgggacccaaaaaaaaaacaacccaaacctgggagccctggacggaaaggccctgggggggggggggagaaacccccttggggggcccggggggacccccggagtgggccttcccccggggggggaaggccgcttaagccttttccaagttttccaccttgccagcccaggccttgggggggccccccgggggggcccggccaaaggaaaaggacagggcccagggcttttgggggccgagcttgttaagggaattaaaataaaggggggcccccccctcgctttggccccgggggggaaaaaacagcgggcccaaaagcggggacggccctttgg

SEQ ID NO: 43966 - DNA, 464 bp, Zea mays
  Clone ID: MRT4577_140101C.1
aaaaaaacccaaaactctattatgaccacgcaaaaattatgggccaaaccccacaaggggggggggggggggtaacgggtataagccatgaaacgaaagaggggggggggtggggggggcctcccaaaaaggaagaaccaggtgaggggggggagggggggggggcccccacaggggcgggggggggagcggggccggggggaccgtgggggggaccacgcgaggggcgcagtccaacaaaaagggggccgctgggcgtggctccgagaatgatcccagtggcccccttggggggcatgcccaccacctcaggccatgaagggttattctccctaccagccgcacccaaaacagcggaactcattttgaatgatggaatatggttctctgtgaattgcttgggatcacctggttgcgggaatgtcaccttagcggagtagtaggggatatttggggacccggtc

SEQ ID NO: 43967 - DNA, 2474 bp, Zea mays
  Clone ID: MRT4577_140102C.1
aattcggcacgaggctgctcagtcgggcaatcctcaccaaattctccatcaaatccaaccaacccctcgccgcctatgccgccgcgggccgcctagggttccggcggccgccgctccctcgccggcgcgatggggaacacctgcatcggtcccagcgccccctcggaccgccacagcttcttcaacaccgtctccctggccgtgctctggcgaaccccggccgccgctgaccccgccgagccttccccgaccgctgaacccagctcatccactccctgctctcccccctccagggcccctaaccctgtcaccatctccgactccgagcacccgccacactccacctccaccgccttaggccccgccgcgccgcccaatcctaacggcaagcccaagcccaagcccaaggtgaagcgcgtgcagagcgccggcctcctcgccggctccgtgctgaagcgcgactccgagcggctcaaggacgtctacaccctgggcaagaagctcgggcaggggcagttcggcaccacctaccagtgcgtcgagaaggcaaccgggaagcacttcgcctgcaagtcaatcgccaagcggaagctcgtcaccgatgaggacgtcgaggacgtgcgccgcgagatccagatcatgcaccccctggccggcccccaacgtcgtatccatcgtgggagcctacgaggacgctgtagccgtgcacctcgtcatggagctgtgcgctggaggggagctgttcgataggatcatacagcgggggcactactctgagaaagccgccgcacagttggcccgggtgatcatcggggttgtcgaagcatgccattcacttggggtgatgcacagagacctcaagcctgagaatttcttgtttgtgaaccaaaaggaggatgcacccttaaaggctatcgatttcgggctctccatcttcttcaaaccaggtgaaatattttctgatgtcgttggaagtccttactatgttgcccctgaggttctgaaaaaacgctatggctgtgaggttgatgtgtggagtgccggtgtaataatttatatcttattgagtggggttcctccgttttgggctgaatctgaacaagggatatttaaacaagttctgaaaggtggtcttgatttttcatccgatccctggcccagcatttcggagagtgcaaaggatttggttaggaagatgctaaatcgtgatcccagaaagagattgactgcacatgatgctctatgtcatccttgggtttgtgtagatggagttgctcctgacaaacctctggattctgctgtcttaaccagattgaaacagttttctgcaatgaataaactaaagaagatggcccttagggtcattgctgaaaatttgtctgaagatgaaattgcaggattgaaagagatgttcaaaatgctggacactgacaatagtgggcagatcacgttggaggaactaaaaattggtttgaagagagttggtgctaacttaaaggactcagaaattacaacactaatggaagcggcagatattgataacagtggttccatcgactatggagagttcctagctgcaactttacatctgaacaaagtcgagcgagaagacaacctcttcgcagcattctcatactttgataaagacggcagcggttatattactcatgatgagctacaaaaagcatgtgaggaattcggtatagaagatgcacacctagaagatatcatccatgacgttgatcaggacaatgatggtcggatcgactacaacgagtttgtaacaatgatgcagaagggaaataacccactagggaaaaaggggcactgccagatgagctttggtcttagagaagcattgaagcttggctaagtggcatgatcaatcctgtgtgaagtgccattcggcttcatatgccaactttagctgatgaaactaagtccgtgaatttgggacgccggtaccaaaggtggagcaagtgcgcgatacgattagctttgggataccaactaagcagtgagcatgcaggaacacattggtgatctttcgtcgttaaccccccatgtacatggcttttttgaggtgggataggaatggcggttgtgtttcccatggccattctttgcacgttatgaagctcagctgcaggatgctcttatatagagagaaatgttagtcacatcacatcgcgtgtccatactgtatagcgaaacttaacatgttgtaatatcggtcggacaatgtgtgcgtgttgtatgttatctttcttagatagatgcgcaggcttagcgttgtcatatatgtattgcaagaatatgcaggctgtatattaatcaaatgatttttttgtgtacatttcagtgcatctagaccaacttaaagtattttatttctgtataataaatgaattgtctttaaaaaatagacaatgttcacctaaaaaaaggaaaaaaaactcgagggggggcccggt

SEQ ID NO: 43968 - DNA, 262 bp, Zea mays
  Clone ID: MRT4577_140103C.1
tcttactcccactctttctccctaaacccctcgtaactgttctaccacactctcactcatactctcagtgccatttctaaaatctcactttcccaacacttatcactaaacatccaacacctcatctcccaatcttaaactctcctaccaaacgcttaaaccctctttaaacttaatccacacaaacgacaaccatacaatatcaaccaatttatacacttcacctccatcacattcactaattaacactacctacataact

SEQ ID NO: 43969 - DNA, 367 bp, Zea mays
  Clone ID: MRT4577_140104C.1
actccaataacaaatattccaataatcacacactccacaacatcactcattataataatttcaattatagcctttctacccatctaaaactcctttattacctcaatcattctattatattctgttcataccaatcctctcttccacaataattccaataccaccaataatattattcttaatcttcatttccatatcttcaatcactactcacatcactccatcaatatattcattcatttttatatttttttatacaaaatatactaattcacatctcttttctaaacttctctttcacctttcttgttttttattttaaacctttatttctactactactattattaaaacatttctcaaattt

SEQ ID NO: 43970 - DNA, 690 bp, Zea mays
  unsure (1)..(690): unsure at all n locations
  Clone ID: MRT4577_140105C.1
cccaacgtcgtatccatcgtgggagcctacgaggacgctgtagccgtgcacctcgtcatggagctgtgcgctggaggggagctgttcgataggatcatacagcgggggcactactctgagaaagccgccgcacagttggcccgggtgatcatcggggttgtcgaagcatgccattcacttggggtgatgcacagagacctcaagcctgagaatttcttgtttgtgaaccaaaaggaggatgcacccttaaaggctatcgatttcgggctctccatcttcttcaaaccagccttgatctgttttgctgggagagaggcgaagatctcctgggtcaatcatgtgaaatattttctgatgtcgttggaagtccttactatgttgcccctgaggttctgaaaaaacactatggctgtgaggttgatgtgtggagtgccggtgtaataatttatatcttattgagtggggttcctccgttttgggctgaatctgaacaagggatatttaaacacgttctgaaaggtggtcttgatttttcatccggtccctggcccagcatttcggagagtgcaaaggatttggttaggaagatgctaaatcgcgatcccagaaagagattgactgcacatgatgctctatgtnatccttgcgttcgtgtagatggagttgctcctgacaaacctctggattctg

SEQ ID NO: 43971 - DNA, 472 bp, Zea mays
  Clone ID: MRT4577_140106C.1
cttgagctaaaggaaactctttcctgaatttgagttattgaaatatcgaactcatatgtagatgttttgaggcagatattgataacagtggttccatcgactatggagagttcctagctgcaactttacatctgaacaaagtcgagcgagaagacaacctcttcgcagcattctcatactttgataaagacggcagcggttatattactcatgatgagctacaaaaagcatgcgaggaattcggtatagaagatgcacacctagaagatatcatccatgacgttgatcaggacaatgatggtcggatcgactacaacgagtttgtaacaatgatgcagaagggaaataacccactagggaaaaaggggcactgccagatgagctttggtcttagagaagcattgaagcttggctaagtggcatgatcaatcctgtgtgaagtgtcattcggcttcatatgccaactttagct

SEQ ID NO: 43972 - DNA, 205 bp, Zea mays
  Clone ID: MRT4577_140107C.1
gctccacttccactaacgatgggctgtggctgtgcgtgagatctaaaggcgattggctgaaacgcctgatgaaaggggtgacccaactaacttggctgcgcgtttggtatgctcttatgaacgtgctggtaaggcgaaatgcctgggaagtgcatacaggactgtcaatgtcacaacagacggtgccgactctcctccaggtggt

SEQ ID NO: 43973 - DNA, 414 bp, Zea mays
  Clone ID: MRT4577_140108C.1
tccagtcttacacctactaattgttacccctaacaacaaaacaacggttccaggggggcattatcccacaactccgggggggccaacagacccaccctggcttgaagagttgagataatatgagaaaaggattgctcatagtggcaaacaagtaaaattgagccaaggtttgccaacatgtgccaaggcttaatgacaaccacactgaacccagcacatgcgcttataggatcatgggtatccatacctagagaataagattctataccctggtgcatacatactgcagccaggttgggacaatgacttatggacattacatataataaaagaaaggttcataacattgggcttcagcgctttttacacctgataccactacgtgttacgacattaaggcttcccactaatatt

SEQ ID NO: 43974 - DNA, 758 bp, Zea mays
  Clone ID: MRT4577_140109C.1
gcctcctcttcctccttgtttctccttgccgtgcttcttgcggtggtctcatggcaggccactgcctatgaccctagccctctgcaagacctctgcgtcgccgacatgaagtcacctgtgcgagttaatggatttccttgcaaggacccaatggccgtcaacccggaagatttcttcaatctagccatgcttgacaaacctagggatactaagaacagcaaggttgggtccaacgtcaccaacattaacgtcatcaattttcctggcctcaacacccttggtatctcgctggcacgcatcgactatggaccattgggcgtgaacacaccacatatacatccccgtgccactgagctccttactgtgcttgagggaactctctaccttggatttgtcacatccaacccaaataggctcttctccagggtggtcaagaagggtgacgtatttgtgttcccgaaggcaatgatccacttccaaatgaatctagcgcatgacaagccagcagctgcgttgtcatcactcagcagccaaaacccaggagttatttctattgccaatgcagtctttggatcaaacccacccatttcggatgatgttttggccacggcgtttcaggtggaaaagaaactgattgattggctccaatctcagttccgggagaataccactactaatatgttgtagtgttacacctataaatagtataaagaataaatgccatgtatgtgtgtgcctgcgagccgcgagtttttcat

SEQ ID NO: 43975 - DNA, 883 bp, Zea mays
  Clone ID: MRT4577_14010C.1
cgttgctgtcgctcatttctcagctgttcaagcttccgttcacatgagttttgcaagttgttgaactccctcccaagtgcccgaataaggtccatgcactgatttgacctttcgtcaatcataaggttccaagccaatagctgctcaccaattgaggatccagcgtacaaccatgaaaacagtgtgtcagtatcaacactctcagagtcaaactttccaccaaaagtttgcccatcaatgatcagttcagaagaatcagaactaagaataaccttctccagtacattgtggttttggggggaactatccctgtcacctagtccatcattctccaggtttctattaattccagaggcctgcactaaatcctgcaagaatttagctactttccacagtgacgatgcctccaagaagcaaatgcaaagcggcgacttgtccaatgagtgattaagcagtagtgacccagatgacaaccccctgagttcctctacagcaaatcgaatcaccctgtttagattgcacactgaaagattatggttcttcacaagaattttgaacaatgaatggatcctttctaaaatttttgccctttcgtcatcatctgatagtggccacgtaccgtcaccttccctcaccaccactccaaagccattacactccccgttgtgtggcgaggcagaggattctgacatgtcagggttgtctttgttactccaattatccgtcggatccgattctttgcccctatctgttccaagattgtcagtttgatcttcctcaaacagtttcagtgctgcagtagcatccaatggactccagttccaaccaatgagcatttctacccagtcagcatcaatctcctgcggcaccatttcctgcagct

SEQ ID NO: 43976 - DNA, 247 bp, Zea mays
  Clone ID: MRT4577_140110C.1
aaactccctacacaaccttataataactatctcttcttcctaaaatatcaaacaattactatttaatttcatacaatccttgaaaacttataaattctcttaattaaactattcttaaatatttcaactaattctattcatcataatcctcaaagattacatactattctagtccaaaaactattatcaaacccttccataaccaaatagattctttccaactaaacaacatattctcatacaaaat

SEQ ID NO: 43977 - DNA, 257 bp, Zea mays
  Clone ID: MRT4577_140111C.1
agctttgggagtgatttgattcctatcattgcgcattagccattaggtgcgcgatctccgtcaacctccttgcctccacagcccacgcatcccctgccgctgcccgctgcctgcgcctacatatctgacaaacgagctccgctctgcaccgtgccgactgccgacagacacggtggtctgccactgccactgccaggcgccgtcctgcggagatggcggcggcgctgaggccgaggctgctcctgctgctcgcggtg

SEQ ID NO: 43978 - DNA, 313 bp, Zea mays
  unsure (1)..(313): unsure at all n locations
  Clone ID: MRT4577_140112C.1
tcgaacggccgcccggggggggacaagnnctttttttttttcttttgtttctctttttgtttcatttgaattgcattcaaaacaccaagaacgtttatttatcggaccatcgctatatgattcatatgggtccataacccacaacaatagtataagagtgtagatgtccggtnctttaacctggcgattattcacattatatagaataggagagagagggatagaggagatttcccaaatatcatgaatcaaccgtagggctggaatggcgagcggaaaccccacaggggttggtgcggtagctgggcagctg

SEQ ID NO: 43979 - DNA, 222 bp, Zea mays
  Clone ID: MRT4577_140113C.1
ctttcaacattgtaagcacaatacatctcggaccatagcacacgacatagcgtgcttccttatacaactacctgggattgtcataaatgaattttaaacatttttccaccatggctaaaaagctcttgtaccaccctttttgatggcttaaacctcaactatgattttttgaagtaaggagtccaattctgtccaaatcttgacagaatttacgtttagcat

SEQ ID NO: 43980 - DNA, 340 bp, Zea mays
  unsure (1)..(340): unsure at all n locations
  Clone ID: MRT4577_140114C.1
tnttttttttttttttttttttttttttttttggtgttttttttttttttttttttttttttaaaaaaacatttttgcatttcccttggtttcatacaagcccaggaacacaaaacagaagttccacggggcacatagaactcaaattttaggcacaaaccgggattttttttcctttttttaaaaaatttaaaaaaaattagaggcccttagtcgctgacagtaaacaaagggggggtagataatgcaacatgggggccaattttgaccacaatttttgcattatacccttattaacatttggctgggaaggacaccacccttttgtaattttggaggc

SEQ ID NO: 43981 - DNA, 590 bp, Zea mays
  Clone ID: MRT4577_140115C.1
aaaaccccccctacacaattttattcatacaagtttatttgcactgggacccctgctgacaacgatcgacgatgttatgcaagggcagtcaaatcctgtcaaaaataattggccccccttgctgaggatgcaacaaaaggacggggtacgggccatgcctttaggaaggggacacccggaactggaagccctggaggatcatgctgggggccattttggcctcaagcaacgcaaatttttggccgatgcaaatccttggcccccaaccaaacggaaaaaaccccggctggtggtccttggtccccttggaaaaccccttgggaaacctttccggcctgaacttgggcgcgtccttgccccaaacgttggggtcgggggggacaacaatcacggggagctccagaatcacccccgcaggggacgggatgcccccgatctgcatgtttttgaacgttttttggttcaagggcaccgccggggggtacagcctgagcacctcgtatagtatcataaacaccgttttgagccgactgatgcccgtcaaaatcggggcgcttgtccctgccaaaaacccttaaaacctcctccct

SEQ ID NO: 43982 - DNA, 373 bp, Zea mays
  Clone ID: MRT4577_140116C.1
atggcagtaactgggtatatatacgtaccctctttctcctataatatagtgtagtttaaagttcttctatatatagattaagagcgaacaaaaaaatgcatatgctctcactttacttcctaataggatgctaacgtcaacataattaatgttgatttgttgataaatggtactctctctgtttcaaaatagtatttattttagctcttagtttttatgtctatgtttaatggatgatgataaatcaagactcatatataaaacatatacatgaagtattatatgaatccactaattttctaaaacataatttaattaggacagagggagtaagtagcatatagtacctaccaaacttatgttattatttaat

SEQ ID NO: 43983 - DNA, 349 bp, Zea mays
  Clone ID: MRT4577_140117C.1
cactttatttgtttgtttcttattttgttttcttactttctttttttctattttttttttttaacccacaagccccaaaaagctaatctacaggccccattattacggagcggctctgaaacaggtgggaccgggaggggaaacaaaagggcaaaaaagggccaaactcacaatgaacctggcaacccaaaggcaccccccccccatattgattttgggcaaacacactcccgacccatcaatgaaaagctgggggaaaaaacccctactgggttttaaacatggggaggatacaggcataacacccgttggttatagccccactcgttgttatacccaggaccgaacc

SEQ ID NO: 43984 - DNA, 593 bp, Zea mays
  Clone ID: MRT4577_140118C.1
gggtaccccgggccctccctcgagtttttttttttttttttttttttttttttttttttttggttttttttttttttttttttttttttttttttttttttttttttttttgggccaaaaaacaagtttccttttgaaaaaaattggacaatggccccccaaggggttttaacccgggaaggcccccctgaaaaaacgggaattaaaaggagcttttttttccggaaaaacccttgagggggccccagttgcagcaaaaaaacgggaacccaaacccccaagggcggggggctgaaccaggcaactttaaaattcgttttctcgctcacggggcgaagggaaacttcccttgttttgaaaaacaccaggttatgagggggggacccgacgggagtttaaagtttcctaagctttagttttaccccctaaatttttttttttttaaaaaaagaatcccagccctttggagaaatccctattttccaaaaaaaattaaaaaagggtccggaacctttttccacgctgtttatccaaaaacatgcaagggagttcccagtttctgaaggggggaaggcaaaccctggggccgaatt

SEQ ID NO: 43985 - DNA, 507 bp, Zea mays
  unsure (1)..(507): unsure at all n locations
  Clone ID: MRT4577_140119C.1
gggtcgactccacgccgtccgaacctgcacacaactgtattgatccatgtctatatgcggcagcagcacgaggttggagtgtgccgacgccattttcaatcttgccgatgcgcgtatagtactcgttacctggtagatacgcttactttgtnncattcattcaganntctcaacacacnnacgtcgnngtctcctggttcaaatttgattcaaattcttttaccatttaatcgatgcaatgcgaattatttggagaaatttcgaaaannaaaaaaannaaaaaaaaaagggggcggcccgcttcttagagnngatccannngcttacgtacccgcgtgnncatgcgacngtnncatagcttcgttcttatangnntgtcacncnntaaatgtcaaaattcacnttgggccgnntcgttttaccaaacgtcnnngtgactgggggaaaacgccgtgtgcgttaccccaactttttaatcgccttggcagcacaaatccccctttttcg

SEQ ID NO: 43986 - DNA, 526 bp, Zea mays
  Clone ID: MRT4577_14011C.1
ttttttttttttttttttttttttttttttttttttttttttttttttttttttttttttttttttttttttttttttttttttttttttttttccaaaaaaaacaggggccccctttccggttgctttaaatgttttttatgggggggggggggggcctcaccaagtccctaatttttgggggggcccgggggttgtttactcaccccccgtttccaattttttccgcgtcaagctcttgtttggcttttttcctcccgggcgggccccgccccgaacccaaaaaaaccacatgaaaaaccgaaacctactgggcttgcttttttcccgggttcttccgggtttgaatcgcattttctttttacctcccccctttgaaaactcaaaaccggcccccttgccgtttacctcagcccccctgtggaattccctttccctttatttctccttttttcgggggcccccagatttttggctggagtgccctttccctttctctattttgacccgtgggtaaataaccctt

SEQ ID NO: 43987 - DNA, 1292 bp, Zea mays
  Clone ID: MRT4577_140120C.1
cctccgcgtccgggcagcagcagcgggcgggcgcggagcaaaacccgccgctctcatctcgccaaacccccaagaagccgcagggggacggaactccctccccagctttttccccagaggaagcaaccgcagaggaggagaagctgcgcagaaggggaagcggcggcggcggcggcggcggcgtgtaggctgcgcagagagagagagagagagaggccggcagggagggagcgtaagctttttggcagtggtggttctggaatgcagcagcaacacctgatgcagatgaaccagaacatgatggggggctacacctctcctgccgccgtgaccaccgatctcatccagcagtacctggacgagaacaagcagctgatcctggccatcctcgacaaccagaacaatggcaaggcggaggagtgcgaacggcaccaagctaagctccagcacaacctcatgtacctggccgccatcgctgacagccagccgccacagaccgcgccactatcacagtacccgtccaacctgatgatgcagccgggccctcggtacatgccaccgcagtccgggcagatgatgaacccgcagtcgctgatggcggcgcggtcctccatgatgtacgcgcacccgtccctgtcgccactccagcagcagcaggcggcgcacggacagctgggtatggctccagggggcggcggtggcggcacgaccagcgggttcagcatcctccacggcgaggccagcatgggcggtggtggtgctggcgcaggcgccggcaacaacatgatgaacgccggcatgttctcgggctttggccgcagcggcagtggcgccaaggaagggtcgacctctctgtcggttgacgtccggggtggaaccagctccggcgcgcagagcggggacggcgagtacctcaaagtcggcaccgaggaagaaggcagttagttaagacgctgtaagactggcatcggctcgggcacaccggcatgtcatagcagcaggattagcaggtagctttgaggaacgaggagggtagtagtgtagtgtaatggtagcactagctagctagtatgtggccggtaaggaggtaggtttgttccatggaacctggaggtggtagtgaccagcatgcatgcatgcgtgcatggtcacttgttttggatgtatttgcaggttctctcccaaatgtagtatgaaacgttgctggtgacctgtttgcgcgaacactctatgcagtgttgatgatctttaacctcgaaaaaaaaaaaaaaaaaaaaaaaaaaaccaccccc

SEQ ID NO: 43988 - DNA, 670 bp, Zea mays
  unsure (1)..(670): unsure at all n locations
  Clone ID: MRT4577_140121C.1
ccgggnnnnnnnnnnnnnnaaaaaaaaaaaagaaaaaatagagaccgaaaggacaccacctcgacctcacgaccaatctcacgatcacaaccgtcgcaatgtctaccgccgagctcgcctcctcctacgccgctctcatcctcgctgatgacggtgtcgacatcactgccgacaagctccagtctcttatcaaggccgcaaaggtcgaggacgtcgagcccatctggacctcccttttcgccaaggctcttgagggcaaggatgtcaaggacctgctcctgaacgttggctcaggtggcggcgctgctgcccctgctgccgctggtggtgctgccgccgctggcggtgccggtgacgccgcaccagcagccgaggagaagaaggaagaggagaaggaggagtccgacgaggacatgggcttcggtcttttcgactaagcgtcttctttctcttcctttcttcgacatttgcctttatcggggttgtacaacggattcatcagcgggcatatccccattgctggggtagaaatagtcacgacctctccgtgaccacggttttgcacacgggccctccccggaagaaacaaagacggcgtcatgagatatgttaggtcggcaggtcaatgaatacttcgaaaagcaaaaaaaaaaaaaaaaaaaaagcggcc

SEQ ID NO: 43989 - DNA, 265 bp, Zea mays
  unsure (1)..(265): unsure at all n locations
  Clone ID: MRT4577_140122C.1
ccagcccgggccgagcggccgccaggcagagcgggagggcaaacaaaanaacaaaacagaacaggccaggccgaagaagagaaagaggccaacggaacggccccagcacacggccaagccgacccacagggacgaaggaaacccggcagcaagcgcgcacacgcgcggcacccgaaagggaancgggccaagaagccccgagccgggacgnggcggcagacggcgaacgcaggaagaccggagacgccggcgggggccacgggaa

SEQ ID NO: 43990 - DNA, 375 bp, Zea mays
  Clone ID: MRT4577_140123C.1
tcgacggtatcgataagcttcaactgttgctccctcacacgcgcggttccagccctttccacgtcaccacacgaacgacctcttttgtacgatggtttcacctgcaacaaacatgcaacaaggaaagcaagcaaaggaaaaacaacaaaaattacagagattaaaaatgtttataatttttttttctgtgattttagctatataaagccgattgattcatttgtaaaaggattcacacatagtatcaataaaaaagaaagaattctaaaacaaaaatcagaaagttttgaaaaagtgggctgagtttttttttcttttcgattatattcttttacgatcgatttgatccttttatttgtttgattattcattgag

SEQ ID NO: 43991 - DNA, 407 bp, Zea mays
  Clone ID: MRT4577_140124C.1
cgctctcgttgtatcgaatcacatacactttatacactcttactgaacttccagtacgagattaatacgactgatcacacccaacacacttggctcacgtgcaatgcatgtaatgtgactcagaagctgatgatgacaaatgaagcatgcttgtttggcgcgtgatcaaacgctgtgtacattccttaatgtttacgccagcctaacgcatcgttccaatagatccacaagtacccaaagagctcgcagatgatcatgcgtaagatcagctcgaagaaactggtcctaatgatcaggctagactactagacctacctcagatccaatatcctgatgcatcatttatctgctcaaggcctctgttgcctagcttgtagtgatgttggacgactctaacatgtgctaca

SEQ ID NO: 43992 - DNA, 268 bp, Zea mays
  Clone ID: MRT4577_140125C.1
gcagggcctcttgaggactcctgaaactgttgcgaaatttcagagtgttcctgtgcaagctgggcaaacacccccactcttgcagtactttggcacattgctaactcgagggaagctcaatgcctttgagtctcttgagctatctcgacttgttgtcaatcagaacaaaaagaaccttctggaaaactggttggctgaagacaaactggagtgcagtgaagaactaggagatcttgtcaagactgtggacaatgatcttgcactgaaa

SEQ ID NO: 43993 - DNA, 363 bp, Zea mays
  Clone ID: MRT4577_140126C.1
agccatcctttcttcaatcgcaccaacatcctattatcctccgccctccagatgggggtgggtcaggatcctctatgtcgcgactaattcctgattgttttattcacttaaaatgagctctataacagcttcctgaaccatttccagggaacaccttatcatcgcacgccctactcatgtgtgcattcatgctacatcctccgactacctttcttagaactactgcctctcttacacacctgtgaacttcattaatattgattacacatcccccttacatcagcaccctccttttaaaagtaactattcctacaattacattaaatatatacattcagactctcactgattgtttggatccac

SEQ ID NO: 43994 - DNA, 470 bp, Zea mays
  unsure (1)..(470): unsure at all n locations
  Clone ID: MRT4577_140127C.1
gcggngttttttttttttttttttttttttttttttanannnttttttttttaaaaaggaggggggatgatttaatatgtgcaccatgggcaccatatttgtcctcaataaaaaaacggtcacacgggtcacttggagtagccatgaagccatgactgactttcatattattattatgacatacacagattgatgaggatgacagcatctggaatggaaagcgccgttccttcaaagttcgaagcagataaaaatttagnnnnaggacagggactcgccaggcccgagtttagtttgactggggggggccttcaagaacagacagcgacagggccacggtcacgggaggggtctccacgggggtcggtcaccactcaccatcctttctggccgcctagggagagagggcggcttgctttataggaaaaaaattgtgattgtcataaatgattctgactgctgagctctta

SEQ ID NO: 43995 - DNA, 181 bp, Zea mays
  unsure (1)..(181): unsure at all n locations
  Clone ID: MRT4577_140128C.1
aacttattttttacagcggccgcccctttaattggggaggtgttcttacaaacgaggcaggtttccctataatgagtcntattaaatcttagcgtaatcatgatcatagctaatatctgtattaaattgttatcctatcataatttcacataatatactatccaaaatcataaattgttta

SEQ ID NO: 43996 - DNA, 521 bp, Zea mays
  Clone ID: MRT4577_14012C.1
ggtggttcaaaattgtttccattcctcgaatccttgtctcaaaagaatggccgacatggaccggaccaacgccacaaccattggtccggaccgcccatgcccccacacacaagggggggggacggttttttttcatccccccacccccaacaatacagccccggttttacgcaccaacaaacaaaccaaaaaaaatatttcatcatcatgcacgaaccaatccaatagtatagaatgaacacaatgcggtcgcggcagcccggagcgcgcactcctcggccggcgtcggaaagcgcttgcggtcgtcgcaatagttggagacgaggaggttccttgccacccaggcggtgcccaggcactgggcggcgtgcaacgcccacgcggggggctggtcccaccagctgggccccgtgccggcggcgcacgccggcgtaggcggggaccgggcgcccccggcgggccggggcggccaggcacaggcttcgccggcaaagtcatggtaggacgacacaaacggggcc

SEQ ID NO: 43997 - DNA, 379 bp, Zea mays
  unsure (1)..(379): unsure at all n locations
  Clone ID: MRT4577_140130C.1
tggtctatcaccagcattaaccacaccaatnttccgcraaacratgrgaaarggnaataatttktaantnatcacagntttcacgarcaaaactncatnagnttccttatttcttctgaaactnaccaagaaccakggcctagasgttarttgcaagggrctggtaraactttkccancmaacaagntnataaaagggaaggnaagggtgcatgtactcctcattttgganccgaactttccacttaccgnactcatgarntgagngcggattcagaacntttccatgggagtgccatktgtcaatgggngattaaatwgatctttttcaacggsaagsgtttatagcttttcatgagtgagaccgagctacgagcctg

SEQ ID NO: 43998 - DNA, 565 bp, Zea mays
  Clone ID: MRT4577_140131C.1
ggtaccctcgggttcggccgggtccttgtgggtaaaaaaagagaggaccctgccttgatgccccagacggcggtgtctacgacggcggggaggacgtccggctcggacggcgactcgtgggcggacacgcacaggcgcgagaagggccggctgtccaaccgggagacgccgcgtgaggctgggctccggaagcagcacaacctggacgagctggagcaggaggtggcgcgcctgtaggctgacaacgcgcgcgtgggggcccgcgccaccgacatcgcgtactatgacacccgggtcaagcaggacaacaccgtgctccgcacccgcgccgacgagctcatcgatcgtgttcaattcgtacatgaggtgctcaacctaggcgaggaactgagcgacgaagacgtggacagatatgaacgcgatgaccggacgacgacccggttgtgcatacctggtacgaggagtacccggatgtcatgatgcccatgtgagctgaggacatgcgtcactacggtagattgcctctagaaaccacaccaccgtacatcggaggctactagctgca

SEQ ID NO: 43999 - DNA, 797 bp, Zea mays
  unsure (1)..(797): unsure at all n locations
  Clone ID: MRT4577_140132C.1
ccggccgggaccatacccgtccccgccgcccggtggggtgccgaggcgcgagcgcgacctgccgcagcaggcctgacctcgcgtatctctcaggagtcaggactcctgaagatcagtttcgtgccttacctcgagagcgcctcctgaaggaagctcgtgcatcacaaaagcaagaaggcttggtgttcctactcctgtactttatgctgtggatccacttctgcatactttgacagtatgtggatggcttgtctgtcaaggatatacttcttggttttggttcagatggggttaacgaggaacgcctggatgatattagtatcacacagataggaaacgtcgtcggcaaactacatgatggaggccttgttcatggtgatttagaactgtaacaattaattggtggttcttattgatttcggtctgagttttatataaataattcccgagggcgaggacaaagcggtggacctatatgtgctagagagagctttgatctccatgcattcgtcccgtggggatgtggtgaggagactgcataaattggcatccaagttgtcttttgctgattatatgcatacattgattcctttattcggtgactttattttggggaggccaatgacgtatacgggttacggttacataagcagccaacaatattggattcatcagtaattgaaatgtctggtcaatatttgggtttgcttgagcttggctgntattccgcacttgggtccgactaatctgtgcccatggttttctgcctatatacaacacaaaactagtccatcccc

SEQ ID NO: 44000 - DNA, 152 bp, Zea mays
  Clone ID: MRT4577_140133C.1
cacttatttcatgtgtcttatgaaggagtgagtgcccattacagtgttctcataagactactgtggtttcaaccatctaaattatactcagataattgtccgtccttttcatggtaggcgaattttcatgttttattttattaatgcaattt

SEQ ID NO: 44001 - DNA, 1617 bp, Zea mays
  Clone ID: MRT4577_140134C.1
caattcggaactaggatgcacacagcattaaactacaaatgttatacacggtgatctgcacatgtatgcagatcgctacagagcataaagttcaaaacatgcacggaagctactatgctagtttgctactgcacatacaaggaaacgaatgtaagaaacagaaaccagttctaacgcagctctcttgactcggacctatcagcctgcctatcgtcatccctgccaccatgtctgccatcaggcctatcatggttcctttcattatccgaaggctgcctatcaaactgtcgaccatttctctcattgtgattctcatatcgcctctcgttgcctgaattctgcctatcgtaatgccgatcagtcctggatggatatccctctgtgtttgttgaatgggagaatctgctatgtccccttgaccccccatcgccaccagagcgtgacttccatgaccttccgcctgagtcaccaccactaaaagcaccgcggtgtccagagtgcctgcccccattctctctctgttgattattccaattaggattaccatttggtgcgttccagttcatgttgttatttgcctgacctggatttccctgcacaggagcactccagccaacattttggttcatgtttccagcttgttggtttccccaggcaggataagaatttgcacttcctgctgcaacaccaccccaaggggccattgggactccttgcatctgacctcccatcataggagccgcatttggagtcccctggccttgagttgcagcccagatcatgttcatgctggtgtttcctggatttggtaaccagcccatgtttggaactgcatttggctgcgtcggcatggctacacccatgttgtagcctgaagcaccttgagctgatgctacccaaggcatattcatattgctctgtcccaccattccccaacctaagcttgcgtcaccctgaggtgtatttccccaggttagatttccagttatctgagactggccaggtgtgttcgccatttgtgcaggtacagcccacccactgctttgattatcactgcgagcagtggttgtcaatgaaggctgtactgatgcagcagatggtgctgacatcatctgtgatggcatcattgacttggagagatcaattgatgacatatggtttcttgtgttttcaagttgctgagcgtttagttgcactggtccaagctgtgcatcctgtggtcccatagcttcagccgaagacctcactcttccatgtgaaacatcttctcctgatttggattcaattccatcagctaatctgtcatccgtttgcggtaaagaagacaacatttggttctgggaagtcaaatctgaattaaccatttctgcatttgcagttgcaggagccattccagtagttaaatgacccatattttctgcagccgcaatattttgtcctgaaaggctttgcatggcaggctgggtaggtgtcaaaggacttattgcaaccccaaactgacttgacgtggcattccaactcccagtaagagattgctggcttgtgtatgctgcatgggaattttgcattccataataaccttgtgagccagaatggatcatggttgttccaaggttc

SEQ ID NO: 44002 - DNA, 471 bp, Zea mays
  Clone ID: MRT4577_140135C.1
ctaccaaattgaattttgcagtgcacttgagattcttacaggtgcaaggccggcagaaagcaatcaagcggtctaacaccatgcatgcatctaaaggatgaaccaacaatagggacagcatcaccgaggcacgtccattaattatataccacccacaggccgtgcagctgcatgcaacaagaccgtgctgagtagcgaaataccttggcggggggcatggggacccaaatggccgaggcctgcttctccgccaaaacgaacaccggtcgtggggaacacctatggcagcgccggcgacgccataggctgccacgtccgccgaatcccttgcgaccatcctagggaggcgtacatggtcggcgggcccaacctcacgtgcagctaccgcagcaggctcatgcctacgggcgacaaagtcgaacctgaccacgatgaaggtgccacctcctaagggctcaacacccgtcactg

SEQ ID NO: 44003 - DNA, 170 bp, Zea mays
  Clone ID: MRT4577_140136C.1
tcttccacgcggacgcggacacgaggcagggcgaaatcataaacgaagagaccgggacaaacacgagaggcccgcccgagaggacgacaaccggcaacagcgagaaaaaaagaatggcaccccagcaagcggcaccacagcaagaacacgacaggaacaaacggaagaca

SEQ ID NO: 44004 - DNA, 343 bp, Zea mays
  Clone ID: MRT4577_140137C.1
cggctcgaggctcttctgtcacgatgtctggcgttagtaaagcttgttgctctattccacctgttatttcaaagggatatgaagcgaagggcgagtataagaccattggtggattaaagacttatgtcaccggtcccgccgatgctactcgtgccattttggtcatctacgatatctttggtttcttcccccaaactattcaaggtgccgacatactcgccacagtcgacaaggacaagaagtaccgcgtctacatgcccgacttcttccaaggcgaatacgtcgatatctcctggtacccacccactaccgacgaacaaaaacagaaagtcggcaaattctt

SEQ ID NO: 44005 - DNA, 416 bp, Zea mays
  Clone ID: MRT4577_140138C.1
aacccggggggcgggcaaataaaacttgcccacttccacgttgggggatcccaatggacgaggggtgcactcaacccctttcaagggatccaatgatcaacttggatccccccacttttttacttataggctttttcccatttgcgaggaattttcacaagggggagcctttcgcccttacaataaagatcttaaagaatgcacaagagtaagggttggagagcaacacacacaaattccgagcacacacccacacaagccaagacttgggctttaaacctagcacaaagaggtcacaacttgaacgaagctcaaatcactaacacaattgataaaatgcgcggagaccgagggggggagtcttaaaatgcttaaggaatgcttgggggttttttccagcccctagggggcccttt

SEQ ID NO: 44006 - DNA, 361 bp, Zea mays
  Clone ID: MRT4577_140139C.1
ctgtgtgtgtttttttccttttgctttgttccagtgccattcaggcagagccacagtgcaccgcatacacaggaacgaatacgcggggggagaggggagcaacctggtcccgtatgcgagagtagggctgggcgactggagggggcactacacagggcagacgctggaagggcaggacgtgctaggccgggctgggggatacggcggcgcccgcgacggggaggcatctactggcgcctaggggactacggcgaaggcgtcgacgaaacccccgacaaggaagtcgggggacaagacctgcacatagacgccgaggcccttggggaaggcctcgcggctgaagaggcgcgcgccgccgcgg

SEQ ID NO: 44007 - DNA, 767 bp, Zea mays
  Clone ID: MRT4577_14013C.1
cttttctcctccagtctcatcacactcgaccgacgcccccgccgtgcgttttcaccgttgcttttcttctcccgctctctcctcgtgcgcgcgcgcgtcgtctctcctctctcgtgccgacacctgcgcgaccgccgccccgccgccgctctacgctgggtacccactacccaggtctccgaagggcgcttcgcggcgacgagcaccaccaccaggatgtccaacgtgaccgtgtgcgtgcggttccgaccgctgagccacaaggagaggaaggccaacggcgacaacgtctgcttcaagaggctggactcggagtcttttgttctcaaggatgagagggaagaggatgtcgtattcagtttcgacaaggtgttctatgaagatgcccaacagtctgacgtgtacaacttccttgcagtccccattgtttcagatgccatcaatggaataaatgggactataattacttacggtcagactggggcaggaaagacgtacagcatggagggcccaagcatattgcattgcaatgaacagaaaactggactagtacagcgagttgtggatgagctttttatatgtttaggatcatcagcaagcacgtggactgtgaagttgtcaatggtaacataccagcctcatgctgattcagaatccacattgatagtttctccctccttagttgttagggtttgctgaagctgaatagtaaaataagttatttaccatgtcctcaagtggagatatatttggaaaagggacctttc

SEQ ID NO: 44008 - DNA, 664 bp, Zea mays
  unsure (1)..(664): unsure at all n locations
  Clone ID: MRT4577_140140C.1
ttcttctcatcgaggccgccgccgccgtcgttcttcgttgacccggcgcacggggatccgcctggagctgccggcggcgggatcggtgtcgccgagtttctcggcgccaagaacttcctcatcaccggcgggaccggtttcctggcaaaagttcttatcgagaagattttgaggacaaatcctgacgtcggcaaggtgtacgtgctcatcaaggccaaggacagcgaagcagcgttggcgagattgcgaaacgaggtcgtggacacggagctgttcaaatgcctgcaggacatccacggggaaggctacgacggcttcatcgcaaggaagctggtccccgtcgtcggcgacgtcagggaagccaacgtcggcatcgcgcccgacctcgccgacgagatcgccgaccaggtggacgtcatcatcaactcagcggccaacaccacgttcgacgagcggtacgacgtcgccatggacatcaacaccgtggggccgttccggatcatgagcttcgcgcagcgcttccgacgcctcaagctcttcttgcaagtgtctacagcctacgtgaatgggcagaggcaaggcctggtgctggagaagccgtttcgcatgggagacacaatagccaaggagctgccggngtggtcttcttctccagggcacaaga

SEQ ID NO: 44009 - DNA, 538 bp, Zea mays
  Clone ID: MRT4577_140141C.1
cttgcaagatcgtggttgagaaatgactaccaactttggggttaggccattcggccagcacctgggaaaagccacacgggttactttccgcaaaatgccaggattcctcttctgactaaaacacacgtgatgtctttatctaatatcacaagacatctgtcgggtagggtacaaacagacaacgatcaacggagcacactgaagatggtagatggggagcacacctgagcacagaagttggtgccaccacctgagaagaacagttcaggcaacatgctgaaaagcacacaaatgggaacaacgtgccacgcccaccaaagggaccaacggtctggggcacaaaacggacggaacggagtgagatcataacgcacgtaagcggggaggcgcgatctgctacgatcgccgcaagggaagatcggctcacagtgccgaaagggaagagtcgatcatagctcgaagaccgaagcctcgaccttttcttgaaacccgaggcataggctatttgctacaacaccgcacgaaagctatgtgctat

SEQ ID NO: 44010 - DNA, 795 bp, Zea mays
  unsure (1)..(795): unsure at all n locations
  Clone ID: MRT4577_140142C.1
ttgaccgcccagtgcatgcacgcccgatactgctagccaaggccaagccagtgcaggcgcggtggtgtgtgttgttctcgtcgcgcactcgccggcagcgatggagccccgccgctccgtgctggtcctggccctcgccgtcgccgccgcgctctccgtcgcagtggcttacgacccgttggacccgaacgggaacattaccatcaagtgggacatcatgtcatggacgcccgacggctatgtcgcggtggtgaccatcaacaacttccagacgtaccggcagatcacggcgccggggtggacggtggggtggacgtgggcgaagcgggaggtgatctggtccatggtgggcgcgcaggccacggagcagggcgactgctcccgcttcaaggccaacatcccgcactgctgcaagcgcaccccggccgtcgtcgacctcctccccggcgtgccctacaaccagcagatcgccaactgctgccgcggcggcgtcgtcagcgcctacggccaggacccggccaccgccgtcgccgcgttccaggtcagcgtcggccaggccggcaccaccaaccgcaccgtcaaggtgcccaagaacttcacgctgctggggacggggccaggatacacctgcggccccgggcaaggtcgtcccctccaccatcttcctcacgcccgaccgccgacgcaagacacaagccctcatgacgtgggacgtgacgtgcacctactcgcagcacctggcgntcaagtacccctcctgctgcgtctccttctcctcctctacacgacaccatc

SEQ ID NO: 44011 - DNA, 399 bp, Zea mays
  Clone ID: MRT4577_140143C.1
gcggccgcccgggcgggtactccagcgccaatgcggttgttctgttagaccgaagatctggctggaatgatttacgcctgagagcaatgcctatacctgagatcaacactaagaacctctctgttgctcatacagacgggtgcacagagggtatggtagatgacaccgactttctcaaggaactcatctcaaagcgagcgatacctacgagctgcctttggaaggaatactgctctgtccttaaggcactatgatgtggtcggtgctgacctgccctcgtgaacctattagaccaaatggtgctacaaaaggagggcttgtgccatcgaggctagtttatcttctatgttaccagagcctgcgacactccgttagctttgccctgaattaatctaatat

SEQ ID NO: 44012 - DNA, 214 bp, Zea mays
  unsure (1)..(214): unsure at all n locations
  Clone ID: MRT4577_140144C.1
gtgagtcgtattataaangacgcgaaacaaacatcaacaagaaaaaaacatgcaaaaaaacaaaagaaattcagtggaggaccacaccaacggctaaaaaactgtggtacgcgagtcggcgcagcaataactcgtccaaacggtcctccatctacatctcgcaggccgtcgatatgtagcgctccaactgggagtccgcggccttttcccacgg

SEQ ID NO: 44013 - DNA, 394 bp, Zea mays
  Clone ID: MRT4577_140145C.1
gacgacttgtttcattgattcttgaagagtatcgagcttcttttgcaccacaaggtctaggatgtcttgcaactgctgatcaagctgcggctgcagctcaagctgcaagtgcggcaagaagtaccctaacctggaggagacgagcaccgtcacgcaggccaccgtcctcctcggcgtggccctcaagaagaaggcctgccccaacttcttcgaggcctgcttttagtccggcgaggcacgccacgcctgccgctgcagttacacgctcatgtgcgacccctgcaactgctgattacatcaatcgacgaccatggatatgattatcatctatatagctggcgctggctgcagaaccataataagcgaggacgagctcactgtcaatacataagta

SEQ ID NO: 44014 - DNA, 203 bp, Zea mays
  unsure (1)..(203): unsure at all n locations
  Clone ID: MRT4577_140146C.1
gangcggngtttgtgcaccangaactcagccncaaccgggcatgntctcttgtgcagaacatntgccaaaatctnagttcatatncggngagctatnaaaggtgcagtaccanccatcnnggcnaagaagcatgtcaagtcataaaccanngcacnnagatgancaaantaggttgcttgtttaagttatnnancggttnccc

SEQ ID NO: 44015 - DNA, 240 bp, Zea mays
  Clone ID: MRT4577_140147C.1
ttcacgcgttcggctacatgtcccaggtggtgcggtctcagggacacgcgggccatgtccaaatgcaagagtgtaaactcgcttttcaaatagacagactccatcacccacccgatagctatcctcactgacacgatgtggggaccgcggatacaggtgcactggtggttgatcgacacggactgaactgaggatatgacgatggtactgatgcgcggcactcttgcaagtccggctgac

SEQ ID NO: 44016 - DNA, 762 bp, Zea mays
  unsure (1)..(762): unsure at all n locations
  Clone ID: MRT4577_140148C.1
aatcactgcagtcgagtctgtcaccgcacgggcttcaccaggtcgatcacggcgggcagccgccgaggatcgccgctgggctcatcattggtcacccggctgcgcgagacgacatctcgtgcatgctcaccattggcagtcaccagaacaacaacaacaacaagtcagatgtcaagaaggcttcaccccagctgatgctctttgggaaacccatactcactgagcagcagatcactttaggtaactctgggggtttctctccatctgctgctaggaagagctcctctgaaatgagcgccgagaagtcggcgaataactctgatcttccaagcccgcaaagcaaccagaacggcactacgaagaacttgtcctgcggaggagttccattgtgccaggacaacaaggtactcgatctcgggctggatatcgggcactgcaagatattcatgcaatcagaggacgtcgggcgcacgcttgatctcaccgctgttggttcttatgaagagttatatcgccggctttctgacatgttcggcatggaaaaagccgagctgatgagccatgttttctaccgtgatgcagccggggcgctcaaacacactggagatgaacctttcagcgacttcacgaagacggcgcgtaggctgacgatacttacggacacgagcggcgacagcagcgtagcgagctaaggngggatgaggaagngaggaagctctctcgccacttgtacgtacagccgggtcgatggcggcgcggcgc

SEQ ID NO: 44017 - DNA, 268 bp, Zea mays
  unsure (1)..(268): unsure at all n locations
  Clone ID: MRT4577_140149C.1
cggcgccaacccgccgagccctagccccctantgacctcgtcgacccggtgattcacgtggcatgagaacctgcatgctgccgatctgcacgtacggagttacttcgagcctgcggaatcaccgtctcgactggtggcagctgcgagatcgttatccgctgatgctgcccccatgcctacgattcgtnctatcnagggtagggaacctgcatcatggggaagggcagcccactgatttcagtgaaggctacgcagcgaaccctggcca

SEQ ID NO: 44018 - DNA, 314 bp, Zea mays
  Clone ID: MRT4577_14014C.1
ctcgaaccttctctgtcttttggccagttgcgtaaaccctaagtgcttggctaccgtgggccgtggcaaggtgatggcgatggacccggacgcggtggcgaaagccttgattgagcactactaccggacgttctacaccaaccatacggagctggtggggctgtatcaggagacctacatgctcaccttcgacggccagatgtccatggcccatccgtcattgccgtcaagctcggatctctttccttgacgtctgcgatcaccagatcgtcaccgtcgtctgacagtcgttggagccccatggaggcatgctc

SEQ ID NO: 44019 - DNA, 264 bp, Zea mays
  Clone ID: MRT4577_140150C.1
acgccctctctcttttttttttttttttatttttcttttattattatatattatttgggttggttttaatgttttatttatgttattttttaaattgccacccaagccacccagtgacactaagccgctgagcgacactcaaaatttctcaaccgagcctgggagctaaccaattttcccaataaaggattacaacaaaacatagggtcctcaggggaaaaaaccgtcccctgctgaaatagaagggcagggacctatccgaat

SEQ ID NO: 44020 - DNA, 1258 bp, Zea mays
  Clone ID: MRT4577_140151C.1
cattgggtacctcgaggccggccgggacacacgttccatctacttatccttgggtacctcgaggccggccggggagctgctccccctctccgcccgcccgccgcccactgccgcctcgctcgcctagggagacaacttctactagcttcctcccctaccgcctgccgcccaatcagccatggcggatcccactgagagggaccagttcacggacgacgaggaggaagaagactacctggaggacggcgagcaaggccttggaagcgaggacgaggaaggaggaggagcggggggcaagaggaagcggctgggaaataccctgggtgggatcggcaagcgtggggtgtgctacctcagccgcgtcccgccgcacatgaacccgtcgcacatccgccagatgctttccaagtacggcgaggtgctcaggatttacctcgtgcccgaaggtcaaggtcatcacaagcatactagtgttaaagcgaaggcttactcggaagggtggattgaatttgcaaagaagagtgttgccaagagagtggctaatctgcttaatggtgaacaaataggcggtaagaagagatctccattttattatgacatttggaacattaaatacctcaggaagtttaaatgggatgatctggttggtgaaatggctgagaaaactcatatcagagagcagaaattaaccttggagatagcagcagcaaagaaacaacgcgatcactacctgtccaacattgaaaaatctcgcgcgttgaaacacattcaagagcgcaggaaaaagaggcagaagacagaaggagcagaagccagtaatgtcccagaaacaaaaactgcccgttcaattcctcaaaagaaaccagttgtggagacagatgccaaaactaaatccacgctttcaaaagacattttggctggcgttttcgggggttcatcatgaccacctcctatctttcggcatggattggtgcatgccaaactgaatggagtgctgcaagatcatcgagttcatattctacttcgaatttttgtagatgaagtcagttttttttttcttgggggtaagtaggaactttcagaaacattttgttctgctgacattgccccggaagattttctgggacctgaccattttgatgtgaaaggactgttgattgccagcgctgtttgaacaggaatctttgtaaaactgaaacacatgttctcttctagttgaacaaatatcacgaggaactgccattggcgttttctcttt

SEQ ID NO: 44021 - DNA, 275 bp, Zea mays
  Clone ID: MRT4577_140152C.1
tctaggttccttttcatttatggcttgttctcagaatgtctccagcaagttactgatatatttatacaaaacattgccccctcactatacactgcactgttcgcatagtgcactttaaatatatctatgtggatgagtaatctgctgacatatacttatgtcgatgacacaagaatatattatgtccaacacagctgttttgtctacttccgattatatgtatcttcaacatgctgatctatctcatcaacattccttgacttcatttatttcat

SEQ ID NO: 44022 - DNA, 300 bp, Zea mays
  Clone ID: MRT4577_140153C.1
gccggccgggttcggcattgtgcggaccgccattgccgtctgcaacctgtggatttggaacctctggaaggagctcgtcagggaatggaagcaagccccttccaagtcaaagaaagacacataggctgccacctcattctaaccacagtaccgtaccatgtacgggtgtacgaaccatatgtagcttcttaatctttccaaatacatccgatccagactgatgatatgctaaaagccaatttcggatgacaattggtggaggaaaaaaaaaaagaaaaaaaaaaaaaaaaaaggccccta

SEQ ID NO: 44023 - DNA, 526 bp, Zea mays
  unsure (1)..(526): unsure at all n locations
  Clone ID: MRT4577_140154C.1
cgcctagctttacgtggcagcacagcgccgtctctcgtcttctgtgtggctcttctctctctccggcgccagcactctcggaggaggaagaaagtccccactcatactggcgtcctctagaagacggcggagctactagtgcgacgggggccgtcacaacagacctgggcgtgagatctgcatcggccgagtatgcatgatgcgactgtcttgcccctaacgctggggcggctctgtcctatggccgaagctgtcggataatacatggcacccggtgaggcgctattcaataactgctgtgccattacaaaggtcaaagggaactatgaataaagcattacttttggatgagattagaaggggcccatgggacctgagcatactagatagatgtatgaggaagacgaagggaatgatgtcagaacttgctgacatgcatggtgtagcgatggaaggagctaatgaggatatagggaagctagtggatgntgtagaggaagccaagattagagatactgaaggcaga

SEQ ID NO: 44024 - DNA, 543 bp, Zea mays
  unsure (1)..(543): unsure at all n locations
  Clone ID: MRT4577_140155C.1
ccctgcgcctttaaggcaattgtaggaaaatttgatcaaaaaaaaaaagagagggagggagagaaaaaaaaaaaaaaaaaaaaaaaaaaaaaaaaaaaaaaaaaaaaaaaaaaaaaaaaaaaaaaaaaaaaaaaaaaaaaaaaaaaaaaaaaaaaaaggggcggccccctttaaaaaaaccaaatttaactaccccttccatccaaggggggggggggggaaaantccccccaaaataaaataaattgccccctttttaaaaacttcgaaactgaaaaaaccctggcttacccaaattaaatggctttaaaaaaaacccccttttccccacttggcgaaaaaacaaaaagccccaaaccaatcccctttccaaaaaggggcccaccctaaatggaaaatggaactcccccttaaccggcccataaaccccggggggtgtgggggtaacccccaggtaaacccttaaatttccaaacccctaaacccccgctcctaaaatttttttcccttcttttttacccactttccccggttttcccccaa

SEQ ID NO: 44025 - DNA, 733 bp, Zea mays
  Clone ID: MRT4577_140156C.1
cattgggtacctcgaggccggccgggctgcctaaccaaaaggctaaaaacctatcccctccaaccccagccttccttccagcatccactgccaccatctccagagcttcatgctgactcccaaggatggcttgaccacctgagctgctgagcgtcagagagcatggcatagcatttcttggtgtcgctggatggatggggatgactggatcactcatcaagaggcggatcacaaaagagtactagctaaccactgccaagattccgccgcgcgcacgcatgcatctgtgttgagcttcttacacgccgcagagaaaactagatcacggcgctgcacataccgcagcgcgcgcaggaagcaagcggctaaggatcgatggatcaccatcaccaccaccaccatcacatgatcccgggccaagagccaccggcggcggatagctcagccccggacagcttcttcctcggccccgcgggagccatcatattctccggaggcgccggggtgtcgggggccggctcgtcgtcgggcgccgcggccctcggatcatccgcgggggcaggaggtgggccgtcgccgtccagctcgtcaccgtcgctgagccggtacgagtcccagaagcgccgggactggaacacgttcgggcagtacctccgaaaccaccggccgccactgtcgttgtcgcggtgcagcggtgcacacgtgcctggagttcctcaaatatatggatcag

SEQ ID NO: 44026 - DNA, 320 bp, Zea mays
  Clone ID: MRT4577_140157C.1
gcggtccagcagtttcacgctcagctccagccgtggctgcctgcaccatggcggtgtgctgcacggccatggccggcacccccatcaaggtgggctccttcggcgaggcgcgcatcaccatgcgcaacaccgtcggcaagcccaacgtggcggcgtccggcaaccgctggtacggccccgaccgcctgaagtacgtcggcccgttctccggcgagcccccgacgtaggtgaccggcgagttgcccggcgagtagcggtgggacaccgccgggctgtccggcgaccccgagacgttcgccaagaaccgcgaggtggaggtg

SEQ ID NO: 44027 - DNA, 302 bp, Zea mays
  unsure (1)..(302): unsure at all n locations
  Clone ID: MRT4577_140158C.1
ttcctactcaaccacaccctctntagtatatgttttacgaccaaatgatctntcacagtcanctgccaaaagaaaaaagcgccccacaccaacaaaatctaccacaacaaccaaactaaaaacaaaaaaaaaaatcaaaaactaaaaacaaaccaaaacaataccttactataattacaatcaacaaaacaaaaaaaaaaaacattatatagctcccctctctttaaaaaccccatttcactccccactcttttaatccttttaactttcttttaactttacataaatctatttaaacctcc

SEQ ID NO: 44028 - DNA, 815 bp, Zea mays
  unsure (1)..(815): unsure at all n locations
  Clone ID: MRT4577_140159C.1
aaaggctaaaaacctatcccctccaccccagccttccttccagcatccactgccaccatctccagagcttcatgctgactcccaagtcccaaggatggcttgaccacctgagctgctgagcgtcagagagcatggcatagcatttcttggtgtcgctggatggatggggatgactggatcactcatcaagaggcggatcacaaaagagtactagctaaccactgccaagattccgccgcgcgcacgcatgcatctgtgttgagcttcttacacgccgcagagaaaactagatcacggcgctgcacataccggtacgcatcgatcgatctcacttctccgattccacttagttcctctcctcctcctctcttcacctggacctggcctcttcagatcagactttgtttggatctgtagtgcatcgaagctcgcatcagagcaagaaatgatgctttttcttctttcttgtgttacattgctgatgagtgagagtggcacacagcagcgcgcgcaggaagcaagcggctaaggatcgatggatcaccatcaccaccaccaccatcacatgatcccgggccaagagccaccggcggcggatagctcagcccccggacagcttcttcctcggccccgcgggagccatcatattctccggaggcgccgngngtgtcgggggccggctcgtcgtcgggcgccgcggccctcggatcatccgcggnggcaggaggtgggccgtcgccgtccagctcgtcaccgtcgctgagccggtacgagtcccagaagcgccgggactggaacacgttcgggcagtacct

SEQ ID NO: 44029 - DNA, 379 bp, Zea mays
  Clone ID: MRT4577_14015C.1
gcagcccacaccccacacgcgggggccgaagccaagcacacaccggcgcaacagcggagacgcccgacgacgcccaccgacgaacagaaccgcagccggccccgagcgacacgcccacgcgccagcgacgccaccgccacctccgcaaaggcgagccgcaccaacgaccgaaccaggagggcggcacccacggcaacagcgaagaccccgaccacaagcgaaaacccaccgagcacaaggaagccgaccgggatccaacaggcggacaccagcgcgcaggaggcgaaggaacccaacgacggcaccgccaaaccgaaggccaacagacagaagcaccacaaggaaagaacagccaagacagcagcaacgcgcccaggag

SEQ ID NO: 44030 - DNA, 340 bp, Zea mays
  Clone ID: MRT4577_140160C.1
tattatttttttttttttctatacttcacttgggttttttttaatagtttgttgggtattttttttttttttggattttatgtttgttttgactaattagagatacaaatgcgtaaaagacggaaccgatccaaatatatgaaaaaagacaaaaacctaaaacccaggctcattataagcaaaccgggcccatacctaagcaaaagaaacatggacagtagtcttagaagaattaaagccactggtcctaacagggacgaacgggagctggcattacccgagatcaaagggggcccggacaaaggggaaggtgatcaaggaagcccttaacttgggctgg

SEQ ID NO: 44031 - DNA, 249 bp, Zea mays
  Clone ID: MRT4577_140161C.1
cccttccgcctttccttttagcaaagcacgttggcaacctaaccaaggggctggggttacttccttcattaattccttcctcccaccaccacgagcaccaccactccaccagcgttacaaccgtcctatcccccctgcccgcccctttccctacctacacaaatacctagacacgactagatcgggcagagggaggctgccagactggcaagtcctgcggggaagatatactcgccatatccaggggcc

SEQ ID NO: 44032 - DNA, 534 bp, Zea mays
  Clone ID: MRT4577_140162C.1
accaaaaccccctggaaatggaaatttttcagcccacgttcatcaaaagggaaacaatgcaccggttttttaacacagggggcggggaaaaaaggttacatcgaccaggaaacttgccaggcaaaaaaccccacagcagggaaaacctgtcagggggggggcccccgcccccaaccacgtccacaaccacggccgcccccacccccaaaaggttttcctgaagccggttttttaggctaaaccctaggggttccctctaccagcaaagcctccaagtttaacctgccagaaaaaatgtaataccggatgttgttccctcccccgctgagggggcccagcgttacagggttcttccctttcagggaaagcttccctgtcttcaaaggagggttcatgcttatgccacccccggggagggggccggggacaaccggcccgttcttgacctcgagggggaccgtctaattgtttaccttcataaggaatctgacgagctttatcttggcagtcctggggtaaaaaaggggcgggggg

SEQ ID NO: 44033 - DNA, 358 bp, Zea mays
  Clone ID: MRT4577_140163C.1
cagcattgaactctcctgcttattttcagcaccaacaactactaccatggaggcagctatctggtgtgagcgcggttacctccttgatacaaccacaacagatgccgttataacatcacactgctcataacgctggtaccctattacaactgcaacaattgctgccattcaaccaacttgctttgacacaacctcagcagcgcaagtacacacacaacccatcatatcacttgcgcctatgtgtagataccatatcaaatttatcacaatcatcaacaattctggcctcatctatcaggcttcgccaacataacgcagcaccttcgtcagaaaataccaggactgagcgccctcgcca

SEQ ID NO: 44034 - DNA, 261 bp, Zea mays
  Clone ID: MRT4577_140164C.1
cgcaaccctcttacaactacaacaattgctgccctttgtacaacttgctctgacagacccagcgggctcctaccaacaacacatcattggtggtgccctcttttagatagcttattagctgcaattcaataatcaagttatctggatgatgtatgtggccaaccagaaataagaagctacatttacagattctagaggcaaaactggataaaaacgatagactgctggatttcacacacaaaccttgatctgcatgtgttg

SEQ ID NO: 44035 - DNA, 512 bp, Zea mays
  Clone ID: MRT4577_140165C.1
cggtccggattcccgggcttaactccgtccacacttcttctcacttcaccttggctgcctacaccatggggatctcctctacggctgataggtcggcgcccccatcatggtgggtatcccttcagcgagtggcctcatcaccatgcgcaagagcgtgggcaacccacaagtggcggcgtgcggcacgcgctggtaccggccctgaccgactcaagtacctggcgcccttctccaggaagcccccgagctacgctgaccggggagttgctcaggcattacggttgggacactcgtcgtgctgagcagctacccggagacattcaccaagaaccgggagctgcaggtgacccacttcctgtgggccatgctcagcgcgctcgggtgcaacttgcccgagctgctgtagctgatcgtcgtgatgttccgggagagcctctggttgaagggcaggtcccagatcttcaggaagagcgtgctgcactagctggggaaccccagcctgatccacgcgc

SEQ ID NO: 44036 - DNA, 410 bp, Zea mays
  Clone ID: MRT4577_140166C.1
aaaaatccctcccttttttttttttaaaataatttttacttgtggttttttatgggagaatcggggggtttaccaacaacatggaacggttccctagggtgagcccaccgtagcaaatgccgcaaaagccaggcgccctcgttgcgaaccaaaagagaggacgctagggcccccccacaggaagggggcccccgggagataaggcagggaaaaatgccagcaggaaaagaaacccccaatgaaacaaaaaaaggttgggccacagaatgctttgggtactgaagctcaaacaccgcggacgcgggggggggcccggcaactcggggccggaacccgcaagggtaccagctaggggtgagggggagccaaacaggaggtgggtgtaacaaagcccatgggggggggggggg

SEQ ID NO: 44037 - DNA, 251 bp, Zea mays
  Clone ID: MRT4577_140167C.1
acaataaaaaaaaaatttctggtttttataaaatgtcaaaggacttgttgagtatccaccatatcacgcggatttaagaactgcctttgttgggtgacccaattgcagcaaaattgagaaaaaaaaaactaacctttttagggacagtccacacccttttttggagacccacttttagaaaaagggtggatcagctcagttggggggtctatgccccaatacaagggagagaaacaacccgggagcccggt

SEQ ID NO: 44038 - DNA, 582 bp, Zea mays
  unsure (1)..(582): unsure at all n locations
  Clone ID: MRT4577_140168C.1
cttctctcacgagctcccccggcctcgccgccgccgcctgctccggcgggcgggacccagctcgcagcgtctcccctgcggcgaggtacacgatggagggagcgggaagagatgccaaccctttgagcggttacagaattggcaaaaccctgggaattgggtcgttcggtaaagtgaagatcgcggaacatatattgactggtcataaggtggcgatcaagattctcaatcgcaagaagatcagaagcatggatatggaggagaaagatcatatctggtgttgaatattgccataggaacatggttgctcaccgtgatttaaagccagagaatcttcttttggattcaaaatgcaatgttaagattgccgattttggcttaagtaatattatgcgtgatggtcacttccttaagacgagttgtggtagcccgaaatatgcagcaccttgagtcatatctggtaaactatatgcctgtcctgaagttgacgtctggagctgtggagttattctttatgctcttctttgtggcactttnccatntgacgatgagaatattccaaaccttttcaagaaaataaag

SEQ ID NO: 44039 - DNA, 559 bp, Zea mays
  unsure (1)..(559): unsure at all n locations
  Clone ID: MRT4577_140169C.1
tctagcttttctgctttgctgcatgaggggggccgcggcggggcaaaaaaaggaaggaggaggacctccccctcctcgccaacaagttctctgagcgccagcccatctgcacggggtggcaccacacggacgacaaggactacaaagagcccccgcctgcgccgctcttctagcccaccgaggggggggctgctccttctaccgcgccggcatagcctagttcaactccaccttcctctttctctacatctccatcctcaccgagatcgggcgactcccaatccacctccaactgccccaccgccaagctccagggcatccgctgctccttcccggggggggtcttanccccattctactcatcctcacacatctccacctggcacatcaaccccggcagcgaccattcgccctcccacctagcaagctaaggtacacccccaccacgcgcgacccagtccccccccccccaccgggggctgacacccagcccgaccctgaagccccccgccccaccccacaccaacccccccccaacccgcccgcgcccccccccccc

SEQ ID NO: 44040 - DNA, 636 bp, Zea mays
  Clone ID: MRT4577_14016C.1
tattccgctacggcttttgcccgtataacatcctcttcctctctctggaactgcattccccgatgcctccggccacagctcgcttcacttatctatagattgcggtgacgttgcttgcaaatacgatcgcctcatactcagtcacgacggtatcgacgtcccccctcaaacgatacacacgatttagaacgaggtgaagatcgacgaagggtattacttgccgtggctcttcaataatctcgtatacaacttgatgcccaacgatgtaaatgtctctgacgaatctaccggggactatcgttcccaacgatgctgccaacccgtgtgcaagagctgtacttgcttgtgactcttcttgatacgcaacaagagctaatgcgctgaaattgctcgctgcgtacactcgacgtattaagcctgatgaaatgatgaagccctgcttacccactcaacattgaggtcactaatgatgttgctaagttatcttaccatatggacgaatactctggttacttgtcttacaccacgaactgaatgtttgcaatgcttttatgacgaagctactttgaatcgcgacatcgtagtactgaaaagcaaattgactcctacctttttgaaatcagtagctgctcctat

SEQ ID NO: 44041 - DNA, 262 bp, Zea mays
  Clone ID: MRT4577_140170C.1
gcctgcaggtaccgtccttaattcccttttctacccactctttcgcaaagatgtatcttactggtactatatatacatgaatttggagcacctgaagtattttgctggcatatagttcgtgtctcaatattacagagacttgtatctataccgttctgtaggataacgcatgccgtaagagatgtttattgagcttttgttggtacaggacccctaaaaatggctgtgtgacggatgttatggaatagcggtcatgtttatg

SEQ ID NO: 44042 - DNA, 887 bp, Zea mays
  Clone ID: MRT4577_140171C.1
ccgaggaaaccttatgatgttattaagagggttttgacaagaatcagctaattgaatctctgcacaacagattgcagaatgaggcaacagttgcctattatttactcatggacaataggcttcgtacaaccagtggttatcttggatctgagtttcaagaatctatggacccatctttctctcaagtacatgctgaaacaccaacttcagcaattgaacatcgacagcatgtgtttacagaatctccggggtctggtttgaggcagcattttgcatctgaaaggaaatgggcccttggtcttcaggtaattttcatgttaagtacatcgtatgatgtctttcctgcattattatgattcatttatctgtaattgtctaacaatctcgagcacatccaccagaaataataagtgaagtgcttaaagcactgcaagaactgaatgtttactggaaaaaaatggacactacgacatgaaatgcagatggagtcctggctgccttgagagtatgatgcataacagtgatagcttcagtgcggagtctgctataattgaaactgatgttttcatggagaaatcaaccccgacagtgaagtttgagattcagctttacaaaacgagggatgagaagtaccttcttgacctgcaaagggtattatggattgcatacgttttcttttggatccttcgttctggtggggtgcactcttgttcgtttgtttttaatctataccagcttctaatacaatattttgtgtctatgaattgcagctgcagcagttcgaacaattgactttaatttgaatctaacagcctattatactctattttatgctctatttgtctcttgattgaaacttggaaggcagagctgctgctattttattt

SEQ ID NO: 44043 - DNA, 2370 bp, Zea mays
  Clone ID: MRT4577_140172C.1
ccggccggggcggtaggtcccatgtgagcctcgcttttctcctctctctctccccggcattggtacctcgaggccggccgggggcgtcactcgcgtgtcaggcgcattctgcctctttctttctccccctcccctcccctcccctgcgggcttctctcacgagctcccccggcctcgccgccgccgcctgctccggcgggcgggacccagctcgcagcgtctcccctgcggcgaggtacacgatggagggagcgggaagagatgccaaccctttgagcggttacagaattggcaaaaccctgggaattgggtcgttcggtaaagtgaagatcgcggaacatatattgactggtcataaggtggcgatcaagattctcaatcgcaagaagatcagaagcatggatatggaagagaaagttaagagagaaatcaagatactgagattatttatgcatcctcatatcatacgcctttatgaggtgatagatacacctgctgatatctgtgttgttatggagtatgttaaatctggagagttgtttgattacatcgttgagaagggaaggctacacgaagaggaagcccgacacttttttcagcagatcatatctggtgttgaatattgccataggaacatggttgctcaccgtgatttaaagccagagaatcttcttttggattcaaaatgcaatgttaagattgccgattttggcttaagtaatattatgcgtgatggtcactttcttaagacgagttgtggtagcccgaattatgcagcacctgaggtcatatctggtaaactatatgctggtcctgaagttgacgtctggagctgtggagttattctttatgctcttctttgtggcactctcccatttgacgatgagaatattccaaaccttttcaagaaaataaagggtggaatatatacccttcctagtcatttgtcaccttcagcgagggacttgattcccagaatgctggttgttgatccaatgaaaaggattacaatacgtgaaatccgtgaacatgtgtggttcaagatccgacttccgcgctatttggctgtgccgcctccagacactgctcaacaagttaaaaaggtcgacgaggaaactcttaatgatgttattaagatgggttttgacaagaatcagctaattgaatctctgcaaaacagattgcagaatgaggcaacagttgcctattatttactcttggacaataggcttcgtacaaccagtggttatcttggatctgagtttcaagaatctatggactcatctttctctcaagtaatcgctgaaacaccaacttcagcaactgaacttcgtcagcatgggttttcagaatctccaggttctggcttgaggcagcattttgcagctgaaaggaaatgggcccttggtcttcagtctcgagcacatccacgagaaataataagtgaagtgcttaaagctctgcaagaactgaatgtttactggaaaaagattggacactacaacatgaaatgcagatggagtcctggctgccttgagagtatgatgcataacagtgatagcttcagtgcggagtctgctataattgaaactgatgttttcatggagaaatcaaccccgacagtgaagtttgagattcagctttacaaaacgagggatgagaagtaccttcttgacctgcaaagggtcagtggatcacatcttctctttctggacttgtgttccgcctttctaactcagctgagagttctttgagcctgacatgattggcttcccaagcactccttgatgcacccagtggagtttcaagttacatttgagatgtacataatgaccatatataatcctccagtagattatattttctggagcatgtaatgtagacgttagaggcttgtcctggtttgccaagatggttgttacctaaggtcctaacaagaggccgcaggcgagcccagtccaattagatgatgtgaaaaatttttggccgattaaaaaaaaaaaaaaaagcggttttctttgccttgtttggttgtgtttggatcaaaggagattgagagctggtttgatgaccagggaaatggaggggattaatggggagaaatctccttcctatttgaaattgaatagcaagtggatatctctcccatgcatcctctctatttcccgtatcaccaaattagccctgaggctttgtttggatactctagtatttatctcagtacatatggattgggatagattaaaatgtaaattaaactaacttacacctcaatccatgtgcatagatgtaaatactagattattcaaacaaagcttgagggggattaaatccccttatattcaattttgactagtgagagatttaatc

SEQ ID NO: 44044 - DNA, 2143 bp, Zea mays
  Clone ID: MRT4577_140173C.1
ttgggtacctcgaggccggccgggactcaagtgtcagactgtcaggcgcactccgcctctcctctctccgtcgctgggcagctgggcttctctcccgactcccgagcagccgagctccccctgctcggcctcgcctccgccgcgaaccgcgcctccggctccgcctgctcgggcgggcggcacccagctccctgcatcttcgctgcggcgagggggtacacgatggagggagctggaagagatgccaaccctttgggcggttaccgaattggcaaaaccctaggaattgggtcgttcggtaaagtgaagatcgcggaacatatattgactggccataaggtggcaatcaagatcctcaatcgccgtaagatcagaagcatggaaatggaagagaaagtgaagagagaaatcaagatactgagattatttatgcatcctcatatcatacgcctttatgaggtgatagatacacctgctgatatttatgttgttatggagtatgttaaatctggagagttgtttgattacattgttgagaagggaagactacatgaagaagaagcccggcgcttttttcagcagatcatatctggtgttgaatattgccataggaacatggttgctcaccgtgatttaaagccagagaatcttcttttggattcgaaatgcaacattaagattgctgattttggcttaagtaatgttatgcgtgatggtcactttcttaagacgagttgtggtagcccgaattatgcagcacctgaggtcatatctggtaaactatatgctggtcctgaagttgatgtctggagctgcggcgttattctttatgctcttctttgtggcactcttccatttgacgatgagaatattctaaacctttttaagaaaataaagggtggaatatatacccttcctagtcatttgtcaccttcagcgagggacttgattcctagaatgctggttgttgatccgatgaaaaggattacaatacgtgaaatccgtgaacatgtgtggttcaaaattcaacttccgcgctatttagctgtaccgcctccggacactgcacaacaagttaagaagctggacgaggaaacccttaatgatgttattaagatgggttttgacaagaatcagctaattgaatctctgcacaacagattgcagaatgaggcaacagttgcctattatttactcatggacaataggcttcgtacaaccagtggttatcttggatctgagtttcaagaatctatggacccatctttctctcaagtacatgctgaaacaccaacttcagcaactgaacatcgacagcatgtgtttacagaatctccggggtctggtttgaggcagcattttgcatctgaaaggaaatgggcccttggtcttcagtctcgagcacatccacgagaaataataagtgaagtgcttaaagcactgcaagaactgaatgtttactggaaaaagattggacactacaacatgaaatgcagatggagtcctggctgccttgagagtatgatgcataactgtgatggctttagtgcagagtctgctataattgaaactgatgatctcatagcgaaatcaacccgtatagtgaagtttgagattcagctttacaaaacgagggatgagaagtaccttcttgacctgcaaagggtcagtggaccacaactcctctttctggacttgtgttccgcctttctaacgcagctgagagttctttgagcctgatgacatgattggcttcccaagcacaatccttgatgcaccccatggactttcaaattacattcgtgctgtacataatggccatatataatcctccggtagattatattttctggagcatgtggaccgtacaggtatgtcctggttgccgagatgattgtcacctaaggtcctaaacaagaggccacatgcgagccccaggccttcttcctcaattagattatgcgagttttgttcggcctttctttagtccttggacatgtttttttctttgccttgtttggttgtgtctggatgaaaggagattgagggttggtttgatgatcaagaaaatggagagaaatctccttatttgaaattgaatagcaagtggattcctctccaaaaaaaaaaaaaaaaagcggcc

SEQ ID NO: 44045 - DNA, 580 bp, Zea mays
  Clone ID: MRT4577_140174C.1
ggccgcttttttttttttttttttattttttttttttttttttttttttttttttttttttttttttttatttgacaacggacttctacgcacatgtgaaatgtacagtagtactagtgcagttcagatcctagcaagaaagaaacttacaggtacgcctataataaatttgagggagatttggctctaatctcaataaacgtaaagctgttcctaccaagttttttttttgtttcctgatgatgaaagaactgctgctctttgaagacgggcgctctgatctctgtaataactaataagcactgaaagcaggtggggcgctagacactagtactccggcagctgctgcaggatcgcggcagccagcgcgtcggtgaacttgggatccttggtgagcgagcgcgccatctgctccacgagcgccgtgcggaaatccggtgacgcgatctcctggcacagcctcttgaggccgggcacctcggcggcggcggcctcgagcccccgcacggcgccggctccgttcctggtgaggtccagcgtgatggccgggcccgaggagttgatggaggtggagctgggg

SEQ ID NO: 44046 - DNA, 794 bp, Zea mays
  Clone ID: MRT4577_140175C.1
cgcgcaccaaccctccgatgtcccatcccctccctagcctccgctccgccgctcccccccaactccaccaggctccagtgtctccaccgcttctcgccgctttcccctcctccgcctgggcgcggcgcccgcccgcccctcccgatcccgtggacgtcctcgcaggcggcgtgttgcacgagaggtgagctccaccacgcgccccctctctcacctccctatcgctgtcagtcggtgcccagttcctcaaccaaccagccgcgatctgtcggcgctgctcgccttccctggccctcgctcctgtcgacgccgctttaaaggggggctgcgtactgccgcgattgccttgcgatgggagtggggctcctctcgacgcctgtcagcgcaagatgcagatcggccgaggatgcagctgtgctatgctcgcagatgccacttccgagcaagcgcttcgcgccactcctagcacttttagttcactcgacaggcggtaaggatctagcggcctgatcttgagcacacgtattcgttctcacttctcaggctcgcgcaaaagagagaatgtgtactctactgaaactgttagtgtggcattttgggttacagttgtgcttcctagccttcgatctttctttcagttagtattcatgcgtcaacctgccacgggtagtacaatacactcatgaatcgatgcggcagttgaatttcggctgcatagcgcagtcatgagatctgcaggattacagcttacgaacccattgtatcgttcgtccctgtagctaggaagctgaatg

SEQ ID NO: 44047 - DNA, 1496 bp, Zea mays
  Clone ID: MRT4577_140176C.1
cattgggtacctcgaggccggccgggggcgcaccaaccctccgatgtcccatcccctccctagcctccgctccgccgctccccccaactccaccaggctccagtgtctccaccgcttctcgccgctttcccctcctccgcctgggcgcggcgcccgcccgcccctcccgatcccgtggacgtcctcgcaggcggcgtgttgcacgagagcttagggaatgttttaccagtattgttcatggtaaactcagagtttctatcaactgcccgggaaagtgaacttgtttccactccatctttagtgtcaaaaccaatttcttctacaggggcaacggaactacttcgaagtgaattatgggtgggttctgctgctgcctcagtgctgaagaatttgatgaatatgtctatccaaacaaccctatctataggcaatgcgtatccttgaggcatcttttccacagcatttttggcgggtatactgcaacattccagaggcttgagtctaggccaaacaacccagctcaaggggttgctccactgggatccactaatccaagtgtcaacataaatgacaattcactcaatcttgtttctagaccacctccatatgataccgatcctagatatgcccgtgttcaaagagagggattagtctccaggcgtgagaaatccataaatcttgcacaagaagagtcactggcccttagacgaaatgccagcagctctggtattgaacatttagctgctcagaagaaacgcaacagcactgaaaatgagggtgaatataaggtccatcgttctgaatcaactaagagtttgtctgcaaaagcttatagtagcagctatgctgttgtcgcttcagaagatgaggatgtctgccctacttgcctggaagaatacacgccagacaatccaaaaataataaccaagtgctgtcaccattttcatcttggttgtatttatgaatggatggagagaagtgatacatgcccaatttgtggtaaggaaatggagttttgcgagagcccatgatagcctttcggtttacatgatctcacatgaagtctgagctgcaggaaatggggttctgtgagaaccaatgatagcctttcgatttacatgatctcagatgggagcaagggaaacattctacagagtacaacagaatgctggagaattgtaaataatagttccttatgcatgcgatgtccaaatagatctctttctcgagatcagtttcttacatgtactgagatggttatctgtcttactaaattcatgctagaatttgcttggccagtttttgttatatttgcaaatggtagctcatagatggaagcacaactcatggatgaaagaatatattaacctgagctgtgcttccatctatgagttgtgcttccatctatggaacacaactcaggttaatatattctttcatagatggaagcacaactcatggatgaaagcttacagcaaccctttgttggtgctgca

SEQ ID NO: 44048 - DNA, 361 bp, Zea mays
  Clone ID: MRT4577_140177C.1
gagctttctagtcggcggccgccctaaaaccttttgtgcgagcacaggcggaggggccgcctaatcatataatgacgggaggagcaaatattcaatagagaaccatgacggtctgataggagattggctgcaacagaactgcacatagcacacggcataggcaatcctaaggggctgggaaaaccgaaacactagtgagtggacccacgtcacacgagggggaatgtatataagaactcccgcacctcgacgtgccgcgcatcctgtacgagagaaagatcggctacacctgcgtacacacaatgaagtgcagtagcatctggtgaacatacgatctagccgggacgctcatcatacttac

SEQ ID NO: 44049 - DNA, 601 bp, Zea mays
  Clone ID: MRT4577_140178C.1
ctcttacttatttactgggaaagccacactcataacacaaaaaactgtattattgagctataactacatcacaaatctaaaagagggcaccaccaatgatgggatgttggtataacgctgcaggatgtgtcaaaacaagaagcgtgaatggatgcaatagctgcaggtggaacaaaggtgacagagctaggcgcaatggactaggagaacggcaacaactgctgttgaatcaagaaagtaacggcgctcacaccaaataacactctgaatggtaataaaagccgatgctgtaaataaccacgagagctcactgctgacaggtgaatgaatggaaaaaattgctgggggtaagcagcatgtagctggctgaatggcaggtggtgttgatgcaaataagaagcagacttcaatgcatctagatgcttgaatggaagaaactgctgatgctgagagtaggcagcaaggtttgctagcacaagttgatggagttagcgagccctgatgttttgcgccaataaaagcaccaaatgtaactgatgtaatccggctgatgattgctggaggaacaagggtgataaaggtaagatgccagctgtgatcg

SEQ ID NO: 44050 - DNA, 220 bp, Zea mays
  Clone ID: MRT4577_140179C.1
tccatcggtcttccttttggtagaactttgcccgatgccagggacattaaaaaaataccaagttacaattaaatacaatagggaggctcataaaccaagtacaatgaatatcatgtactagaatatcaaagaacccctaacatgtatcattgcaccacgtgaatacatgaacaagttggtactacaaaaacacaaacatcacaaaattttgccaaatcta

SEQ ID NO: 44051 - DNA, 137 bp, Zea mays
  Clone ID: MRT4577_14017C.1
cccggtgaatgatcccaccgggtatcggaggcttgccgggggccctacaggaccttggcttaacccgatacgatttcgcctacgttggtcaacaggggtgcctccatatgcacgacccataggagtcgcatctcacc

SEQ ID NO: 44052 - DNA, 365 bp, Zea mays
  Clone ID: MRT4577_140180C.1
ggtgggttggcttctcctccccctccggttccggttcgggttccacagggtctcgggcattctacttcgtgggtgagcccatctagattgctgcgtctgaagttgagtaccgctgcttcatcgacggtctcccctggaccactgacgaccactccctccacaacgccttcaacacctacagcgaggtccttaagtccaacatcatcctcgatcgggagactcataggtaccgcgtttccgattccaaacttctacacggaagacgcgatgcggaaccccatctgagggcattaaccgcaatgaactggacagtcgcaacatcatccataacgaggcccagtccctctgccaccgttgaagcaaaa

SEQ ID NO: 44053 - DNA, 263 bp, Zea mays
  Clone ID: MRT4577_140181C.1
aaaaaaaaaacataaaaagcacaataatatataacaagaaaaacaaacaaaatattgggaggtcacatactcattgatatgtctgcaaatgctgctactgcgaccattttaccgcaatgctcacaagctcctataacttcatttcttccccaaaaccccttaccagccctatcttaataatgtgaaaacccatttctacaaccctacatgatccaatatgcaatctgaccttacatcttacctttatcaacctttgttcttca

SEQ ID NO: 44054 - DNA, 626 bp, Zea mays
  unsure (1)..(626): unsure at all n locations
  Clone ID: MRT4577_140182C.1
gctggcccgaggtgctcgcctcgctaaatccgctccattccctcgccctcgccgatcgccggatctctccctccgcctcgcttccgccgcacgccagggcgcacggcttcttcctccgctccctcgcctcagcgcagttcctatggggttcctgcaaagcactttttcgctgttgatcggcaccggctgcggcatctacattgcccagaactacgacgtcccaaacataaagaagctcatgaggagcctggtgggcaaggccaaggaggttgaggagtcatacaagaagacgggcaacagcaagaacaaggataacgaatagcgttgacccgcagtctgcggtccaccatctaggaaagctaattgttgcaagattattctgattattggaggtatactaccttgtacgttgtaccttggttagtaccttctgtctacttatttttttctcttaaagaaaatatgagatggcatactggaactgcggcctagtcgtcctggattgaatctgtctagacgtggcaatacaaattttgaggtgaaagagccggacgtgggatccatgctacgaattgggttttggaattggaaagtattgggatttattntatatatttatgttggct

SEQ ID NO: 44055 - DNA, 909 bp, Zea mays
  Clone ID: MRT4577_140183C.1
tttctctgctccagctaaccgcctgcctgccttttcttctctcgtccaccctaggtctcagtctctgctcgcgctcttgtggagctactaggtgaccgtcgcgaccgccctacgccacgtgctcgatccagcctcgtcggcttcttcgcacccgtcaccggcggtcagcacccaccaggttcataaatggcagagacggtgttcaccccctctttggaagataaatttggagctgctatggcaattgtaaagaatgatatcagcggcaatatcacaaggctggaaaacaagtattcttcagatccatcaaagtatggacacttgtacagcatggttcaggaagaagttcaaaacaagaccgcgaaaggttcctcaagctgcacaaatggtcttctgtggctcacgagggccatggatttccttgttgagttgttccgtaacctgcttgagcatccagactggaccatgactcaagcttgcactgattcatacaccaagaccctgaagaaatttcatggctggcttgccagttctagttttacggtggccatgaagctctctcctaatagagataaattcatggaggtcattagtggaactggtgatatcaatgcagatattgagaaattttgcacaaccttctctccttttctcaaagaaaatcacgagtttctggcgagcgttggtcttgatgatatgaaggcttcgtagagcgatctccaaggtggtgattacaacaaaataagcgtgtcttatcaaactcaagtgttgcagaggatatacctgttttctgtagccatctccccattgaaaattatacagggtgataataatttttccgcatgattaaaaaaaaaaaacaaaaaaaaaaaaaaaaaaaaaaaaaaaaaaaaaaaaaaactcgagggg

SEQ ID NO: 44056 - DNA, 231 bp, Zea mays
  unsure (1)..(231): unsure at all n locations
  Clone ID: MRT4577_140184C.1
tgctacccattcccatctactgctcccccatctctcttcctgctcggtggtgtacttgtggtgttgacgatgaggcggtggctgcctttgctgtatggcatggctggttttcgactgtcgtgattgttccgccgctgcgtttgccgtgtggttttgcttttttttttcttttttttgcgctgggcgtcaacnaaccacaaaaaaaaaaacagctttttttttttttatttt

SEQ ID NO: 44057 - DNA, 465 bp, Zea mays
  Clone ID: MRT4577_140185C.1
aggcaaggaaaatctatctgaacttatccggatgccttccaatccacggtgaacaagaataaccggcccacgccgggtgggacagggaaataaattatgcatcgtgtgtcatgctgacaccagcaatattattcctgtataacaaagggactagaccagaaactggtaccccacggacatactgctgtgggtttttacacgtgcggctatagccagcatgtctgactttgcctcgacgaaagcaacacccttaacgagcaaatgaaatgcccaaatccgcctcacaaacgcaaaatgcttaattcgctccagatgactttttaacgcactaatgcctacaggactttcacggttatctataggaaagcctactgagagagtaccctggggatcaaaggatcttgacagcctcggagaagaagtcattgtccaccttgatagaatacgtgcccgcaggcaccaact

SEQ ID NO: 44058 - DNA, 1108 bp, Zea mays
  Clone ID: MRT4577_140186C.1
ccggccggggtgttagttttcgtcttcgcctcggtttgggagccacatggatcggggcacagagattccgtgtgatcggggcacagagattccgtcgtaaaaaaatcgtccttcctgcagtgtcctcgccgacagggaaagccgtgttgcaagaaggggaattccgctgcgagatccgtgaacggttcagagatggcacagacggtgttcaccccctctttggaagcgatgaagcatgtcaaggcagagaacggagtcattctcaccaagcccttccttgatgtctgcaagcaaatattgcctgtcctcgcccctgcttttatggaccagataaatttggaggtgctatggcaattgtaaagagtgatatcggcggcaatatcacaagactggaaaacaagtatacttcagaaccatcaaagtatgaacacttgtacagcatggttcaggaagaagttcaaaacaagaccgcaaaaggttcctcaagctgcacaaatgggcttctgtggctgacgagggccatggacttccttgttgagttgtttcgtaacctgcttgagcatccagactgggccatgagtcaatcttgcactgattcatacaccaagactttgaagaaatttcatggctggcttgccagttctagttttacggtggcaatgaagcttgctcctaatagagagaaatttatggaggtcattagtggaactggtgacatcaatgcagatattgagaaattttgcacgaccttctctcctttcctcaaggaaaatcacgactttctggcgagcgttggtcttgatgatatgaaggcttcgtagagcgatctccaaggtggtgattacaacaaaataagcgtgtcttatcaaactcaagtgttgcagaggatatacctgttttctgtagccatctccccattgaaaattatacagggtgataataatttttccgcatgattaaccatggctacttacacagcgacttgacagtactctacaaatttactttccaaagttagtccctttttttccagataatctacatatgatatgaaattctagtgcaattaataaataaattcctgcaaaaaacagaaccgttaccggtt

SEQ ID NO: 44059 - DNA, 666 bp, Zea mays
  Clone ID: MRT4577_140187C.1
cctgcagtgtcctcgccgacagggaaagccgtgttgcaagaaggggaattccgctgcgagatccgtgaacggttcagagatggcacagacggtgttcaccccctctttggaagcgatgaagcatgtcaaggcagagaacggagtcattctcaccaagcccttccttgatgtctgcaagcaaatattgcctgtcctcgataaatttggaggtgctatggcaattgtaaagagtgatatcggcggcaatatcacagaagaagttcaaaacaagaccgcaaaaggttcctcaagctgcacaaatgggctcctgtggctgacgagggccacggacttccttgttgagttgtttcgtaacctgcttgagcatccagactggaccatgggtcaatcttgcactgattcatacaccaagactttgaagaaatttcatggatggcttgccagttctagttttacggtggcaatgaagcttgctcctaatagagagaaatttatggaggtcattagtggaaccggtgacatcaatgcagatattgagaaattttgcacgaccttctctcctttcctcaaagaaaaccacaactttctggcgagcgtcggtcttgatgatctgaaggcttcatagatcaatctccatgctgattacaacaaaataagcatgtctta

SEQ ID NO: 44060 - DNA, 1005 bp, Zea mays
  unsure (1)..(1005): unsure at all n locations
  Clone ID: MRT4577_140188C.1
nagtctgtaccctcggggaccgtgggaaacgggcctctgctccagctaaccgcctgcctgccttttcttctctcgtccaccctaggtctcagtctctgctcgcgctcttgtggagctactaggtgaccgtcgcgaccgccctacgccacgtgctcgatccagcctcgtcggcttcttcgcacccgtcaccggcggtcagcacccaccaggttcatagatggcagagacggtgttcaccccctctttggaagggatgaagcatgtgaaggcagagaacggagtcattctcaccaagcccttccttgatgtctgcaagcaaatcttgcctgtcctggataaatttggagctgctatggcaattgtaaagaatgatatcagcggcaatatcacaaggctggaaaacaagtattcttcagatccatcaaagtatggacacttgtacagcatggttcaggaagaagttcaaaacaagaccgcgaaaggttcctcaagctgcacaaatggtcttctgtggctcacgagggccatggatttccttgttgagttgttccgtaacctgcttgagcatccagactggaccatgactcaagcttgcactgattcatacaccaagaccctgaagaaatttcatggctggcttgccagttctagttttacggtggccatgaagctctctcctaatagagataaattcatggaggtcattagtggaactggtgatatcaatgcagatattgagaaattttgcacaaccttctctccttttctcaaagaaaatcacgagtttctggcgagcgttggtcttgatgatatgaaggcttcgtagagcgatctccaaggtggtgattacaacaaaataagcgtgtcttatcaaactcaagtgttgcagaggatatacctgttttctgtagccatctccccattgaaaattatacagggtgataataatttttccgcatgattaaccatggctacttacacaaaaaaaaaaaaaaaaaagcggcc

SEQ ID NO: 44061 - DNA, 341 bp, Zea mays
  Clone ID: MRT4577_140189C.1
ccttcaaattgtagatgtggtatctgacaagcaaattaacataaagaacgcgaaccatgcacacagcatggatgtgattacaaatttacaattgcatgctcttgggcgattttcatcgcgttagacacccgaagcctttgcataccctcatccacacggcgaacagcacgaggtacagtaccacatccacgacgatcacgaccgacgcgtggcgccaccacggacgcaaccccggaagcgcgcttgcgcttttctccggctgcaagaaggcgcgacgttgttctccggccctttggcgctcctccttgtctttctcgcagaccggcgccagcggcgtggac

SEQ ID NO: 44062 - DNA, 2276 bp, Zea mays
  Clone ID: MRT4577_14018C.1
cctttgcctacaagcccctctctctctctgtctctctccctctccctcccgtatggtctatgccctcccaccctctttcgtagcgcttcttcctatgcctctcgccggaacggaacagcagatagcatctcaatctccagtggctgtgggcatctttccttttcctgccataggctctaggccgtgacgggagctagcttctcgcttgcgtgcgtgcttgctccggctatcatattgcctgcctgcctgcctatgaacctctccggccaatggaggagctacttcttcttctctagcctttctcgtctctgatccacccattgaccttcggtgcgcccggccactctgcgccggcctctcgcgtgcgtctctcgtgtgagtgctacaggcaagcgaagcgatggacatgaacgagagcggcgagaaagggatggagggcaacgcgtcctccggcatcccggtggactggcagacccaattcagcgccgccgccttctcgtgcgcgccgccgccgcagcagcagcaggttcccatgatggactccgccttcgcgtccgccggcctgtgggcgtccacctcccaggccatggcgctctccgacgcgggcggaaggtcggccgcgcgggccggcttcttggcgccggtccccggtttcctcccgcagggcctcgcccatttccccgtggactccggcttcatcgagcgcgccgcgcgggcttcctgcttcgcggcggcggcggcggcggggtgatggctgccttcggcgcagcagctgatcatcaacccatgaacagcgcgttcagtggatcctcggaggcgctgctggaccaccagaggacgaaggacggcagcgacaagggcgagccggagctcggccggaacggccacgacggggttctgagctcggaggcggctgctgcgggggactgctcgtccaaggggacgtccgactccaagaagaggagaaggcctaacgaggtgatgggaggcgatcaggtccagtcgtcgaacctgcccgccgactcagcgaacgagagcgtgcacagcaaggacaagggcgaggagagcagcctggcaacaaccaccaccggacccggcaagtcgaaaggaaagggggcgagagagacctccgagtcccagaaggaagactacatccatgtccgagctcggcgcggacaggcaaccaacagccacagcctagcagaaaggttgaggagggagaagattagcgagaggatgaagctgctgcaggacctcgttcctggctgcagcaaagtcactgggaaggcggtgatgcttgacgagatcatcaactatgtccagtccctgcaaagacaagtcgagttcttatcaatgaagctcgcaacggtaaacccaaggctcgacctcaacatagaagggcttctatcgaaagatcttctccgcttccctggcgttccttcgtcttcccttggattctccccggaaatgatgcacccacagctgcagctctcgcagccaggcctgatccagggcggcgctgccggcatggccaatccggacgtgttcaggagaatcatgcaggcacagttaagcgcaaaggacgggtctcagatgccgccccacgcattgaatggggcattcagtgacgtcgcgcagcagcagatggcgtacccgtcgtcccaggacctgagcatcgggccgtcgcaggacgggtttcaaatgtgactgaacatgcccagctgcacatactagtaaaagatgcaaaaaaagggcttcttccatctgaggagtatctgatcggcgaacgtgcgggcgcgcagggggccgcgtatagctgcctgctggtgccgggagcagcagcgcctgctcagcgcgacgccttgaaccgcgtcgacccacggctgtgcctgtgctgctgcatcggtcaggtttttttatcgtgttcagaaggaactgaggaaaagctcgtggcgctggcctgtggcgttgcctggatagatggctggaaattctgtctgtttcggcggtcgcgtgcattcatggcatggcgcgcagtgcagtaacagtgggctgcgtgttggcacttggcacagcgaccaaatgagctgctgcaggatgtgatgcaacgcgaggagccttgttttgttagtagtttccaatgctttttttttgtttttgtttgcataatagctaagggtgcaagaaaacactcataaatttgggggtggggggcggcggtccggcgatgtctatgttgaaacatcatacatttggcaaatttctccttgcgccac

SEQ ID NO: 44063 - DNA, 1587 bp, Zea mays
  Clone ID: MRT4577_140190C.1
actgcctacgggcctctgctccgctaaccgcctgcctgccttttcttctctcgtccaccctaggtctcagtctctggtcgcgctcttgtggagctactaagtgaccgtcgcgaccgccctacgccacgtgctcgatccagcctcgtcggcttcttcgcacccgtcaccggcggtcagcacccaccagcatctgggagctgtcccggggtgtggtatatgtgttagctttcgtcttcgcctcggtttgggagccgcatggatcggggcacagagattccgtgtgatcggggcacagagattccgtcgtaaaaaaatcggtatggcgttggtattcgttctctcgccactagccgctagtgaaagaaggggatatatattcgtgtcctccgaattagtccttcctgcagtgtcctcgccgacagggaaagccgtgttgcaagaaggggaattccgctgcgagatccgtgaacggttcagagatggcacagacggtgttcaccccctctttggaagcgatgaagcatgtcaaggcagagaacggagtcattctcaccaagcccttccttgatgtctgcaagcaaatattgcctgtcctcgataaatttggaggtgctatggcaattgtaaagagtgatatcggcggcaatatcacaagactggaaaacaagtatacttcagaaccatcaaagtatgaacacttgtacagcatggttcaggaagaagttcaaaacaagaccgcaaaaggttcctcaagctgcacaaatgggcttctgtggctgacgagggccatggacttccttgttgagttgtttcgtaacctgcttgagcatccagactggaccatgggtcaatcttgcactgattcatacaccaagactttgaagaaatttcatggatggcttgccagttctagttttacggtggcaatgaagcttgctcctaatagagagaaatttatggaggtcattagtggaaccggtgacatcaatgcagatattgagaaattttgcacgaccttctctcctttcctcaaagaaaaccacaactttctggcgagcgtcggtcttgatgatctgaaggcttcatagatcaatctccatgctgattacaacaaaataagcatgtcttacgaaactcaaagtgttgccgagggtatacctgtttcccgtagccatctcccccttgaaaaactttacaagatgataataatttttcagcatgattgaccatggctacttacgcagagaattgacaccactcaacaaatttagttaccgaactctcgatcctgtgttacagcaaatcctatggttatgtggaactctggtgctgtaattctcttgtatgctacccagtatgccgcaggaaatcataattcggtgttccattgcagcaaaaaaaaaaaaaaaaaagtaggctacccatattgactttgtggctcagcgtggaaccgacttccaacacagttgagcgagaacatctagatgacataatcatttaattggtgccaatatgtatttagagaccaaatttagcagggagactgctgactattagcaagtaacatgcattaactgattccaacct

SEQ ID NO: 44064 - DNA, 327 bp, Zea mays
  Clone ID: MRT4577_140191C.1
attcataaattaggcacaggttcatttatatataccattaatattcatttttttttattacatttttttactccaattttacatttcttttttgaaaaaacaacattaacaaaaacctttcagatttttaaggggaatgggggcatcatatcatactaacacaaaattatcgtatatacctcccccccacaaaaaatttcttttttcttcccaaagggagattcaatttacaccacaaaagtacaaaaccccccttccaaataaaaacaaaatattttccctgttcaaaaaaaaattttttttattttttgctccccaaacaaacaa

SEQ ID NO: 44065 - DNA, 515 bp, Zea mays
  Clone ID: MRT4577_140192C.1
ttaaaaaaaaaaaaaattaaaaaaaagagagggggggggggggggggaaaaaaaaaaaaaaaaaaaaaaaaaaaaaaaaaaaaaaaaaaaaaaaaaaaccttactattcacaaacatccaaacttctttaactctggcttaaatatcacttaaccttttcttcacctttcccccctacttaaatcaccatgggggggggggggggcgctgactttacctattaaaaaccccattctcccccatcccatttgcgttaaatcgcatagtccctaaccgacctcccctcttaccccttccccccactcccttcgcctttttccccactttgacaccctcttttaacactcattaactccttggtttctggcgtttacccccatagacttctcttttccccccacccccccccttccccttcctttcttttttttccctgcccttttcccttctttcccctgctttcccccaactgctgcctcctttccccttttttttttattccttttcctcccttt

SEQ ID NO: 44066 - DNA, 133 bp, Zea mays
  Clone ID: MRT4577_140193C.1
acaacacgtacgaccactcttgaggcactttatttccagagacagcaggtctgccactcgaggggatctaaggtgacctacgcgggcttccaacaccatcgatctacaataggggcacctaaatttaattcat

SEQ ID NO: 44067 - DNA, 305 bp, Zea mays
  Clone ID: MRT4577_140194C.1
ggcagaatgagaatgttaagggagattgttggatgtttggagtttcattatattttttgtttttattttttgatacctaggtgctttttaaaatattcagacaaatatctatcttacattgattaaacccgtgtaaattcatttgcagtatctacatcgaatgtcaaaaaagtatacttatttttgttccatacttatgtacaattttttccctcttcaggctttttcatttacctttttgaaaaagcacttactctccccttccctatcacccctcccccaaggtttctttatttaaattttta

SEQ ID NO: 44068 - DNA, 1104 bp, Zea mays
  Clone ID: MRT4577_140195C.1
tccacgcgtccgtggaggggcgcaagcaaggattagctggctagcccggcctgtagctccgagatcatgaagcgtgagtaccaagacgccggtgggagcgacggctacatgggctcctccaaggacaagactgatggaggcggcggcggggacaggggaacaggaggaggtggacgagctgctggccgcgctcgggtacaaggtgcgttcgtcggatatggcggacgtcgctcaaaagctggagcagctcgagatggccatggggaggtgagagatggatctctaccccgcaatttggcgccattgttgggcgggttttccctttccatctcccttcgccattggtccctcgctttgtcttgtgccgcctcatgtttggctgtttctacgagctgggttttagcggcgcacagaggggaagagaaccagcgagagagagagagacggaaagaggaagatgagtcaggagcctgaggatcctggtgaagttcctccatgagacagcgggtcacgtggtgacggtggagttgaagaccggcgaggtgtaccgacggtccactcaagtgcgaggataactagaattgccagctcaagaacattaccttcaccgctaaggacaaaggatcaactattggagttggctgtggtcgtgctgttgcaatgcgtgctcagagttcaaaagttgttcaagatggcagtaatccttacaccttggaagggacagatggctagaaattttagcaaaacttcagcgtacgtatagaagcagatgctaacagcaagacatggggagggaaggagaacggatgcagctactgaatgcatagcttgcagtagtagttgctactgcatctgatccagttcctaatgacatttatttggtcccctcatttatgtgtgatgacagttcatatttttttattgtcaagtacctcctccattctattttattttgtcgtgttttagttaaaaaataaactagccggcgacgaatattcgactccgggcgcacttccgggcgattcctcagccttttagcatgccgtcccgagtgtaaataaaacaatatatacctgttcttcctcccgaaaaaaaaaaaaaaaa

SEQ ID NO: 44069 - DNA, 500 bp, Zea mays
  Clone ID: MRT4577_140196C.1
agggccaaaacccaaaaacccccctgaaaactacgggtacaaatgaaaaaaaaaacgacccaacgaaaaaacgggttttttggaaaaaaaactaccgaaaaaaagggggaaaaaaattcaggaattccccaaaaaaaaaaacaaaacacttttttgggcccccaaacggggttgggggaaaaaaaaaggaaacaagcttgggggcccaaaaaatctctttggggccccggccaccaaaaaattgctgggggggcccgccccttggccaaaccaaattaccaattataggggggaaaacgggttcgggttttttcgggttttcaaaaaacggtttcaaaaacaaaaacgggtatcggaattttaaacccgaaacgggattaaaaaggggacaaccttttacccacccgtttttttgtttacccaatttaaacggaatttacccgttttaaaattcggaattttcccaaacccaaaaaaaaaaaaaaaaaaatttcccgccc

SEQ ID NO: 44070 - DNA, 1280 bp, Zea mays
  Clone ID: MRT4577_140197C.1
ctcgagccgattcggctcgaggttttagcggcgcacagaggggaagagaaccagcgagagagagagagacggaaagaggaagatgagtcaggagcctgaggatcctggtgaagttcctccgtgagacagcgggtcacgtggtgacggtggagttgaagaccggcgaggtgtaccgacggtccactcaagtgcgaggataactagaattgccagctcaagaacattaccttcaccgctaaggtatactctctctgcctgcgctaccttcggatccgagatagaaccccacgggttctgttcccctgagtatttttcttcatttttgttgattaatctgcaagatggggacatttcgcacctggagcatgtattcatcagaggaagcagagtgagttaatggaaaaactagatttatttcgtgatgcaatgttgttgagttatggtggcctaattatttttgtgactgatgattcctgtactgcttagtgtcttactgcgagaaaaaacaatggtgatatggtacataatttgcttgttttgtcgaatgtaggacaaaggatcaactattggagttggctgtggtcgtgctgttgcaatgcgtgctcagagttcaaaagttgttcaagatggcagtaatccttacaccttggaagggacagatggctagaaattttagcaaaacttcagcgtacgtataggtaaattatataagctgaactgacttgacaaattataatctctaaattattttgtttgcaggcttttgtatacgaaattaaaaatatagaactttgatatatagaaaaggatctgagtttagcatatgtcttttgtatatgtaagcttttatattaagctctcacattgcaccgaacacatgtagctttgttccatttaagggcttgttcggttagctctcaatccatgtggattgagcgggattggatgagtttaaatcccaaacaagtcaaacttcttcataattttttccaatcccatccaatccatgtgtattgggaataaccgaacaagtcctaattgatttataagatgtatgcattctcttatctgttctttgtaatctctcctaaaagaagcagatgctaacagcaagacatggggagggaaggagaacggatgcagctactgaatgcatagcttgcagtagtagttgctactgcatctgatccagttcctaatgacatttatttggtcccctcatttatgtgtgatgacagttcatatttttttattgtcaagtacctcctccattctatttt

SEQ ID NO: 44071 - DNA, 290 bp, Zea mays
  Clone ID: MRT4577_140199C.1
tcaaagacttccaagtggtaatgttcattccagtaaataacatcctttttgacaaaggggggcgaatatttgacctggttgatgcagactatcttaggtatcatgttatgcaagagtttgatcatgcaatgcatcatcttgagcaaaaatatgaatacatgacatctgatcaccattatatttcccggaaacatgaggaggataaggtgatcgttctcgaaaagggagattttctttttgtgttaaacttccactgttacatcagttatttttactacctgtattggttg

SEQ ID NO: 44072 - DNA, 773 bp, Zea mays
  Clone ID: MRT4577_14019C.1
gccaaatgtatgatgtttcaacatagtacatcggcgccggaccggcccccacccccaaatttatgagtgttttcttgcacccttagctattatgcaaacaaaaaaagcattggaaactactaacaaaacaaggctcctcgcgttgcatcacatcctgcagcagctcatttggtcgctgtgccaagtgccaacacgcagcccactgttactgcactgcgcgccatgccatgaatgcacgcgaccgccgaaacagacagaatttccagccatctatccaggcaacgccacaggccagtcctcctccgtccgtccgtggcgggtgggggcgccacgagcccacgagcttttcctcagttccttctgaacacgataaaaaaaacctgaccgatgcatcagcacaggcacagccgtgggtcgacgcggttcaaggcgtctcgctgagcaggcgctgctgctcccggcaccagcaggcagctatacgcggccccctgcgcgcccgcacgttggacgatcagatactcctcagatggaagaagccctttttttgcatcttttactagtatgtgcaactgggcatgttcagtcacatttgaaacccgtcctgcgacggcccgatgctcaggtcctgggacgacgggtacgccatctgctgctgcgcgacgtcactgaatgccccattcaatgcggggggcggcatctgagacccgtcctttgcgcttaactgtgcctgcatgattctcctgaacacggtcggattggccatgccggcagcg

SEQ ID NO: 44073 - DNA, 1226 bp, Zea mays
  Clone ID: MRT4577_1401C.1
ggcggcgctggacgcgtcggtgcgcaggggggagaaggtcgcggagaaggacgtggtgcaggtgacggagctgctaatgaacgagctgctcaggctcgacgccgtggtcgcggacggcgacgtcaaggcgcagaggcggatgcaggtgaggagcaaggatccggcagcagtagcacatgaattccagcccgttgaattccactgccgcggctgacttgagtctgaaccggttccggccgccgccgtcgcaggtgaagcgcgtccagaagtacgtggagacgctggacgcggtggcggccaagaacgccgccctcgtcggcaagtccggcgagaaggccgcggccaagccggcgccggcgccggcgccggccccggccccgccgccgcggcagcagggacaggggcagacgcggtgggagatgttcgacctgctgtcgtcgctgccgtccacgtcctcggcctcgtcaacgacgaccgtgagctccacggcgtcctccggcgcgccgccgccgagccgcccggactggatgctcttctgacgagggagggacggcggccccgcaccggccggccaccggcgcgaaagcgaaaggcgagtgcttgatgcggtgcgatgcttgtgtgccaaaaattgcaccccaaatctggtagctcgtcgagtgtcctgatgaggccatgattgggcaggcgggggggctatctagctttggccacacagctgcattgcgttgggctgcatggtaccgtaccagccaattcgagttcatcaatcatgtggtgtgagagtattttttttcttcttcacctctcctttttctttccttccttttgagtttttttttccttctcctcctcctcctcttcttcttcttgttcatggaaggtttgggattcttttggagtgcatactatactattcagatagagaaacagaaagatggagttggttagggcaagtgaaacgtcttcagatagggaaataaataaaactagtcggtgtccaaactctgaagaaacgaacaaagaggtgcatggattgttagcttatcacactgttgtttgagagtgatgagagatgtatcgatcaagaggccacttggtcggtagtctgtcactccttgttgctgccgagtttcttcctcctcctcatcatcctgtataatgtaatcaagcaataatacaaaataaaaaagcgttttgaatttcccaaaacaacaatggaactg

SEQ ID NO: 44074 - DNA, 260 bp, Zea mays
  Clone ID: MRT4577_140200C.1
tttttattgattttcagatttttgaaccagggatcaggacggtggtgctacttgactggggaatataaaggacttgggattggagcttttatgagcactgctacttgtaatggccacatagcatggctctgtcataattctggtgatcaccacatccaccatcagcaagctatccggttgcctatgaagaggcagcctcagacaagctcctgagctgcaacatgcctagcaatcgggaccctgaaaggggagcaagaaac

SEQ ID NO: 44075 - DNA, 586 bp, Zea mays
  Clone ID: MRT4577_140201C.1
ataaacatctacaccgtagatcttagatccgaaggtcgttggcgttcataccctggtgatctaatcttgcgcgtctggtgttgatcggacggctcacatgccgcgatacccttcgcttggcaatatctcgaaagagtccctgaacttcttagtaatgaacccgccgtccgcaccagggacgttctgagtcttagaaaacttgtgctgagacccctgcagattttggtaattgtgcgcctagtccaaagattagaaaattcagaaaatacataggaaatggatttttaatatgaagagattgactagaacttgcaaaattcctagaaaattcatatggagtccaaatttattcattctaatttctataattttataaaattattgtttatcaattagtgctactgttttgacatgaaagtcacattaaaatttatattctatttaatcttgtataaaacacatagaatctttagaaaagcataactcaaaatctataactccgatttgatctgttcaagttgcgttagtctcgtataaatatttactatgcaataaccgtatttattataccatgtcccattctttt

SEQ ID NO: 44076 - DNA, 543 bp, Zea mays
  Clone ID: MRT4577_140202C.1
agagcacgcctcggcgcgtattttattaagcagaaagagtttacgagtacaacacgacagctaggtaatcctggttaccgtagccacaccacccccctcaaacacaaaagggattacatcgagacacaacctacgacagagatcacaagggcctaagctagacgggcagccagcgccacaagacccctgtaccccgctgaacaccacgagtttagctcctgatggatgtcatccgcgagcttcgacgctgacctctgcaccccttgaaaggttctaacgttcctctccttccacaggttccaggccatcagaaaaaagaacgagtcgaagccagccctgaaaggtttattgaaggtcttccttgccttcagccaccagtcgaagatcggctgctcgacgacgagaagatgtcccagctgtaacctacgcaggaggattccccagacctccctgctgaagacgcaacccaggaccaagtgatccagcgtttcagagctctggtcacagataatgcatgtgtcgctggtctgcagcccatggcgg

SEQ ID NO: 44077 - DNA, 422 bp, Zea mays
  Clone ID: MRT4577_140203C.1
gaaaaaaaaaaaaggaaaattttgatgccttatgtggtattaaaacataaaacgccctacaaaattccaaacattcgattttaatggcgaatcaagtaagctaaggcgtgtaaaaaaacctttttatttattggtgaaaagcgcttaattgttcggggtttatacatcccaaaccaaataaatgcccattttgctttggttttgaacttttttttgattcccttgacgatagatcaaaaagaggcctcctcctttttttgggttcactcaaaaccattaaaaaacccatttacgcccgcgacataacaccccaggcacggattttgttgtcggtgtaaccagcgaacaaagtttggccattagcggaccaggcgagggaaatacactcggggtcacggttttttttgcccttttaaacgtac

SEQ ID NO: 44078 - DNA, 295 bp, Zea mays
  Clone ID: MRT4577_140204C.1
ggagcggcgtcgtccctcgactgctggtagtgttcgtgttggaggagtcccggtcgcttcggcgccctctcccgcacctcgaagctccgaagcggcagatggctcaaacacaccctcgacgccggcggtggctccctcagcggagaagccgcgttcgctgcggttctccttcggcttgatgacgggcgctggggagacccccacctccaccaccacgccgaacgacgtcgacggaggcgagaagcggcggtctaggaagtcttcctttgggatgaagaaccctttcaacggggtc

SEQ ID NO: 44079 - DNA, 1093 bp, Zea mays
  Clone ID: MRT4577_140205C.1
gctcaacggatctatgacttcagtctgtaatcatgtcaggcaagtatatcatttctgctattcttggatcatttgcagttgcatgggcttgtgattattatgtttcagacaaaaagctatttggaggttctacccctggaactattacaaacaatgagtgggcagaagagactgacaaaaaattgcaggcatggcctcgtactgccggtccaccagtggtcatgaatcccataagtcgccaaaatttcattgtcaagtctcgcgctgagtaataatttttgttgattgattttgagttaattggtgcttggtcatgccatatgtttccataaatgatgataatgcttgaggtaaaactcttacagttcaattagtgttttgaagtttaaacatgtgaatgtgtttacttgctaaataaaatgttacttaagcaatcatggattgattaatgcatattcatgtattcaaattctgttagtctttaccttggtatgaatgggaatcaatgcccaaaattatgtttagcagacatttgcaatttgccggcatatcaaatgttactgaagcaatcctgaattaaagaaaaaaaaaaaaaaaaaaaaaaaaaaaaaaaaaaaaaaaaaaaaaaaaaaaaaaaaaaaaaaaaaaaaaaaaaaaaaaaaaaaaaaaaaaaaaaaaaaaaaaaaaaaaaaaaaaaaaaaaaaaaaaaaaaaaaaaaaaaaaaaaaaaaaaaaaaaaaaaaaaaaaaaaaaaaaaagccccccccccccccccccggtgaaaggaaaatttttgggccaccccaacaaaagggggggcccccaaaaaagaggaggtgtgaaaccccccccccccccccccccaaatggagcccccccggccccccgaagaaaagggggtcaaaaaaaaaagggggggggtcttccccgaacccggcaaaaaaagggaccccccgcgaaaagcaagtcccccccaccaacgcccccagggttgtgtcaatttaccccccccccccccgggagagaaaagaaatgaagcccccccccccacccccccccagggggccccccccggaaaaccccccccctttttt

SEQ ID NO: 44080 - DNA, 357 bp, Zea mays
  Clone ID: MRT4577_140206C.1
tacattacgtcacatgcactcctacctaacctcgaattcaattcgagataaaaattatgtccatctatactggcaaggctggagggtgtggtctaatggccaggccatcagttatccaaaaagccctcaatcttctatttataggctagcctaggtctggaccagtatgcacgcacgtataatcaattcataggaggatgagccattgacggagccaagtacaggcatcactgcaaacaacgaaagcttgtgagcaacttttcaagcctaatcagctcatttcatatggcagcgctccaagacggtttactacacatacccgcacaatcagatctgctgactatcacaacttttcat

SEQ ID NO: 44081 - DNA, 668 bp, Zea mays
  Clone ID: MRT4577_140207C.1
ccggccggggcaattgagagagagatcaccgtcgaaaagcagtctcccaattccaccgaataactaataacatctcctcgagcgcgaggccggcttccttggaccaatccagcagcaagcgacccggccagcaccagcagccatggagatgaagaaggtcctctgcgccgcgctcgtcgccgccgccggcgcggccggcggtgcggctggcccttccgccagcgccgccgccgccgccgcagtgcccgccgccgcggcgctcgtcgtctccttcctcgcctccttcctccactgagcgacgtaccgcgcggagtgcgggaaacctgggatggagcatcgtgtttggttcacccgattaataattaattaatcgttgttttatttatttatttattgcttgcggttgcctaattatgtgatcgtctgttgttccttccttcgttccttccttggtgatgtgtgggtcgccaagggggtttcgtttctgtaatcctgcctgatcgatgctaatactatgatcccaatttggtttttgcgatccaaaaaatttgaaaaaaaaagaaaacagaatgatgccaaaaaaaaaaaaaaagggcagccgctcgacaaacgcttgataacaaataaatttataaaaaaactattgagaaaaaacattaaaagggggg

SEQ ID NO: 44082 - DNA, 340 bp, Zea mays
  Clone ID: MRT4577_140208C.1
tcagctcacctcctgcggccgccctttgtttgtttctttctggtggggttttttactaggagggggcgcttaaaccacacccagcagaatccacggggtaattgcaagacaagatggttacctccaagatgaatgacctcaacaagattggtcttggcctgacaagcatttgaaatattcttctcattcatgggaacagtcatcttctttgacaaggggctcatcacaatgggcaacatcctaccatctgtcatgtaagggtttgacaattgggctgaaaaaaactcattagacgatcatccctgacaagaactacaaagggactatctcattaagggcc

SEQ ID NO: 44083 - DNA, 350 bp, Zea mays
  Clone ID: MRT4577_140209C.1
tttttttttttttgttcgaattctatttggttttgtttttgtgggtgttgttgtgtctgtaggcagtttggttacagtacagacttatattaactttccttccgctattttatctccaagaagactcactaaaagaaaggttacctgagcccgcgggactggggtctaaaaagatctcgacaagggttacccaagggggaagggggcgccagacaaaaaaggaaacagcggggggggggggagggacaaaaacgaagggagggcaggcaaaacaacccctggggacggaggtgcgcgcgacagggcgacgacaagcggggaggcacccacgcggaggccgcagctggggc

SEQ ID NO: 44084 - DNA, 229 bp, Zea mays
  Clone ID: MRT4577_14020C.1
gggccgggatgttgcttatatgcttacttgtgatctttctttttggccaggtgaacaggaccgcgcatctcggcatctgcgactgcattaagatcgcaaccatgtgcctgcctatctctatctgtgagtcaagactgttgcttgtttcgtgtgctacaaagcaggtctacggcaccagcaactaaaccttattgttgtactattattattagagcatgaaccttattct

SEQ ID NO: 44085 - DNA, 570 bp, Zea mays
  Clone ID: MRT4577_140210C.1
cacgcctgcagaaccgggcccctattacacggtcgacctcagcgttcgcaactacaacaactaagagctcatgaaaccttgtctggctaactctcaaccacaacacaaaataccatattaaccaaacggttgcttatgaaccctgctgattatgggccacaacaactaccatcagtgagataactgctgtctacccgccgaaacaagttggcattaaaccaactggcagcattagaactctgcaggttatttacaacaggcaacagcgtaccacgcattaacggcaactacctgatgtgagccctgaaggctaccttgacacaacaacactatgttgcctgaatacctgcacgctgggcctaacgcttaaaccctcttacaactggcacacatgctgccatataaccaacatgctttgacaaacccaacaactttctaccaacaacccatcattggcggcgccctcttttagattgcttatgagtcatagggcaataatgaagaaacttggatgatggataggggttcccagaaataataagaccatttgtaaaaaaaaaaaacacaaaa

SEQ ID NO: 44086 - DNA, 378 bp, Zea mays
  Clone ID: MRT4577_140211C.1
cccaaacatacgaatgacgctaaaacgcgagcaaaaaaacataaagggtgatatactgtacttgaaaattgtcaatgaaaaaaaactattatataccaaatgacactacttaatagaatatgagaatccaaacggctaaatgggtgccatttgttgtgtgtacacacgctactttccattattctacgacttgttccgttgttatgtgggaccctttcatattcccatggtggcgcttttattaaattgtgtctttaggaaatatttcgtattttcatatttatatcccttggtgaaaaaaattcttttattatatgtggcttaattttttatgtttccctctcttttttatctctttctaatacaatgtctatcttt

SEQ ID NO: 44087 - DNA, 258 bp, Zea mays
  unsure (1)..(258): unsure at all n locations
  Clone ID: MRT4577_140213C.1
aannncaccnatnaccaaaaccgtggggggggtcttttttttttttcgagaggaggtgggtctttancgaggggggcccggacttctccttctcctcccggtcacacgtttcnatggggttnaggggccccatttgggctttgaccccccctaggatccacccctccangttgttgctttnccccgggcttagcccggggcccttcttggacatgcgctcctccccnagcgccagcgctggccccttctactcttttt

SEQ ID NO: 44088 - DNA, 360 bp, Zea mays
  unsure (1)..(360): unsure at all n locations
  Clone ID: MRT4577_140214C.1
cggacgcgttgtttatgaggaatagaacagatngagagtgactgatttgcttcctaactgtaagtgggccgcggacgacaacattcatccgctcccaccattcccttggatcagcttgcctgctcccattgcccttgtccttcaacaagcgcaaatagggggtaatgggccctatgggatgacccgacggcaacagagaccgtggagcaggaccctaccacccataccactaccaggcgcttattgccgccgtgcataacctaaatcaggggctgcaccccttttcactacccttccacagtgcctttgcacgcaggaacggcagccccctcccgccggaaaaagacctgggactaatgc

SEQ ID NO: 44089 - DNA, 268 bp, Zea mays
  Clone ID: MRT4577_140215C.1
cccacgcgttcgaacacgcgtacgaccacgcgtacgtcgcaaaatggtcacttcatgttgagtttagtggatttggatagcaatgctggaacaagtctgcttctgatccactatgccagagggaggtctacccagactatggtcaatgagaaaatggtatcatgtcaagcagcacgtgttctgctggccaagggatcaatgggcttgttactggtaaggattaatgaataggtgccaattactattatatacttgaattgctgttatt

SEQ ID NO: 44090 - DNA, 364 bp, Zea mays
  unsure (1)..(364): unsure at all n locations
  Clone ID: MRT4577_140216C.1
agagagagacagaagcaagggacagcggnggaacaacgcccacggagaacgaacgcaagcacancaccggagggggggggacggaggcanacgcagggcacacgggngagcacggagcaccggaggangcggagcagccagaggccgnccaccacggggccgcgccgggccggaagncgggcnccacccacgggacgaagaggaccgggccgncggcgacggcggcgggaaccagggccagcgacagaggcgccggcccacggaccaccnggcccnggncggnggacggggagccggggcacgggcagacgaacgggggcgcggcgccggcccacggcacgacgcagccgaggggagcgcacac

SEQ ID NO: 44091 - DNA, 452 bp, Zea mays
  Clone ID: MRT4577_140217C.1
tgagtaattccttcaattggtacaatttcacattttcatactttatctgtaccaaggttcaaattgtagaacttaatcccctgacctcacaagttcaagtgcataagctaaacaagtattcaacacttgtatgcacacatttagggggagaatggtctataatttgaatctttgagactaacttcatttccaagtctattatgtgtgtagtctcaaattagaaaggaatcttcgggcaaagacaatcgcttccactgcaaattttgatgggtatcaaaaattctttgctccaataaatgtatcttttatacatttcataagataatgagtttctcttgtatatgctactccaaaatcatctaaaactggtaaacatgtatcacatccttttggattgcaaatgtctaaagtagcatagcttataaattctcctatttagaacttaattgatt

SEQ ID NO: 44092 - DNA, 1488 bp, Zea mays
  Clone ID: MRT4577_140218C.1
agtgaaagtctcggtagggaaatgcatacagaagagtaaagaaggtcgtaagggtgggtttgaagcgtccgtcagtaatcgaagacacatggacaaaaggtagacacggtaacactgacagtcctgaagatggaatcgttggaaacaaatacaaacataaggccgatgatgttgttataagcagccttgaagataaagatatgagcattaagtatgaacataatggtagctttagatttgaggaacttagtaagagagatgaaaaatgcaacaaaaaggatgacaacaatattcttgaacttgagagcatagctaggggatgtgaacaggacagaatcaaagatgactgcggaaaactgctgcactcagatagtagaaatggcaacacggtggccaagaattattcatcagttaatgaacacacaaattcaagttctcttgtttcctctgtggccgaggtagatgatatacagtcttcagttggcaagaatggggattcatccttttttactggtttcctcaagaaaggtttaaaggacctttctttattcaaccagtctgtagacagtgctaaggtttatatcaacggtcatccaatctctgaacgagctctccggaaatcagagaagaaagttggtcctgttggccctggttcatattggtacgactaccgtgctggattttggggtgtcttcggacaagagtgtagaggcatcataccaccattcataaaagaattcaactatccaatgcccaagaactgcgctggtggtagcactggggttttcgtaaatgggagagagctccaccagaaagattttgatttgcttgtagggagagggctccctcgaatacctggaaagtcatattctgttgagatatcaggaagcgtgatcgacgatacgactggcacgaagctacgtggtcttggaaagcttgcacccacaatcgagaaaatgaaacgtggctttggcatgcacgtccccgaagagacaaagtagctctatggatacttttgttgatgcttctgttgaaagttttacacacctagaaagctgccaattaatgggagtccaggtttgttgatctgttaggattggtgacagcggtagaaaggctttcacgtcttgaagctcgacagcgatgcagcctccggacattgagagaagaaatggagagatgtcataactcatacgcattcgcatcatcctacttggaattaaatgtcgtgtttccatggtgacagctccggccggcggcatacagttcctgtctccctctcgtttgtaaaattcgccacaccgtaggtgctaggtagcattcggagcatgtatccgtttcgggtttgtgatacagtggcgcaactcttcggctatataaatgtacctagtactttgtaacatgttgtccagtatgcaacgacgcatcagatttgtatacctctcgaattcgagccagagatttttaggatatgtttggtttgtgcct

SEQ ID NO: 44093 - DNA, 588 bp, Zea mays
  Clone ID: MRT4577_140219C.1
tttttaaaaccccttttttttttttttttttgggaacattcattaattaaggaccccccagttttgaaaaaacaaattttacttcctacaggaaaaaaattaattctaaccttacttttcctttttcctaaaaaaatagtttatttttttaagaaaacctccaaggccgttggagccctataaaaccacaaacttggttaaaaaaagaccctaaaaacccggctttccagggaacgggggggcagcatcctaaaaatttttccccaaattggaaaaaaacggccccagacccagcttggggatcaacaaggacctttccctttaccaaccaaagttggaccccaacgccttatgaaaacccttgacctaccccccggaaaaactccgaagggtttcttttcacgtcctggaaacttccagggccagccccatgttaagaaaaggcatacaccgggggggttttttatagggacccccacctcagtaccaggctcaaaatttttcttaaaaccgcccagttcacctttactaaagcccttaccaaagaagggccctccaagggcaaaggcttcatagttgggcaaatcc

SEQ ID NO: 44094 - DNA, 684 bp, Zea mays
  unsure (1)..(684): unsure at all n locations
  Clone ID: MRT4577_14021C.1
acgctccccctccccgccgtctccgcactctgccgccgcagccgcagccgcagccatgggcgcgtacaagttcgtgtcggagctatggaggaggaagcagtcggacgtgatgaggttcgtgcagcgcgtgcgttgctgggagtacaggcagcagccggccatcgtgcgcatcaccaggcccacccgccccgacagggctcgccgtctcggcttcaaggccaagcaggggtatgtggtctaccgtatccgtgtcaggcgtggtggcaggaagaggccagtgcccaagggtattgtctatggtaagcccaagcaccagggtattacccagctcaagttccagaggaacaagaggtctgttgctgaagaaagagctgggcgcaggctgggtggtcttcgtgtgctcaactcctactgggtgaatgaggactctacctacaagtactttgaggtcatccttgttgatgttgctcacagtgctgtccgcaacgacccaaggatcaactggctctgcaagcccgtgcacaagcaccgtgnagcttcgcggactcacgtcggcgggaaagaaattccgtggtctgcgtggcaagggccaccgccaccacaagaacaggccctcaaggagagccacctggaagcgcaaccagaccgtctccctccgccgctaccgttaagctgccctatgca

SEQ ID NO: 44095 - DNA, 628 bp, Zea mays
  Clone ID: MRT4577_140220C.1
tccggccgggattctcaaacgcggccgcattctgctgcgcgtcctttacctgaaccggcatgggctcctctcgtttacaatcgctatgctctattcctctgactttccacgcggtccgctccgcacttgaggacggaggacaccgaacgcgaagatgacagccgaggcctatttccgcacacacgtagagatggctgctgaccgctcacgcgacatgctgacgttcaagaccagctaggactatgagactcaggcagagaacgaaagacaccactttgaggaacaatgttactaggatcgctgatgacatgactagtcataaaggacctgaggggattattcttatcggagatccgatctcggtgaacgacactacttttaccgccacggaaagagcctcgtggacagacaactcgtactctcaacgcgtgatagagatagcttgcgaaacaaaaagctcatgaacgctctatgaagctacactagcaaggcaaaacagaaaggcacgaatagatttggaacgtctctgctttaatatgactacagagggctgctgccgcgatgaaacgccaagaggacatagctggctacgagcagaggatgtccgaagctcggtattaactgcaac

SEQ ID NO: 44096 - DNA, 332 bp, Zea mays
  Clone ID: MRT4577_140221C.1
ggatgaccacgaaaacgcagcaaccccgccgggggcccatcaaagggctgaaccgggtagaaccccaggcagagagaggccagacagaaggcaatggcagcgcaggagcacgacgggctagagcacacagaagggcatggcaccaggcacgggaacaagaaccgccggaccccggagggggcggggtaccacaacacatgcattgaccgagccggaggcggcagtcaagcagacggaccccacacaagccgggagaccagcgggacaacacgccacacagagacctcatgcaaaccttccccgagggggagaaggagactcaaatcggacag

SEQ ID NO: 44097 - DNA, 265 bp, Zea mays
  Clone ID: MRT4577_140222C.1
atctactgcagcttcagaatagtgggggaggaattcacaaaggaagggtggggctttgtaagttcatcgtgcttgttctctgtcttcattcacttcacttcatttgggcattcctgccatcgcatctcagggaagcacaaatccgtgcctggcactgtactggaaatgatttattctgctccactcttttcctttgcaggcattccagagagactcccccctcgctgcagatttatcgacggcaatccttccaatttcagagagt

SEQ ID NO: 44098 - DNA, 537 bp, Zea mays
  Clone ID: MRT4577_140223C.1
ctctacataaaaaatgatgacatatgatgcaactctgagctggggtgtggcatgcggcattcctctcattaacttctgcattattatcttggggtctatgagcttacccgaggacgaacctaatgaaccttgcatacataagtcattgatgcatctggcaggatgaatatgcatatacactactatctataatgagatgaatcatctgaccttaccatatgtgtaaaaaataatgcttggatcatcggcagcctatcaagagtcttattagagtccaacaatcgttttagttagctaacataatgctatatacatttgatgccaggatctgctttggaagaaaattaaatctcaacatagaattttctactgacaggtttatggtattttaatatctacaggttgcggaaactgataccattgtgactcaaatgagagactcgcacttatcatatagatgccactagaaccaaactggaaatactgtcacatatagaatgataaacggcattaattgaatggtgtatgcaactatcg

SEQ ID NO: 44099 - DNA, 333 bp, Zea mays
  Clone ID: MRT4577_140224C.1
atggacaacgacatgaaggaggtgaggcaggggcagcacagggtgttcccgtgggagatgctcaaggtgttcctgctgctcggcttggggctgttcgcggccggcgtgctcatggcgcggcacgggcacgaggtggcggcggacacgctgttccggccgtggctgggcgtctccgccgccgccgcggaggggctggagcactcgatgatggacgaggagctgctgtggcacacgttgttcgccccaggggtgcggcggtacccgttccagcgcgtgcccaaggtggccttcatgttcctcacgtgcagtccgctgacgctggcgccgctctag

SEQ ID NO: 44100 - DNA, 272 bp, Zea mays
  unsure (1)..(272): unsure at all n locations
  Clone ID: MRT4577_140225C.1
gcgagcaaagcgggagaagcaaacangaccaggaaacaggccgcnaagccggaanncagccgcaccaaggaaacagcncaggaancagcagaccaacggccgcgggggggcacagaacannaaagaggagcagaaaagggcacggccgggcggaaacggaaacccaaagggggcacaaagaaacccccaggccagggggggacggcggnccgggcccnaagagagncaagggccggcccacggggggcaagggcaaggcgcgngggagcaga

SEQ ID NO: 44101 - DNA, 259 bp, Zea mays
  Clone ID: MRT4577_140226C.1
ctctgcagctgttccgtaggattccggctctctgtggatggcaggtcatgtgaagacatcaatgagtgcagcaccagcccctgtagccaggagtgtgccaacgtctacggctcctaccagtgttactgccggcgaggctaccagctcagcgatgtggatggagtcacctgtgcagacatcgatcgatcgcgcctgcccaacggaggccacatctgctctcaccgtgcatcaacatccctggaagcttacagtgcagctg

SEQ ID NO: 44102 - DNA, 305 bp, Zea mays
  Clone ID: MRT4577_140227C.1
cccacgcgtccggttgaggcggtgaaacatgaaatttgcaagatcgaaaggtcaagagcacaaagaacaccgatgagctacgtccttcgaaagacaaatgctatgacatatccttagcatgagtcaagaaattaaaggacatatttgctagggttggggcatattcttctgagcaaaaattcatccacgacgaccctgatggagttgtccagtggatcagcgtggaagccgaagcttttgacgaaatattaagcgaacgaggacatttctgatcctttgctggagcacggggtgccacgtcgatc

SEQ ID NO: 44103 - DNA, 831 bp, Zea mays
  Clone ID: MRT4577_140228C.1
agggtctctttcttgtcgcgccgcccagatctctcgccccactccaaaccctagctccgcctccgcgcagccacaagccatgtcgtcgatgatgcaaccgcagatcatcctgctcaaggaggggacggacacgtcgcagggccgcgcgcaggtggtcagcaacatcagcgcgtgcacggcggtggccgacacggtgcggaccaccctgggcccccgcgggatggacaagctcatccacgacgacaagggcaccaccatctccaacgacggcgccaccatcatgcgcctcctcgacatcgtgcaccccgccgccaagatcctcgtcgacatcgccaagtctcaggactccgaggttggtgatggcacaactacagtggtgcttcttgctgcagaattcatgaaggaagctaaaccttacgtggaggatggagtgcattgtcataatataatccgtagttataggagcgctggcaacatggcgattgaaagggttaaagagctggcagtcagcatagaaggaaaaagcctggaagagaagaaatcattgttagccaagtgtgctgccacaacactctcatcaaaattgataagcggagagaaagagttctttgcttctatggttgtggatgctgtccttgctattggtcatgatgacagacttaaccttattggaattaagaaggttcctggaggtaccatgagagattccttccttgtcaatggcgttgctttcaagaagacattttcctatgctggatttgagcaacaaccaaagaaattcctgaaatcaaagattcttttgttgaacattgaggctagagttgaagtctg

SEQ ID NO: 44104 - DNA, 449 bp, Zea mays
  Clone ID: MRT4577_140229C.1
tgacacggccactcgcgctctgattctcgccttgcggctgtgggcagttgctgtctatatatataggcggcgctgggggaggggccgaaccacaactgccgagatggggagcgagcacaagggcaccacccttgttctatgctctgcctgctagcgctgcagagagcggaagtcctcaagtacaaggacccgaagcagtccgtggactgctagtatcaaggacctgatgggtcggatgactctcggagaaaagaccggtcagatgacacatatcgagagggaaaactccactgccgacgccgctgtccaagtactgtataggtagcgggctcacaggcggaggcaggctgccatgttcctcatgcagttgcccagacttgtgccgccatggtgaccgagatgcacaagggcgctgtttctacgcgtctgggtatagccgatcatctacg

SEQ ID NO: 44105 - DNA, 385 bp, Zea mays
  Clone ID: MRT4577_14022C.1
ggggcaaactgattcaaggttgggggcaggaaaaacaatttgtttttttttttggttttggtgatttttgttgggtttttttttctttttttgggcggtctgtttgttaaaaaaaggttcagtcaagccatgccttggggagctcatcatctttcaattttttttacaggatttggccagatgcacttttttattttaaaaaagacaaaaaaaaattcccttgaagaattcaacctttagatattttttggccccttgcccaaaatgggagccttttgcattgtgcatccccctgggtccctttttttgggcccatgcttgggtttttttggcgattctatccccccggtttttttttctctaaggggggggacgaacttgggac

SEQ ID NO: 44106 - DNA, 772 bp, Zea mays
  Clone ID: MRT4577_140230C.1
cctcgaggccggccgggatactggccgggactccggcccacaaggccacaatccaagccgaagaaccctaggcggtggcggcgcatcctgcataccccaccgtagtggcagcgagccagcgacctcgagtagcagcagaggctccgcaggggcgaaaaggtgtgaagcttccttcggagatcccagtagcagaagcaacgcaggcatcggcttgcgacaggagaggacggagatgacgcagaagcagaccctgttcaaggggcagagcaagaagaagactatccctcccaaccgccacggcaaggcgcctcatgttcgtaaaggaaagagagccgtcaagcccaccaagttcacaaaggacatggacgccgagaaggaactcaccaagttcatcaaccagtgcaacgaaataaaagctgcgaatcttgctagcaaagagggcggtgacctcaacatagtgaaggcggatggtgaggaatctaaatcaaagaaataggaagccagaaactgaaaacgagtgtgtgaaacgtgatgcgtggtaaactgttaatgcgatgtattctgctgaagaaaattcagttccgtatggctgggtagatgaacatgtttagcgcaaagtgacggtgtaactgcaaccggggtaatggcttgcaagttttgttctgtgccatctctatttctccaattattatattgatgaagtttgtgtgcaaaaaaaaaaaaaaaaaagcgcctagggccccccagcctccataatttaattaaaaataaa

SEQ ID NO: 44107 - DNA, 300 bp, Zea mays
  Clone ID: MRT4577_140231C.1
ccgtctgatccagcaaaaccttttcaagcaaggtacgctataaatcctcagcaatgccaggtaggtcatacacgcatgagcttcagaccagacgaataacggtacgcaccactcacgtacacaaatcacttgaagtacattcgttgctctaacttctaacagcgctgaacgactgttaaagctatctagcaactatcagtgatccaacatgtgaaaagccacacttactgtatagaccacacacattgcctgtctacatgagggatagtcattacccatgatacatccaataccacatca

SEQ ID NO: 44108 - DNA, 253 bp, Zea mays
  Clone ID: MRT4577_140232C.1
aaaccaaggggcaccaatacatagattaagaatccaatcctgttcaggggggctaggggcagaacacaaaaggggttatttgcttatatatacattaacacatgcaaacaacacgaagtttctaggaacgtgatataagaaaaaaacggaaaactttttagcggtggtgggagcacgctctcttgcacatttttccaaattttcctcgccccggccaaacattgagtttaagatacgcttgggggtggagggg

SEQ ID NO: 44109 - DNA, 398 bp, Zea mays
  unsure (1)..(398): unsure at all n locations
  Clone ID: MRT4577_140233C.1
ggtaccctncgaggnccgtgccgggnatcgatcatattagtggaccaccaagtagcatcataagaaggcacactggtgcaccaacagaggcacaacggcgaccaagatatcttacgttcctaggcttcttggtatgtgtggatgccgtgatcacgctacaacaatgcttacatgctcacatggttctatttcttcccttatacctctaaacattgcatcaatgatagcgtgaaaacgcaaaagcccaactctacaggcttcaacacgccaacaagccagggatgtaagcatcataactctagcaccttcgacagccgaacaacctacaaccgtatcttcgttggagccattgggacaaaccatacaggcacagacaactgctacaactcctgcgtagc

SEQ ID NO: 44110 - DNA, 122 bp, Zea mays
  Clone ID: MRT4577_140234C.1
acgattgttaggtcttggaattgattttttacctagcagattgcacaatctcatgtggggtaggtcaattataataggtgttgggaatgcacttatgataattacatgtattatcatgattg

SEQ ID NO: 44111 - DNA, 180 bp, Zea mays
  Clone ID: MRT4577_140235C.1
acagagagaaccggtaatggaacttggacaatgtcagttacaattcgttcctaggaacttcaataattgccatcctatcttttttagggggtgctgttctcaccactggagacatatgtggtttacttcacatagcaatgttggctgtgtaatttggcatgataagaagatggggcaact

SEQ ID NO: 44112 - DNA, 498 bp, Zea mays
  Clone ID: MRT4577_140236C.1
ctaccgtagcagacagcaggggatgcgtgcgagctaccataacatgtcttggtgaggagttcgatatttaccgctgaccatggcaacgggatcacgctgatctgcgatgcctgccggactgatttcgcgacctgtctgctgaatccagacgcctaccaatagggagagaggcttttcttataatgcataataagacggtgatactacacatgtattctttgggtgcatcaaaggtgacaccccctggaatcacacataggagggtatctatctttgtgataaggatcctaatggacactataatcaggattgcctatataaaactagagacaagtacgagataatagtcaaaaagatatgcgttcaaaaataatgattaacgaacaaatctctatatgacgaaacgatacactcgcatgcttatgatggccattctttatattatcgagcagcatgccaaatatgagcattctgcaccactctttgagcaaataggca

SEQ ID NO: 44113 - DNA, 763 bp, Zea mays
  Clone ID: MRT4577_140237C.1
ggaccactgccaacactcaacacagcacaggcatgttcgagagagatagagagagagagagagataaagatgacgtgcgtgggtgaccatccaccacaacctgccgtctcccccggcgtcgtttcccaaccaggtgttcaagatcttctgccgcgccaacgagaactactgcctgtgccgacgcgacggagccggcgtgctggccccggtcaaccccaaggacgaccaccagtgctggtacaaggacatgtgcttcagcatccgagtcatggaccaggtaggcatgccggcgttcgagctcgtcaacatcgacacggagctcgccatcccgcactccctcggtcattgccacccgggcgaactcgcgcctttaactccggaccaggatgacacgtcagggctgtggacggacagccaagacgtgtgcaaggacttccgctgcatacgcatgggcaaccacagccgcctcaacttccacgtcttccgcgtcgacaatgaccaccgagtagtggactacggaacctgtgacgcgctctggaagtggtataaggccgagaaccagagctggaagatcctgccgtggggtcccgaggacatctctgccgcagacaatctgtgaggaccgtacgtcgtgtgcgacttctgcgaggacggcatccaagactacgaacactcgttgcgcaacgatacggcgtggctggcgtccaccaacccgggggacgagtaccagcactgggtcaaggacatgcgccaccccacccgg

SEQ ID NO: 44114 - DNA, 508 bp, Zea mays
  Clone ID: MRT4577_140238C.1
tgaaaaaaaaaaaaaaaaaaaaaaaaaaaaaaaaaaaaaaaaaaaaaaaaaaaggtctaaaaggtataaaaggtaccaaacattaaagaatgcgatgatgtaaaatattattgtgggtgttttttgagatacaataaattgaattgactggtctgcagcttaacaacgtgggtaactggtgaaagccctggggggggggggggttggtcgcattatcaacatttccgccttttggcgtagatggcgtaatggccctaaaggcatggcccttgcgaacttcctatcagtctcactggctaatgggacaagggatgtcgccttgtattggcccattaagctgtgggggtttggtgcatagggacagattcacttgttaacttgctagtaccctagcgttgggtttttttcctttctttttttgctttttaggtaggtttgccgggttaccctctaaatttgtaattcggttgctggtttcagggtaccgttttagtgcttttcggcccct

SEQ ID NO: 44115 - DNA, 283 bp, Zea mays
  Clone ID: MRT4577_140239C.1
ggggggcgggatctctgaagtttcaaacccaggcaaaagaaacatggcaacgaagagacgacaccaaaaaacaatcacagatgcagtgcaatttaattagcaaccaaaacttccaggtgagctttctgtatagcagctttccgtatagcagattatcaaaaagccagctggttttggctccagaaggagaacatccccttgtattttgcagggggaaactggcgcgacagcaaggcaaatggcttttttttgccgtagctggtagtacatttgattggttccg

SEQ ID NO: 44116 - DNA, 127 bp, Zea mays
  Clone ID: MRT4577_14023C.1
cacactcgtccgcagctttttgttttacacgctggcaaacactgtggtgaggtaacagatcatgaggtgcgacaacacactacatatcgcattcaagtctagaatcagagtgctacaacgcactctg

SEQ ID NO: 44117 - DNA, 682 bp, Zea mays
  unsure (1)..(682): unsure at all n locations
  Clone ID: MRT4577_140240C.1
agttgacgccagcccccattgttccgctccgcaccacggaagacgaagcgcagcagccacgccccgaaaaaggcagaagaaacgcggtgcctcgagccatcagatgccccaccccaccccaccccaccgtgttgatctaggagttggagtcggacggcgctgggagtcgccgagtcggggcatggcatccatagccatacatctcctcgcggagcctggggcggagctgtcaccaccatgcccaatcctatcgcaccaaggaggactctgcctcgtgctcctcgtagtcttcgtacccacccctccacgcttcccctttccttgcacggtcccgatccctagccctgcccctctcctccagcgccgctcgccagctctctgcccccgccgcgcccagagatgcagatcccccaccgccgttaccgctgggtgaaggagtgggtctcgcaagaactggtcgtcgccggaggcccctgcgtgctgtacaagtgngtgcgaggtgcgcggaactgattgcttgctggcttctccctgttgttgctgctgctgatgtcaaaacgcagacttttattttgtgactgtactgtcatgtcatcgtcatgttttgcactgagaattgccctgtctggtactntcttcacagtgattcatccatatccatgcgaattcacaattcctcgag

SEQ ID NO: 44118 - DNA, 1250 bp, Zea mays
  Clone ID: MRT4577_140241C.1
actcctatgggcgattgggttcctcgaggccggccgggaaaaccgaggtaggagaaaggcaaggaaagtgggaaggtaggagagagagggagacagggaaagctctcttcctcctcctcctcctctcgaattccgtctcttgtccctgtcgtcctcgcccggtttccccggtttttgagaggagaaagaggaggcggaggagagggatggggagggacgagaggttcccggtgtgggaggccgcgctcggcgccggagtcgccgccgccttcgccgctggactcgtcggtgtctacctttccatgccggactccgactacagcttcctcaagttgccacgtaatctcgaggaactccaaatcctcacgtgttggtaggttattgcgctgtgtacatcttcatgcagaccttcatgatcccagggacaatattcatgtcactgcttgctggtgctctatttgggcaactgcgtggccttgcactggtggtctttgctgccactgcaggtgcttcttcgtgctatttcctgtcaaagatgattgggaagccactggtgttcacactgtggccagataagctcagcttcttccagagacaggttgctaaaagaagagagaagttgttgaattacatgcttttcctcagggtgaccccaacattgccaaataccttcatcaacttagcttcaccgatagtagatgtcccctaccatatattcttactgggaactctcattggtcttatcccagctgcttatgtcactgtcagggctggaatcgctctttggagaattaacttcgctaagcgacctttacgacacccagtcgatagcgctgctattcctgatcggtgttgtttcagtcacaccggcgttgttgggcaaggacgaggcacaagaaaaaccatcagaaatggctgtaggcgcgtcgtgatcaccaatgcaccgagcacctgtacatatcaacatgcagccatgcagtggcttcattagttcagatcgacgggcccgtgtggctggatgacaaaaacggttcgcatggctactacacagcttggataggtcattcagcccattatgattggcaaccaatcatgcccattatgaacgattgaatgaatctgggaagcagaatgcccgttccccaagctgctttgatgtgtaaacgagtagtgctgttcggataggcctggcatttagtctaatccctgtttatattgaccagattcattcaatccatattcagtggttc

SEQ ID NO: 44119 - DNA, 1631 bp, Zea mays
  Clone ID: MRT4577_140242C.1
cggcccctcttctctcccttggtcccctcgaccccggccggggctcggcgaaccggtccaagctctccccctcggcccctcttgtctccctccctccctccgtccccgcattaaactcggcgaacgggcccagaaaagcaaaccgagggaggagaaaggcaaggaaagtgggaaggtaggagagagagggagacagggaaagctctcttcctcctcctcctcctctcgaattccgtctcttgtccctgtcgtcctcgcccggtttccccggtttttgagaggggaaagaggaggcggaggagagggatggggagggacgagaggttcccggtgtgggaggccgcgctcggcgccggagtcgccgccgccttcgccgctggactcgtcggtgtctacctttccatgccggactccgactacagcttcctcaagttgccacgtaatctcgaggaactccaaatcctcactggccatcttgagaactatactagtgactacaccctacaggtgttggtaggttattgcgctgtgtacatcttcatgcagaccttcatgatcccagggacaatattcatgtcactgcttgctggtgctctatttgggcaactgcgtggccttgcgctggtggtctttgctgccactgcaggtgcttcttcgtgctatttcctgtcaaagatgattgggaagccactggtgttcacactgtggccagataagctcagcttcttccagagacaggttgctaaaagaagagagaagttgttgaattacatgcttttcctcagggtgaccccaacattgccaaataccttcatcaacttagcttcacccatagtagatgtcccctaccatatattcttactgggaactctcattggtcttatcccagctgcttatgtgactgtcagggctggaattgctcttggagagttaacttcgctgagtgacctttacgacacccagtcgatagcactgctattcctgatcggtgttgtttcagtcacaccagcattgctgggcaaggatgaggcacaagagaaaccaccagaaatggcggtaggcgcgtcatgatcaccaaagcaccgagcggtgtccacgtcacctgtatatatgtcaacatccagcatgcagtggcttcattagttcggatcaacgggcccttgtggctggatgataaaaatggttcgcatggccacacagcttggcgggacctcggcctaaactccctccactgctggcctacagaggcgcctgtgttgccatcatcagaacatgattcggtagccattcaccacattattaatgaatgaacctgggaagcagaattgcctgtagacgagctgctctgatgtgtaaacgagtagcgctgttcggataggacaggcatttagtccaatccctgtatatattaaccagattcattcaatccatattcagtggttcaaagataatgccctgttcagctgctgtgttcttgaatgttttgctctatttcccttctgtgccttcgctgtcggtgggaaacagtagagcttgttcctcctttttcatgccaagtgtagcggtcgtcaatgaacaacttgcaaaaggaaacagtacattataagagtttttttgctattttggtattc

SEQ ID NO: 44120 - DNA, 1654 bp, Zea mays
  unsure (1)..(1654): unsure at all n locations
  Clone ID: MRT4577_140243C.1
cctcgaagccggccgggtatttgtttgtttgtcatttagaggtctgagacagagatgaggatgtgtaatcctatcaattttctgaacgggagttgtttctatgctccgcaagcaaacatatgacactgcaaaaaaaaaaaaaaaaaaaaaaaaaaaaaaaaaaaaaaaaaaaaaaaaaaaaaaaagagagaatattctattccagctcccgaccgttcccctcttctcttggaagttgggctcttggcctaaaaaagcaaagtgagggacgaaaaagggagggaagtgtgaagcacgcgtccagagagggagccaagggaagctctcttctttcttcctcctcctcgtcctctcgaattccgtctcttgtctctgtcctcctcgctcggcttccccggttcttgagaggggaaagaggaggcggagccgaggagagggatggggagggacgagaggttcccagtgtgggaggccgcgctcggcgctggggtcgccgccgccttcgccgctgggctcgtcggggtttacctttccatgccggactccgactacagcttcctcaagctgccacgtaatctccaggaactccaaatcctcacgtatgtttttttttaacttttgcctgccccttaagctcctcatttttttctttgtccggttggttggtgccggtggtgcactgaaagcttccgccttctctctgttttctcgtacgaaatttgatgccgatatgccctatgattatctgcacgcaagttgtctgcatcctcttaatggatggccatcttgagaactatactagcgactacaccctacaggtctccggggcgtggccctggtagtcttcgccgccactgctggcgcttcttcgtgctatttcctgtcgaagatgattgggaagccactggtgttcacgctgtggccagataaactcagcttcttccagagacaggttgctaaaagaagagagaagctcttgaattacatgcttttcctcagggtgaccccaacattgccaaataccttcatcaacttggcttcaccgatagtagatgtcccctaccacatattcttactgggaactctcattggccttatcccagcttcttatgtgactgtcagggctggaatcgctcttggagaatccgggtcgctaagcgacctttacgacacccagtcgatagcgctgctattcctgatcggtgttgtttcagtcacaccagcgttgttgggcaaggacgaggcacaagaaaaaccatcagaaatggctgtaggcgcgtcgtgatcaccaaagcaccgagcacctgtacatatcaacatgcagccatgcagtggcttcattagttcagatcgacgggcccgtgtggctggatgacaaaaacggttcgcatggctactacacagcttggataggccattcagcacattatgattatgaacgattgaatgaatctgggaagcagaatgcccgttccacaagctgctctgatgtgtaaacgagtagtgctgttcggataggcctggcatttagtctaatccctgtttatattgaccagattcattcaatccatattcagtggttcnnagaaaaaaaaaaaaaaaaaaaaaaaaaaaaaaaaaaaaaaggaaaaaaaaaaaaaaaaaatttgcggcc

SEQ ID NO: 44121 - DNA, 130 bp, Zea mays
  Clone ID: MRT4577_140244C.1
agcctgttcgggaggtcataggtggctgtgcaggctgttcactatggagcttcacggccatactatggcatccagactacacttaacgagcaggggtgcggcgtattaatcgtcaagttctcgggggatg

SEQ ID NO: 44122 - DNA, 459 bp, Zea mays
  Clone ID: MRT4577_140245C.1
attctgtctctgtccctggctgtgctgagggctgatggtatgctgacaaccactcggaggtgatgctggttggctggtgccaaggtgatgccactcgacaccgggggcccggaacttggggtatttgcatgctgtttcgggggtcaggccaaggtacagtcagagctgctgacgttattgacgccactgaaactgcctgaagagggtcccaagccctggtcgagcacggatgacattcaaagctcgattgctgaaaaaatgtgcccgttgatcgatagaggttttctaagtcggctgctttgcccacatcaccaaggacaccacgatcgccctttacaaagggaacttatgcaggcgtgtcatggtaattagacgatggcggtttttgtcaagataaggttgttgatgaccatgcctgaatgtgaaagctaagtttttcgcaagaagtttgataaaacc

SEQ ID NO: 44123 - DNA, 377 bp, Zea mays
  Clone ID: MRT4577_140246C.1
ctgtacgcccgcagcgcacagttcccggaattgaccgacgcgtccgcgttggcttctcctccccctccggttcgggttcgggttcgtgaggttctccggggttcggtttcgtgggtgagcggatcgagatggagccgtcacacgttgaatacccgttcttaagcatgtggcctcgcctgccccaccgacaagcaagcccttcacaaggccattcttgacctacagggaggtccttgagaccaagatcatcctttatcgggagacgcagagctcccgcgcctggggcttcgacaccttttacacggatgaggcgatgcggaacgcccatgtgggcatgaacggcatggaacttgacgaacgtaacatcatcgtcaacg

SEQ ID NO: 44124 - DNA, 261 bp, Zea mays
  Clone ID: MRT4577_140247C.1
tttcccccccgccggggcaagggatgctttacttcactgggggggcaccatcatgtgttaacaggaaagggtccctcctaaactatttcaccggggaaaaactcttttgggccagtgaagggttgaataagtaaaaacccttttcccaattcgcaacacaaacaagggtttttggagggaattttgcaccaacggtttcccctagccatttgtatttgccgggcgtgggatcttgggccccaaacaaacgcactcttttcc

SEQ ID NO: 44125 - DNA, 286 bp, Zea mays
  Clone ID: MRT4577_140248C.1
gtcccctaaggctttcgttgcagaggactcactctggcctaaggatcggggtaacttagagctcctgggcacgttggaaaggaagttggtcacacaagaagcatatgacacactgaacactctactaacactatatcacgcatgaacacagctccggatcgtattggacaagcttggtcagcggatcccacgaaaaacctggcaactgtaatatagcacacatgcttaacactgaatgactgatcgtcaatcaatataccaatatctctgcaagagcagctctcaa

SEQ ID NO: 44126 - DNA, 365 bp, Zea mays
  Clone ID: MRT4577_140249C.1
gaatcatcatcagtgcctcatgcatcatatgctactgagagactgaaaaaatatctttgttcccctgtgctagagaacatgtattggcaggctttcacttcctatcacgaaccattgttgagtaggtcggactgataactagagtttcttcttcagggctccgttgtattgttttgctcttatcttatcttgggtggtgtggcaaagaatttgttgttgtaacggttgatgcagctagagttggcagcgacattttctgtaagagcacacggcagggacgttaattaaatatattcctctgtagcggttgatggaaaaaaaacaagatacaggacagaataacataagcggcggcagccacaaaa

SEQ ID NO: 44127 - DNA, 691 bp, Zea mays
  Clone ID: MRT4577_14024C.1
cactctccccctccccgccgcctccgcactctgccgccgcagccgcagccgcagccgcagccatgggcgcgtacaagttcgtgtcggagctatggaggaggaagcagtcggacgtgatgaggttcgtgcagcgcgtgcgttgctgggagtacaggcagcagccggccatcgtgcgcatcaccaggcccacccgccccgacagggctcgccgtctcggcttcaaggccaagcaggggtatgtggtctaccgtatccgtgtcaggcgtggtggcaggaagaggccagtgcccaagggtattgtctatggtaagcccaagcaccagggtattacccagctcaagttccagaggaacaagaggtctgttgctgaagaaagagctgggcgcaggctgggtggtcttcgtgtgctcaactcctactgggtgaatgaggactctacctacaagtactttgaggtcatccttgttgatgttgctcacagtgctgtccgcaatgacccaaggatcaactggctctgcaagcccgtgcacaagcaccgtgagcttcgtggcctaacgtcggccggaaagaagttccgtggtctgcgtggcaagggccaccgccaccacaagaacaggccctcaaggagagccacctggaagcgcaaccagaccgtctccctccgccgctaccgttaaactgccctatgcac

SEQ ID NO: 44128 - DNA, 282 bp, Zea mays
  Clone ID: MRT4577_140250C.1
atggcggacgacgtaactccggtgatgaggctccacgaatggcggacgaatggacgaatggcgtggtcacagtcactggggtgctgcgcggatgagcttcacggtggcgagttgggcacggcgcgagcagggctcgacggcgggcgcgggaatggggagagcgcgagagagatggagctcgaggaggaggagagctctgctgagggagggagaagagattcgtctccaatttatagagggagaggagagggagagtcagccggcgtcatcaagcaccattaa

SEQ ID NO: 44129 - DNA, 729 bp, Zea mays
  Clone ID: MRT4577_140251C.1
atggcggacggcgtaactccggtgatgaggctccacgaatggcggacgaatggacgaatggcgtggtcacagtcactggggtgctgcgcggatgagcttcacggtggcgagttgggcacggcgcgagcagggctatacggcgggcgcgggaatggggagagcgcgagagagagggagctcgaggaggaggagagctctgctgtgggagggagaagagatccgtctccaatttatagagggagaggagagggagatatcaagatgtcaccgtttgaagccttgtatggacgaaagtgccagacccctctgatgtggtccaacgtaggggaaaagacactggaaggacctgctttcattaaggaggcagaagagaaagttggcagaagagttacgcagacaacagaaggagagaactcagtttcgaggaaggagacttcgtctacctcaagaatagggcccgcaacctaccgccttaaattgccagaatccatgtcatatatccacaatgtgtttcatgtatcccagctccgcaaatgcctgaaagtgccagaaagtcacatcgaagaagagagaattcagattcagagggatctacagtaccgagaaaagccagtgaagattcttgattcagccatcctaaagacccgaaactcagaagtgaaactctgtaaagttcagtggagcagagaaggagaagaggaagctacctggagagtgagaattctatga

SEQ ID NO: 44130 - DNA, 414 bp, Zea mays
  Clone ID: MRT4577_140252C.1
ccgcgcgcgtggcgggaggtgctggacccgacggcgttctcgtgcccggacagctgcggggaggcccgcgcgcgggcgcgccgcaacctcgcctacttccgcgccaactacgcgctggccgcgctcgcgctcgtcttcctcggcctcgtctaccgccccgcgtccatgctcgcgttcctggcgctcttcatcgcctggctcggcctctacttcggccgcggcggcggggagccgctcgtgtgcctccgccgcgaggtggacgaccgcgtcgtgctggccgcgctctcggccgccaccgtgctcgccgtcgcgctcacccgcgcggggctcaacctcctcgtctccctcgtcgtcgccgtggccgacatcggcgcgcacgcctccttcagggtcaacctgtacctagacgagacc

SEQ ID NO: 44131 - DNA, 540 bp, Zea mays
  Clone ID: MRT4577_140253C.1
ggggggttgtttgggtttaaaatttttttttttttttttttttttttttttttttttttttttttttttttttttttggcaaacaaggcaggggccgccccactatgggggggcccggacaaacctgggtcaaatttacaaagctaagggggggggggggggggttttttttctttttttttggtcaaaccaccaacccttttcccactttttttctttttcgattttcgaaaggcccccggggggggcaccttgcccatcaaaagaagggagaaaaaaaataatgtggcccgccccccaaaaaaaaaggggggataactgggaatcagggggcgcaaaaatgtttttcccgttatcccagggagataagccggggaactcgttttcttttccctttccaatgcaagcaaagcttgggaaccactccgaggacgaagccaatgctgcccctggccccttgggcctccattaagcctacggggggcccctggttcaaattcatagggggggtttggagcgggggatatgccgcccttggag

SEQ ID NO: 44132 - DNA, 459 bp, Zea mays
  Clone ID: MRT4577_140254C.1
attagtttggggaataattgttcaatcatgcatgcaggcattcgggggaagggaagccttgctgaaatggcgggtcagatgatgcaggcttgaagcgtagtcaatggagcagaaactcggttgtctgaaacatccagcggttctttctctcgtgcccccgccccttcaagagctgaaaccgcgtctacgatcctcagcctctcacccctgttggcttctggaatccatcacgtcgctatcggattattacagctccatctgcttggagagcaagagctccatgcatccagcgcatgtgcatgtaccatgaacattttgcagacgcacacgcgatgcctttgacttcagtcggatagcgatgcgtttacatctcgcgttgggagttaatgtatctacttcaatgattcaatctatgtgtgtgatgaagtggatcagcatgaaatccaacttggactcctg

SEQ ID NO: 44133 - DNA, 1000 bp, Zea mays
  Clone ID: MRT4577_140255C.1
ccggccggggtagcggcgagacgagccgtttaataggtgtcaagtggaagtgcagtgatgtatgcagctgaggcatcctaacgaacgaacgatttgaacataattggtgtagtagtgtagtggtataggagggtatgcgcgagagagaggttgcgagttcaaatctcaccattcacgctagggttgtggagagttgttcctataattttaaaaaaaaaaaaggacggaacaacaatatccaactttcgcttccaattcacttaacgagctatcaaacatacctcaacatgaagtacgccaccgccacaatcgccgccgtcaccatggctctcgcatccgcaaaggactgcaacctgccccccatctctgaagccgtcgtccccggcgacgtctttaagctcgtggctctccccaaggtcgccaatgagatcgaatgcgagcccttccaagccaagaacaacgacctcctgatcggcgatagtttccagagcgcaaactgcactacacgactcccccgtgaccatgcgtcgttcgtcctcaacggtcagggtctcctcttcctctacaccggcgacacgcccgacaacttcgaagcccaggagatattcgtcgaccgctctggcatgggccaaggtaacatacaatacaccaccggcctccctgcaaatattggccgcaaccaggagttgggtcctttcaagattaccgagactagcgaccttgtctttgataacggcaatggtgccgttacggctttccaggcttgtcccccagctgacggtgacaagttgacaggctggaaggtctggcttgcgggcaatgacaagccggccggtagcgagggttgtgttgagctgaatgctagagctgtcaaggagacgaaccctgaggcttgcgagtactccgtttacaaagcttagaaaagtggttagtaatagatatatatacaataataatgcaatagattcaaattgctatcaagaaaaaaaaaaagcggccc

SEQ ID NO: 44134 - DNA, 1354 bp, Zea mays
  Clone ID: MRT4577_140256C.1
gccggccggtccgagatcaaacggactcacagctcgcagtacctgcaggacattgagaaccagccagctaaccaaccaaccaaccggcggagccaaagccaagaaggaaggcaacgtgcccatccagtcaggatgtgcaactccaacgtggatgcggtcgccaagtacaccgagaagcagatggcgtcgctgagcgccgactacgggctggatttgggcaccgtcagaggaaccgtcaacaacgcctgccggattatcgaggtgcggagggacttgggctcgctggacaggtacgtgtgggcgttcgtgaacaacaggccgctgtcgccgagctacaagtacagccggaagatcccggcgaagacgtccaagtcggagtgcatcagcaaggacatggtccggcgcaggttccgcttcgtcggccccaccgtcgtccactccttcatgcaggcggtcggcctcaccaacgaccacctcgtctcgtgcccgcgccaccgcgcctgctccgccgccgccgttaactgattctgctgaccaccgtccaccgatcgagagccagacgtaaggaagaagagagacctttatatataaggacacgtacaatacaaccgagaaaaaagagaaaggtagtagcctctagtagcactagaagtagtacgtagtatacggaagggagagtgctggtttgcaattgtgtgtacgtacgagtacgatgatcgagtgtgcttgtgtagattgattacgcccccacccctaattagtcaatgaatgagcttgcttgctgcgacttccgcctgcacactgcagtgtgcagtcattgttcgcgtgaggcggttagctgcaggcgtgcgctctcctcctctcaacaagctaggctgcgcagatagtgatgtgatggatggggagatgatgatgatgatgattatagagagaagcccggccgtgtgggctacctgcatgtggccaagctctgattaaaagcgcgataacagcactctcacggcaggcaggcaggccatgtggtgtggtgtcgcaggcaaacgcatgtgcgacgaagacagagagggagagacggaaacgcagggagaagagcgggaaggaaagggggactagctaggaaaggcccgctttgccggccgcgcatgtgaccctgcagctcgcgtaccttttccaatcctcaaagtgggaggacggatcggaccccatgcactccacgctagtggtgtgtttggtttgtagagtcactccatgaggtgatgcatcataagttcattacaacaattttggtggaatcaactcactcctcatgtatatactaattattagcttataaggaataaggtggtgatggatc

SEQ ID NO: 44135 - DNA, 1585 bp, Zea mays
  Clone ID: MRT4577_140257C.1
cccacgcgtccgtccacgagtccgcccgggacacgcatctcacagctcgcagcacctgcaccacttgacaaccagccagctagctaaccaaccggcggagccaagaacaagcaagagacaacttgccccgtccaggcagcatgtgcaactccaacgtcaagtccgcgggcgtcgcccagatcgacggccgcccggtgctgcagccggcgggcaaccgcgtggcggcgccggacgccgcccgcccgctcaagaagtccctgcacaagtccttctccatgccgccttcctacgacaacaatgccaccgtgcccgcccgtcccgcccctgccgagaacacccgtgcggcgccggcgccgccttctctgctgcctcctacgacgccggccccggccccggccgccgcgagggcgaccaaggcggcgggcgccgtgcccgcggagaagcccaggtccaaggccaggaagcccggcgccgtgctgccggtggcgacgttcgcggcgccggaggcgttcgagccggcggggagcatcgccgcggcgcggcgggagcatgccgcgcaggcgcaggcgcagcgcaagtcgcggatcgcgcactacggccgcaccgcgtccttctcccgggtggagggccgagtcggcgccaccgccacggccgagccggccgtcccagcctcccccaccaccgggctcgacgagaagcgctgtagcttcatcacgccctactctgaccccttgtatgtggcgtaccacgacgaggagtggggagtgcccgtgcacgacgacgagttgctgttcgagatgctcacactgtctggcgtgcaagtcggggccgattggacttccatcctcaagaaaagacacgtctacagggaggcgttctccggcttcgacgtggatgcggtcgccaagtacaccgagaagcagatggcgtcgctgagcgccgactacgggctggatttgggcaccgtcagaggaaccgtcaacaacgcctgccggattcttgaggtgcggagggacttttgctcgctggacaagtacgtgtgggcgttcgtgaacaacaagccgctgtcgccgagctacaagtacagccggaagatcccggtgaagacgtccaagtcggagtccatcagcaaggacatggtccggcgcggcttccgcttcgtcggccccactgtcatccactccttcatggaggcggtcgggctcaccaacgaccacctcgtctcgtgcccgcgccaccgcgtctgctccgccgccgcccgcgtaaataactgattctgctgacgaccaccaagcaaaacacaagagggaattatctaaggacaaccaagacgagagagagagagagaggtagcagtagtaatatacaaaagagagtgttggcggtttgcatgtgtgtatgatgacccagtgtgcttgtgtagattaattacggcctctgattagcgaatgaatgatcttgcttgctggaaaaaaaaaaaaaaaaaaaaaaaatgaattgcatgcccctctggaccgctttaagggcatatgaagagacaccaaaacaattctctacaagagataactaatagactctattatat

SEQ ID NO: 44136 - DNA, 1558 bp, Zea mays
  Clone ID: MRT4577_140258C.1
cacgcgaccgcccacgcgtccgcccacgcgtccggccgagaacacccgtgcggcggcggcggcttctctgctgcctcctacgacgccggcggccccggccgccgcgagggcgaccaaggcggcgggcgccgtgcccgcggagaagcccaggtccaaggccaggaagcccggcgccgtgctgccggtggcgacgttcgcggcgccggaggcgttcgagccggcggggagcatcgccgcggcgcggcgggagcacgccgcgcaggcgcaggcgcagcgcaagtcgcggatcgcgcactacgtccgcccacgcgtccggttcccgggtagatcgcgagcggccacggccgccgagcgggccgtccccgcctcccccaccgcgcacgacgagaagcgctgcagcttcatcacgccctactcagaccccctgtatgtcgcgtatcacgacgaggagtggggagtgcccgtgcacgacgacgagttgctattcgagatgctcacactgtctggcgtgcaagtcggggccgactggacttccatcctcaagaaaagacacgtgtacagggaggcgttctccggcttcaacgtggatgcggtcgccaagtacaccgagaagcagatggcgtcgctgagcgccgactacgggctggatttgggcaccgtcagaggaaccgtcaacaacgcctgccggattatcgaggtgcggagggacttgggctcgctggacaggtacgtgtgggcgttcgtgaacaacaggccgctgtcgccgagctacaagtacagccggaagatcccggcgaagacgtccaagtcggagtgcatcagcaaggacatggtccggcgcaggttccgcttcgtcggccccaccgtcgtccactccttcatgcaggcggtcggcctcaccaacgaccacctcgtctcgtgcccgcgccaccgcgcctgctccgccgccgccgtgtaactgattctgctgaccaccgtccaccgatcgagagccagacgtaaggaagaagagagacctttatatataaggacacgtacaatacaaccgagaaaaaagagaaaggtagtagcctctagtagcactagaagtagtagtagtatacggaagggagagtgctggtttgcaattgtgtgtacgtacgagtacgatgatcgagtgtgcttgtgtagattgattacgcccccacccctaattagtcaatgaatgagcttgcttgctgcgaaaaaaaaaaaaaaaaaaaaaaaaaaaaaaaaaaaaaaaaaaaaaaaaaaaaaaaaaaaaaaaaaaaaaaaaaaaaaaggataaaaaaataaaaaaaatcaaaatttaagaaacgcaagcatgcaaactttaaaaatattttaaatatagacaccttaaattgaattgactggccacaacttttacaacggggtaaactggtaaaaaccctgccctttactcaacttattgcgctttgcagcaataaccccttttggcccaattaggcgtaaaagccgaaaagccccccccctttccacctttcccaaaattttaaaaaggctaaaagtggaaaag

SEQ ID NO: 44137 - DNA, 366 bp, Zea mays
  Clone ID: MRT4577_140259C.1
cacacacgcagtctgcccaacgcgtgccgcttattttcttgtttttttttatttttattttttgtttttgtatttttttattatttttgtttctttgtttttgttattttttatttatttcttttttctttttatttttgttatttatttgtttcttttattttgtttaaaaaagaaaaaagcgggacttcaaaaggggaaacaaatgagtatcaaacagggcaacaatggcctcgacaaaagtcacattcaaacattggtgacttagacgggataatttaggtgaaaacacatttgggggccgggaaattcacaaatttggcgaggttttaaccttgcttctaaccaaaggaaaacatctgtggt

SEQ ID NO: 44138 - DNA, 285 bp, Zea mays
  Clone ID: MRT4577_14025C.1
tcgattcgacgaatcggctcacttgtacataaatataatatcaccatgcgagtaatagtcaatcaaatgtggtgatctatttatctggtttcctttccagaactgcacctaggaggcatagtaataaatgtaatcacactttagggctagtttgaaaacttaaatcccctccaggattcccaaggattgagcgagaaattagctcattttctcactcaatcaccgggaatcccggagaggatttaactttccaaactagcccttaatcatgctttccataatcta

SEQ ID NO: 44139 - DNA, 1751 bp, Zea mays
  Clone ID: MRT4577_140260C.1
ctcgaggccggccgggatcaaacggactcacagctcgcagcacctgcaggacattgagaaccagccagctaaccaaccaaccaaccggcggagccaaagccaagaaggaaggcaacgtgcccatccagtcaggatgtgcaactccaacgtcaagtccgcgggcgtggcccagatcgacggccgcccggtgctgcagccggcgggcaaccgcgtggcggcgccggagccggacgcctcccgcccgctcaagaagtccctccagaagtcgctctccatgccggtctactacgacagcaacgccaccgcgggcgcccgtcctgcgccggccgagaacaccacccgtgccgcggctaattcgtctccgctgcctcccgcgaaggcgacgacgaaggcagcgggcgctttccccgcggagaagagcggcaggcccaaggcggccaggaggccaggcgccgtgccgccgccggtggtggcgttcgcggcgctggaggcgttggagccggcggggagcatcgccgcggcgcagcgggagcacgccgcgcaggcgcaggcgcagcgcaagctgcggatcgcgcactacggccgcaccgcgtccttctcccgggtggaggggcgagtagtcggcgccgcggccgcggccgccgagcgggccgtccccgcctcccccaccgggcacgacgagaagcgctgcagcttcatcacgccctactcagaccccctgtatgtcgcgtatcacgacgaggagtggggagtgcccgtgcacgacgacgagttgctattcgagatgctcacactgtctggcgtgcaagtcggggccgactggacttccatcctcaagaaaagacacgtctacagggaggcgttctccggcttcgacgtggatgcggtcgccaagtacaccgagaagcagatggcgtcgctgagcgccgactacgggctggatttgggcaccgtcagaggaaccgtcaacaacgcctgccggattcttgaggtaccgtgacccgtacgtgagcttcaccccagtcgttgaaagatactagtagcagcagcagtagtagttccagtaccatcctgcaacggaaagacgaagggaggcggtcaatgaatggagaagaagaatatatataaaaaaaaatcatctgatggcgttgttcgttctccgtgtttcaggtgcggagggacttgggctcgctggacaggtacgtgtgggcgttcgtgaacaacaggccgctgtcgccgagctacaagtacagccggaagatcccggcgaagacgtccaagtcggagtgcatcagcaaggacatggtccggcgcaggttccgcttcgtcggccccaccgtcgtccactccttcatgcaggcggtcggcctcaccaacgaccacctcgtctcgtgcccgcgccaccgcgcctgctccgccgccgccgttaactgattctgctgaccaccgtccaccgatcgagagccagacgtaaggaagaagagagacctttatatataaggacacgtacaatacaaccgagaaaaaagagaaaggtagtagcctctagtagcactagaagtagtacgtagtatacggaagggagagtgctggtttgcaattgtgtgtacgtacgagtacgatgatcgagtgtgcttgtgtagattgattacgcccccacccctaattagtcaatgaatgagcttgcttgctgcgacttccgcctgcacactgcagtgtgcagtcaaaaaaaaaaaaaaaaaggcggccgc

SEQ ID NO: 44140 - DNA, 3087 bp, Zea mays
  Clone ID: MRT4577_140261C.1
atgccgaagcccgccgccgctgagccattctccatacggggttacgccatgaggatgcgggctgtcgacgcggccgagtgctacccattcgtcggtggctgctgcagcgaaggggagggggaactgccgccgcggttcccgcagatggaccggaagccgctgccacggtggtggaagcacgagctcgcggcggggcaggctcagcttttggctggcgccaagggcggagaggctgcggcagccggctgccgcggcggtgggctgcggaaggggaccaagaggaagggatctcactcgagctccacgggcgagagggccaggaaacggcggcgtgttaggtcctttttgacgaacaaggagagaactgctaagcctcagtcaacatctcgtttgcatgaacacaagttgcatatggcattgctgaggaagcataaaagttctactgtccatacaagtacagaacttgaaccaaggaagaaactggaagaggcacgtgaacgcaagccaactcatgaaaacagcgtgaataaacgaagcagagaaagaacctacccttctagtgaaatggacagtaacctcttcaggataaaggaagtgacctcctctgtaaataagcaaggcatagaagtcaatggttcaactaataatcctacaaatggtggctatgaaatggtgaaaacttccacagggaccaaagatgatatctttggggatctccctctcctcgaattagaaagctccaagattatgtttcggactggtgttcatgaacttccaactgttatagaagaatcatttataacaaatcaaaccgaagcagattctataccagaagcagtacccttgcggctgattgatgcatctgacatcactgctcatacaccatctcctcttgaagacttggtgaaaagtgaagacaatgagccagcatgcatctcccacagtgatgtggaagggagttacccttccactgttgggattgatggcgtgccaaatcataagaacatcaatatggtgaaaccaggtcttggtgatatgcagttaaaacttgctgaagtgtgtgctttgggttctcattctgttctgaggtcaaaatatggctctggtaaccctctgcagggttgttttgatgtgaacaaaaactgctctcaggaaataaaaaaacatggttctaattctactagcagtccacctaccatgagaaccagaactgaagaaactaaatacaaagatgcaccagttaagtgcaagagtactgatatcactgatacagtggctgcactacctgcgcctgccaaccattcatatcaagctagtgtgttgccctctgcagtatcacgtacagttttcagcacaagtgttgattcaaatgacgtgtcttcattcagaagtctgcctgccaaggaatgcatcccaattaccagatctgggaacttcagaactaatatgtgcaatggaagtaagaaacatgtggatccatgtgcggcactatctacagataaccagggtacctcgcactcaaaacttgacccaattttcagtcctgctaacattggaatggcttttatgaagctaccgggccttcaaagaatggagatcttaaactacaatgcaaagataggtgaaaacaggtttagtaatgcagagtccatgaacacagtaagatatcagaaacaacagttgttgagtggcatgacctatgtaatgcaaggtcagaaacagattggtctaggcagctctcaagttaagagaccagctctggatgattatgggggccaaggtgatcatcatctgcagcaacccacggttcgtttgatgggtaagaccgtctcagtttgctcgcatagcaaggatcataacgtatcgaccatggataaagtgagtcctaacaatgttgccattgaagcaagccgcctatccacaatttcatgtcagttacccccaaagagatcgttcccttgtcagaattctgtgacacaaagagtgcatctaaacaattcttcagattttttggcaaggattccgaacaatagtgtgccagggcaaaatactactttacatgaactccatgaccaaaggccacaaccaacaaatagttctgcaacagtgaaaggttgcacttggaattttggtaatcagtttgtttgccaagctgaactcgataaggcagctatggtcagcgccaactctcaaaccaggcatctagagcttcatcaaccacctcatttgataagcattcctcagaatcaacagtctcatttgtggactcctgcagcacacactaggaaagatcagtgttttgtgggtccagcggtgaaccaatcttccccagttccaaaatcattgctaaatgcaagcatgaaggaaaaatatcagaattccactttgttgtcttacaatgatcctagttctatgcctattcgccaaccctaccagatacctggcgcaaagtcatcttctgcatctgtcatatccttttttgagtatggtgcggataattcgttgtccagaagctcttctcctggtctgagtctttctcttacaactggtttggctaatgagtctgtttcgacaagcagagcagcttgtgcgggcagtcttacaaatgcagatggtaggaaggctgctagctttgtcgaaccaataagatcagcttatgcagataatgtttcacagccacctgcaaagccaataagcaacagaacagtttatgcagcagataatgtttcacaacaacctgcaaagagacaacttgttacaggtagaaaggattttatgtctatgggcccaaacattgtgaaccattcacctggttggtcacttagtgatgcagttggtcctcaggtgcttgattttagtaaaagaatgggaagagatgctgctcaaatgtcaaaaaatgaaagcgacaatccaagggccagttccggttcagttccgcctattgaaacatggtctaggcctggggtggttgcaggggctaatactaataccatgttgaatccaggtcaaaacctgaatgatcattccaaactgctatactccaccaaattttcagttgacagcggtatcaattcagttatattatag

SEQ ID NO: 44141 - DNA, 683 bp, Zea mays
  Clone ID: MRT4577_140262C.1
gaggtcggccgggtccgttccttgcggcggagtcctgggtcctggaccatccaatcctcgccatagcaagcagatgctctcacggggatcgcattgcttggcacgaaacagacagcagcagttcgggaactagagcttcggaccggctattatgtagcagtagtacaacatggatggcattcgcgcgctactagcggtaactgcggcggccgtcgttctcagccaggagcaagcatgtcactctcgttctcgtctcatggtcatggggggtgttcagctctccaggaccgtcagtcatggtgatgaaaacggcgcctagcttttacatggctgcggtggtggcacgcgcgtgtcctcaaaagtgggatcacatgcatttgtccgtagtttcacgtggcgtgctcctcctgattctgcttccccaccccaccccaccccaaacgtatttgcatgccattccccccctccgactccgattgcatcgacaccacaccttgcttgaatctgcacatcaccttccgtggatataaacgagatgtcaatttcgatgtgaccgagggagatgagtttgtgtgtgtgtgttttttcttttcattttgggtcttggccggctcttcatctcccttttccacttggtttttgttggctctggtgtgtttgtgcttccctttccttgcgaccgc

SEQ ID NO: 44142 - DNA, 197 bp, Zea mays
  Clone ID: MRT4577_140263C.1
attcggctcgaggactattggtgagcccgcctagtgacacacaggcaaaaagtcgtaattgcaggaaatgtcagatgaccgatggcttgcccaacaacatacaatgcagagccgatcagagacgcgtataaatagaaaagggacataacataaaatgtgaaagtgcatcaatctaaaacagtaaggccgtcgatatg

SEQ ID NO: 44143 - DNA, 331 bp, Zea mays
  Clone ID: MRT4577_140264C.1
cccggggctgtcctagaaatgggtacagtagagcagatcattcgggaaatctatatatatgacactacatgaggctagtgactgcgacttgtcaggatgcagttgcatacatatatatatacgggcatcaccgaatgcaatgtgatgaatgtgctttgagtaataagcaataccatatgttcctaccattgcgtaccgcttttttattttctaacgcgcgagcattgcatgtcctgtgtattatatgatgaccggcctgtgtgctcgtaaaaagaatttgtgtgtatataaagatctttggcgaggataagaaaggaggctataactagag

SEQ ID NO: 44144 - DNA, 299 bp, Zea mays
  Clone ID: MRT4577_140265C.1
gtttcctcgccgcagccgcaaccgcatccaggtgggaacctagcggcattgcattgcacgaaccacttacctgtgcaaccgtgcatgctggtttgtgaaattggtgttttcgtcacagggactgcttaggggaaggttcttaaggaatggggcgcttgaagaggagcgaccaccatctgtggcagcgagggagcttgggcagttgaggcagagccatcgtatgcccgccttgagaccagagagtattgcaagtagtcaagatgttagccaatctgatgcttctgtggttgagagtgtta

SEQ ID NO: 44145 - DNA, 551 bp, Zea mays
  Clone ID: MRT4577_140266C.1
ccggccgagaatgatctgttccctcatcctccctcttcttcttcgttctgcgtgtcgtcatattccaccaccaccgactaatcgccccaaacctcctcccctctcgctctatggtccagtactgtagagcatcgtaccttgcatgatctgcgaattgtcgcgatcaaactcacacctgattcccgagatttacgctatctcttcagctctactacctacacttcttaggaacaaaaaggcaccgctgcatcgcaatgtgacagctcacaccgctctgctgactgataccctgactggagagaaaacttcattctgtatcgttgctgtcgggacctcaggatccttcaccccggtcgttatctgcgcctgtcttgcaccatgatctgatctcgtccagatgtaaatcgtgaatgcatatatcttgtaactgacaccaataatcgttactgcatgataccatctgatgtctttacactcgctattcttgcactgtgatgtgcacattgattccaatggatgatacttcactatatgtacgagatgatttccat

SEQ ID NO: 44146 - DNA, 381 bp, Zea mays
  Clone ID: MRT4577_140267C.1
tttcttttttactcgaacatggagaattgtctaaagtcattgtcaaatataatttaatttacgagaacgcaaacgaaaaacaacaaagactaccccaaagaaaaaaaaaaaaaaagacaaacaagaaaaacaaaagaaaaaaaagacaaacccaaaaaagaaaaacatgcatccaagtcactcaaaacacaagacaagaactcggatgctggatggcgctcctggcggcgtggaaactagtcaaggctcatcgtgactgctgtcggtctcccatctgatgatgacctgtgcgtcgccgccgctgggctccatgctcttggggctggccgaattttcgcccaaggtttttttctcgccgcccccccccggtgcctccggaac

SEQ ID NO: 44147 - DNA, 378 bp, Zea mays
  Clone ID: MRT4577_140268C.1
aaaacaggggggggccaaccatttaagtaaatcccccaggcgggctggcaccaccagttataaaggagaacctgccccccatggaaaagggtttcttttctcaccggaaaaaaccctacctaaaaagaagaaaaaccttttggggggggggaggatgttgaccatgaggagaacaaggttgccaaagccggaaaaaaggaaaacaaaaacggcccccatggccccctccaaaaaccgccaaaaaacgttgaaaacctaagcccagggaacgggcaagttgcccccccccccaaaaaggccaaactccgggggggcccccacggccaagaaaagaagggcaagggccaacaccaaggcttccccccacccgtccgggac

SEQ ID NO: 44148 - DNA, 426 bp, Zea mays
  Clone ID: MRT4577_140269C.1
ttttaactacccacaccacatattattcataaacagaatgggcccacagggatttatccataccaacatgctaattggggcagacgctactgaccacctagagctgcctactcactgactcagactgatccatcatgcggcagcgtccgaagttggcatgcttactgacgacaaactttggtccctatgccttggatgggttgtttaacacatgccccaagcgacaaccactaaatcgggacgatctgacatgaacctctcagaagctactagaccctacaagccgcgtattagtcttacgcagtcgcgccttatcctccatggtatgcagtttctgctaccaccatggatgattggccagcttgtcaatctttgtcataggaggaggagcgctctgcacattactcacgtctaagtggtggataa

SEQ ID NO: 44149 - DNA, 751 bp, Zea mays
  Clone ID: MRT4577_14026C.1
aggcactctccccctccccgccgcctccgcactgtgccgccgcagccgcagccatgggcgcgtacaagttcgtgtcggagctatggaggaggaagcagtcggacgtgatgaggttcgtgcagcgcgtgcgttgctgggagtacaggcagcagccggccatcgtgcgcatcaccaggcccacccgccccgacagggcacgccgtctcggcttcaaggccaagcaggggtatgtggtctaccgtatccgtgtcaggcgtggtggcaggaagaggccagtgcccaagggtattgtctatggtaagcccaagcaccagggtattacccagctcaagttccagaggaacaagaggtctgttgctgaagaaagagctgggcgcaggctgggtggtcttcgtgtgctcaactcctactgggtgaatgaggactctacctacaagtactttgaggtcatccttgttgatgttgctcacagtgctgtccgcaacgacccaaggatcaactggctctgcaagcctgtgcacaagcaccgtgagcttcgcggactcacgtcagccggaaagaaattccgtggtctgcgtggcaagggccaccgccaccacaagaacaggccctcgaggagagccacctggaagcgcaaccagaccgtctccctccgccgctaccgttaagctgccccatgcacaccttgatagtattcgtttgaaccatcagattttgctacctttgttcggaaactccttgaagctcgtgc

SEQ ID NO: 44150 - DNA, 257 bp, Zea mays
  Clone ID: MRT4577_140270C.1
cgaaattttgttcaacatcgaacattcgcccatcgcccgataatcaagatggtaagttaatgcagtctcaccaaagactctaatggccacagtttatgtgtgagtcaaatgcgcgaaagcgcaattgatacacggcgtttttgtatttttttctcttttgataaaaattgcaaccaacccgtgtgaacattccgccccggatgttcacttcattgtgatactgaaggggtgaagacttggctggagacgcacggtgc

SEQ ID NO: 44151 - DNA, 527 bp, Zea mays
  unsure (1)..(527): unsure at all n locations
  Clone ID: MRT4577_140271C.1
agggcccaccgttgggggattcagccctaaaaaaaatttcccctaaggtttaaaaaggggaaaatcggggggttaaaaatgttacaaaaaaacttcccgggcttaatccgggggggtaaaaaatcccccctaaaccccaccactttaaaatgaggtgggtccagggggccgggggacggtccccggtaaaaggggggaaccaggggttgggggggggggggcttggtgaattttaaccttccccggggggggggggcgaatgaaaaggggggagcaatcataaaggggggggggggggaaaccatgggaccgtgggtgagaaagacctttgttaggttttaggctttgaggggggggggccgggccctttggggggggggccgtttacaaaggggggggggggggttttggnggggggcgggcggggtgngggggggtgggggggggtttcgtttggggggggggccggtggaggggggggagggggggagggggggggggggggcgagtgggggtggggtgggggg

SEQ ID NO: 44152 - DNA, 405 bp, Zea mays
  Clone ID: MRT4577_140272C.1
gccggccgggtcgggaatcaattcaatgtctgcccttaatcaattcctcaagaaatcacaaaagcctgaaatttatcctcttattggaatattgacttgcgctttatctggtgctgcttatgttggatatcatgctgccaaagcccctgatgtagcttggaatcataaatcaaacccttatccatggcaagaaatcaaagatggtgaacaagttaaattggtcgcattaaaccaaaaatacgatcatccttggaatcgtaccaaatggtgaatgaataacttacgtttttataattaatattattgtatccatatcatttctataatattccctaactttttaaattgtaaccaaataaaaaaaataagtgtgtcatagaaaaaaaaaaaaaaaaaaggccccta

SEQ ID NO: 44153 - DNA, 374 bp, Zea mays
  Clone ID: MRT4577_140273C.1
gcggggactcatatttcttgagttgctaaccatgagcatggctttggcgcatacagcctacctctacgctcatggatatgccacacgtccgctctgagcacaacacattccaatagcgcgacaaagcgcgctgcaaatgattcaacatacctgactcctaaaactgatgatagtgttcttggaaacattctgcgaggtgctgctggcactatatgtacctgacacgtccgaacgactcacaggtactctttccggatcgctccctatacatgcaagaattgatcactgctaggaacctatataacagccttcttatgaccaatcttgaagtgcgctgcagccttctcctggtcagtgtacctgcccggacactc

SEQ ID NO: 44154 - DNA, 269 bp, Zea mays
  Clone ID: MRT4577_140274C.1
ggtgacccacgcgtgcggttgaaagcatagttctgacattatatcaatgctctttactccaaatgactagtcttcagcatacgttgaggcatctgtaactttgactaataatatactttttactgatttgttttacttgacctttactttttttggctgctgtaatatcaaatatttcttcaatcccaaattacaaggcgttatatcttttctaaataaatacgtcttgctatgcatctaatctctcttagtaatgggtcctgtctttc

SEQ ID NO: 44155 - DNA, 232 bp, Zea mays
  Clone ID: MRT4577_140275C.1
aggagcagcgggagatccactgagctcatttcgaagcaggtgagctggcctgtgagaaaggaagaggcttaggcgagacacacgccagttgaccaatgctggagaccgggcagaccttaggccaacgggtgaccaacaaggaccccagtaccatccagaaggacgggaccaactccaatcggtggggcctatcaagattgaggccaagaaccacattacatacacaccatgc

SEQ ID NO: 44156 - DNA, 338 bp, Zea mays
  Clone ID: MRT4577_140276C.1
gggaaaaaaaggcccccaaaagggggggggtttttaaacctttgggtgggttcccccttttgggaattcgccccggacccccaacaaaggggttcctttttcttaaattgggggggcccaatattttttaggggggggggggggggcccccaacttaataagctgggggggggggggccataccccggggggccgggggaatgggggggaattcaaagtttttaaaaattggccgttggaagggtaaacgggtttgggtttccctttcgccggggggacgttttgggggaaaacctttttgccggcctctcttgggggggggatggaaaaggggccct

SEQ ID NO: 44157 - DNA, 567 bp, Zea mays
  Clone ID: MRT4577_140277C.1
atggccgacacagctcgcctcttcatgctggtggcggtggccacggcggcgctcgccggccgctcagccacacgccgtgggtgggtttccatcctctcgcaatccttttttttctttctttctgaaactcgtctcccgccgccgctggctgtcattattgtctctcgtggccgtccctggaacccggaagacggcgcgtggtgcgtgtgccggtcggacctggcggacagcgcgctgcagaagacgctggactacgcgtgcggcggcggcgccgactgcaagcccatcctgcagagcggcgcctgcttcgccccggacaccgtcaaggcccactgctcctacgccgccaacagcttctaccagcgcaacggccagaacccgcaggcctgcgtcttctccggcaccgccgcgctcagcaacgtcgacccgagcgccaatggctgcacgtaccctgcgaccccaaggtattggttccgggaaatgccgcatcttgcagtagcaactctctggagtctggacaacctgaagatatctccagctcggctcgccgtcgccgcccatctttag

SEQ ID NO: 44158 - DNA, 505 bp, Zea mays
  Clone ID: MRT4577_140278C.1
gccgggccttccacagccactagctagctaggacgtcttcacgtcgctgcttgcttccacgcctccttacggtttatccaagcacagcgagagacctttgcgcgtgtgcgctctcgttcgagctagcagcggcggcatgctgacgaggcggcacggagggttccggctcggccggaagctgctcagcgtctggcgctgggcgctctgccgccgccggcgccgccgcgttcgcggccgcgggtacctccgcctgcagccgtgccaacgaggaggaggcaccaccaaatccccgtccccgtcccccatggagtcgcatgcagtggcaagcatcaagatgatgcagcatcagaagcagaagcacgacgactctgctggctcgccgcggatgctcacgcgggggcggacgctggcgcgtcgcttgaggctcctgcgacgtcacggtggaggaggagggaaggaccgtaatgatggaggacgccacctcaaatgccaccacgtccaaggg

SEQ ID NO: 44159 - DNA, 320 bp, Zea mays
  unsure (1)..(320): unsure at all n locations
  Clone ID: MRT4577_140279C.1
caccccttacaaaattcaataaattttgatttaaacatttcaaaaatttaactaaaaagcatatgatggtgttgatataataaagggtaatgttaaacctatgggtaaattacaaaaagcccacagatcttctcccactacatcgngatcatgccttggcgtgagggtgccggtcccaatgacgtgggtaaaaatcagatgctatgatgcgctcgtagaaaggatagaagtgcacaattcttccggcctcccttgctctttcatataaaaataacctcttttttgtgcctctcaaacagcggcgcacacagatgttgatc

SEQ ID NO: 44160 - DNA, 312 bp, Zea mays
  Clone ID: MRT4577_14027C.1
acgtcagatcaacatctctcgtcgcatggagtatccgagcacgccgccgcctctgtcaacacagcgtcacctccgacatcggtgtcacctccttttcgcatgctagcaactccgtctcctcaggcgagcatataggaaggagaacgctataccaaagaccttgggtagcacctgaatgaacatgcgacttttttgcgatgcacatgatggaatggacatgctttttatgatttgtagaactacatcatgctgctttcaattatctatcttgatgcatgaatgtagatgattttttgcgatttgcagcactaa

SEQ ID NO: 44161 - DNA, 803 bp, Zea mays
  unsure (1)..(803): unsure at all n locations
  Clone ID: MRT4577_140280C.1
ggccgcttttcgaggccggccggttccggagaaaaaaatcaaaccatacaccaacaagcctaagaagctgtataggagaacattgccgccgtagctaggttcgaccatgtcgctgctacgcctgctaccagcaagggagagagatagaggactgttcgttgccagagggacttcgacaccgagcaatctggcgctaacatcgccgacgtttcccagtttaggtatggacagctcgtagtgtcctccgctcttgtatcttagaaccaaggcgctgggcgcgcctcatgtcgacgatgctccaccacggggatagaagctctgccacctagctccggccagggcgccgtcacggagactctgctccgtgggttggatgcttgaagatggaagacgggtcagtggccgtcgatctcaagatgggtagctaggattagagggagcataaagtttcgttgtatagaactgtgatatgtgcatctaagggccccagttgcatctgggcatggacaactcgtgaccttcagatctcgatctggcggccgcttgtatactggctcgattataaatagggtttgaatctgggctcttgaaaccagatcggacggccgagattcacacgaaccccttcgcataaccccttttacataagagccctcaggttttagtaaaatcaacccgtcgtccaatgtgtgggaagcctgtgtctgggttattttttcgaattaaaccccgaccttctctgtattagtgcgcccagtccaggaaattaagaaatagngaaaaaaaaaaaaaaaagcccctan

SEQ ID NO: 44162 - DNA, 591 bp, Zea mays
  Clone ID: MRT4577_140281C.1
tagtttaccacttctgatgaagagaccattaagattcattcctcatgctgtttctatactgtgggagaagaatccttctggaataaaatgaaaccatttccatgccatagtatgtgttggtttctgccttatgcaaaattagtaatttgtaagaaacattgatctttcctcccaaacggagaatataacagccttcgagcttttctctctttgctcttagacttcaagttagtagatccttaaaggctatttaacagcaggcttctaaaagtttgtgtttaggatttttagcatatttttatttcagatttttagctgaaactaaagtacataataggttaagactcaggtctatgacctttactccatcaccagccaataaaggacagaagtcttcctatacttagtcaagcgtcatttcagtagaaaataatcttgtcctactaattttccagaccagattaagcctttaaaggtaagcctcaagagtctcatttgaaagtaattgctggctgctttggtccccatagatttggcacaggaggtggtggctatgcaggcttctgacttttttcctagatacttctttgg

SEQ ID NO: 44163 - DNA, 302 bp, Zea mays
  Clone ID: MRT4577_140282C.1
ggaggaaataatacaatcaatatatttttaaccaaactacatactttttacaggggacgggtgactccactatacttttaaaagcaccaaaagctggtatgggatcccttatattggtaaaaaaaagggtgaaaattcgttccaaaaacaaaattcttgaataaaaaattctttttaaattcccacttggaaaaaggattttctttgtttttttaagaaaaggcttattggggaaaaaaaaaacaagggttttattcttaacacggggaaaggcatctttccatcgatataaactggaaaaa

SEQ ID NO: 44164 - DNA, 319 bp, Zea mays
  unsure (1)..(319): unsure at all n locations
  Clone ID: MRT4577_140283C.1
aagaanggacaaaactgcaggggtataggtggtaccccaccaaaactaggcagaaaacttccataatggactctttcggatgggctatttataagagggctccaccaaggaggggttgcagggataacaccgagaacactgtgcaatcacaatggctgaagggaacacattgtattgccaaatagaagaggtcagcgagccccctagccagggagtatacacggagcaactgaggttaccaaaacaaagcaaaagggcgaaaagaagcatgcacacgctactatctaagtagaccacacatgcaccaacccatggatgt

SEQ ID NO: 44165 - DNA, 1925 bp, Zea mays
  unsure (1)..(1925): unsure at all n locations
  Clone ID: MRT4577_140284C.1
taaccagagaagccggcagcgtcacctcatttcgatcccagaaaagatctgctccacctccacgttgctgtagttaagaagagagaatctctcgtgcgtccgccggaagcaatcatcgccgccggttttattatttagcagcagctacagcctgacccagagctgcacggatcacccatcatcaaacaggcagaagctacagcttgtcagcgtggaggccgaagaaagaggaaggccggtccacgtccatccaatgcgctagcgcctagcggatggtctctcatctcatcatcagtgcagggcatcaaaactcatcacaaccaccttgcacatgatcgcgatggagacctggtggtggccggtgtgtgggcaggcactccgccctgggcagtgcagagcaagcagtgctgtacaagtagatgtggttggccgaaccacgtcgagctagcaactccttccggggggaagcgcaaccaccagtagacgcactcacctggaggctggatgtttttttatatatatatttggaaattccttggatcagaaaattctgaaactaaaaaggtcagagccggagaacatggatgatgtcgaaacgcgacatcgacaccgatggaagacagagaggtgcggtcctaatcgccatcctaatccttatcctaatctgtcaggttgaagctaggactagtaaaatcgagacggaatatttggggagagaattgacctagcactagcagcaaccagcgatagccacatcacgtcgtcatcttcgccctcgactcagggcttcttcagctgtggtgccttgcacctcccctcaagaaatctaaccaaggccctgtttgtttcagcttctgtcagcttctggccaccaaaagctgctgcggactgccaaacgctcagcttttcagtcagcttctataaaattcgttgggacaaaaaccatccaaaatcaacataaacacagaatcggttgagtcgttgtaacagaatcggttgagtcgttgtaatagtaggaatccgtcactttctagatcctgagccctataaacaactttatcttcctccacacgtaatcgtaattatactcagattctccccacagccagattttcagaaaagctggtcagaaaaaagctgaaccaaacaggcgtgctgatgcaggggagctctnggatggggatctttttggccatgtttctgtcagcgctaccaccagcttcttgaggtcgccgatagtgtcatcctcggttgcctatcgacgagggcacctagagcaagcgaaatccatgggtgcgacgcccaccgcctagaggatttagaggatgtcgtctgaaccagaggaccacatcactgcagtgcacaatagatgcacgaggacgccagcgaggggccgtcgtcgacctgggcagcgcccgccgctcggaggatgcagaggacgcggttggtagaacgtagggacgtagcgctgggccggaggagcacatcgccgcagtgcccaacagatgcacgggacaccaacgcggggccgtcatcggcctaggcagcgcccgccgcttggaggatgtaggaggacgcgagcgggggccggaagaacgcagggacaaagagccgggttggaggagcacatcgccacagtgcccgacggatgcacggggacgccggcatggggcggtcgtcagcctgggcagcgcccgccgctcggaggatgcaggaggacgcgggcggggaccagaagaacgcagagcccgacggatgccgcaaggacacgctgcgctgggtggctggcgactgtaggcacacgcggagcgccgcgtctcgcggcaatagggaggagggctcaagcagttctatcggaattgctggggttcgacgaaggagctgaggcaagaaaaggaaccccggccggcctcgagggacccaat

SEQ ID NO: 44166 - DNA, 430 bp, Zea mays
  Clone ID: MRT4577_140285C.1
atcgctgagcttgcggttaaattataaaacagaaaagatcgaaacaagggttaaattgcaacgagttggaaagggtgagggagtgcacacgcaactatgcccttcataggaaacacgcggatccttgccccgggtcggcacaacgtgcgggtcgagagggcctaaaaacggcgccgttgtatgacttgtattaatatataacaaatgcccaaaaaaatcacttttatctgttttctaaaaaaaaacatagagccttttgtctaaagccctacaaggacgcccaagattcggcggctttcgataatccgattattctccgaagaccatcgtgcacgggggtatgaagtacaaaatcagatcttttcggttcatgtctaatctgactgactctataccacagattcatggtgaaatgatgagaaagacgatt

SEQ ID NO: 44167 - DNA, 1113 bp, Zea mays
  Clone ID: MRT4577_140286C.1
cccgcgcccttcctcgagtttttttttttttttttttttttttttttttttttttttttttttttttttttttttttaacccccaggatctttttatatcaaaaaactattacaattgcccatgccaaaaacactgttttgtactacaacatcacagggccaaaacaattttcgtccatcatacccctacaaatgaatacacaagttgccattcatttaaatcaacatcacagggcatataatagagaatacatttattcgggcgatcatacatctacaaatttaaggcttgcaaccatagttcatcacagagaaattcagggaggtcgagggaggccgtagctctgatcagcagacaataggaggtgtgccgatgcaggggagctcctggatggggatctttttggccctgtttccgtcagcgctaccaccagcttcttgaggtcgccgatagtgtcatcctcggttgcctatcgacgagtccacctagagcaagcgaaatcgatgggtgcgacgcccaccgcctagaggatttagaggatgtcgtctgatccagaggaccacatcaccgcagtgcacaatagatgcacgaggacgccagtgaggggcagtcgtcgacatgggcagcgcccgccgctcggaggatgcagaggacgcggttggaagaacgtagggacgcagcgctgggccagaggagcacatcgccgcagtgcccgacagatgcacgggacaccggcgcggggctgtcgtcgacctaggcagcgcccgccgctcggaggatgtaggaggacgcgagcgggggctggaagaacgcagggacaaagagccgggttggaggagcacatcgccacagtgcccgacggatacacggggacgccggcatgggtggtcgtcgacctgggcagcgcccgccgctcggaggatgcaggaggacgcgggtgggggccagaagaacgcaaggacgcagagcccgacggatgccgcaaggacacacggcgcggggtggctggcgactgtatgcacgcgcggagcgccgcgtctggcggcaacagggaggagggctcgagcagttctatcgaaattgctggggttcgaccccggccggcctcgagg

SEQ ID NO: 44168 - DNA, 2851 bp, Zea mays
  unsure (1)..(2851): unsure at all n locations
  Clone ID: MRT4577_140287C.1
cattgggcaactcgaggccggtctttcgtgaagtagagatccgaaaccctggcgacataggcttcagttccctccacagctccactactttccctgtgctgccaaactactggctgaaagaggtgacggtggagaagcatcaactcagcaaactttcagaggaaccatgaactggccattggccccttcggcagacctgctctggttacttcatcgtttcccattccaaactctaacttatcatctagtacatctttcggacttaggtttgacttcctggtgatattgtttagataacagccaacaagttcaatcccgcatctggtggntttcatttaccttttactgcccgattaccattgatcagtataatcatcggtctgcttcatatatacagagtttaaacgctatgtgatatgcctatcaccattatctactccactcactctgtacttactaacttattcaatcgttaccccagaacactgagaagatggctgagaaagagaatattctaatgcagagatatgagaacgggggggtgagcagtgagtgcctcctcgcctataaacaaggggccggggtctctctcctacggcgtgcgcatgctttggcttggcaaacccgattggatcttcagaaaaatcgccatcccctctccctcttctcgtgtccatcgctcctctacccattcttacttgaatcttttctgaagaggaaatctgacttcgggagcggctcctccgcgttgcctggatcgcccgggatcagtattttgcttccagtcagaggtccaaaatatcaaagggatgcagaaagatgtggttgcatgatggagtaccttgcctggaaattggcaggatacacaaacatagttgtactttacttgatctcgatgacattggactgcaaatatatgcacaacaattgcctcatgcacacacacataatggggccgcgagttgtagctcaaccatcgtctctggtttctttctaggtggagatggttaaaattgctggtcacttataattaccagcatcttatacgtcattgttgttcatcgccaacttattcaagtttgaaagtagaacactgagaagatggctgagaaagagaatattctaatgcagagatatgagatgggaaagttacttggaaaagggagttttgccaaagtttaccatgctcgcaatgttaagacttcagaaagcgttgctatcaaggtgattgacaaagataagatcaagaagtgtggtcttatggatcaaataattcaagagatttcagtgatgaagttggtaaaacatccaaacattgtccaattgtatgaggttatggctaccaaaaccaagatatattttgtgatagagtatgtcaagggaggagagttgttcaaaaaggttcaacgtggaaggttaaaagaagatgttgctcgtgcatatttccaacaattgatcagtgctgttgacttctgccatactagacaagtttatcatagagatctaaagcccgaaaatcttcttcttgacggaagtcgcaacttaaagatttcagactttggtttgagtgcacttccaaactgcaagagaaaagatgggttactccacacaatttgtgggactcctgcatatgttgctccagaagtaattagtcaaaaaggatatgatggtgcaaaagctgacatatgggcttgtggagtgatcctctatgtgttgttggcgggctatcttcctttccaagacaagaacatgatggacatgtataagaaaatttgcaaagcagaactcaaatggccaagttggttttcttcagatgttcgaaagcttttgcggcgcatccttcatccaaaccctaatagacgaatatctattgaagaaataaggacacatccttggtttagaattggtcttgatgcaagattgtttgattctacaacgagagatcatgtgcctagtgacatggatttggctttgaattccttaaatagcaatatggtcgagtgtaattcagcggcagagaaactgactattttgaatgcttttgatatcatctccctgtctaacgggtttgatctctctggtatatttgagaactcaaacaaggagtctaaattcatgtctaccaacacagctatgacaattatcaccaagctaatggaagttgcaaagagcttggatctgaaggttataacaaaaactggtgggttgttgaatatggaagctgccaaatcaggaataaaaggtgtgatgtctataaatgctgagatatttcaaatcacaccaaattatcatctcgtggagatcaagaaaatcaatggtgacatccttgagtatcataactttatgaaccaaagcatgagaccggcactagaagatattgtgtgggcatggcatggtgaacaacctgacgagaagtagactcatcaactttagataatcatcaacctacaaccttagatattgtggcagctttaatgctattagaaagtgtatcaggcaccaaaaaaaatgtcatgggacttaataatattacttatatgttgtttttattctcatgctcatgctgtcatgcagtaaagtgttctttctattgaccaatactactggaacatggtttctatctcaagggaatattttcataatcaattactttgattggtgaaaaaaaaaggtattagagaatgggtgaacctaatagagctgctttattgtatgaattttccgtggtaacgttagctagaaagttctttactctagtaatttattaagaaagtgatgtctgatgtgttgtagaagttgtttaggcaagtactgaattttatactatgcagaacttttgatttttatttgg

SEQ ID NO: 44169 - DNA, 832 bp, Zea mays
  Clone ID: MRT4577_140288C.1
gtgctttggcttggaaacccgattggatcttcagagaaatcgccatccccgctccctcttctcgtgcccatcgctcttctacccattcttacttgaatcttttctgaagaggaaatctgacttcgggagcggctcctccgcgttgcctggatcgcccgggatcagcttctgggatttgcatgtttgcccgctcacatgtgattcagtctcgccggcagactactcgcacatcaagggctcttgtattttgcttccagccagaggtcccaaatatcaaagggatgcagaaagatgtggttgcatgatggagtaccttgcctggaaattggcaggatacacaaacataattgtactttacttgatctcgatgacattggagtgcaaatatatgcacaacgattgcctcatgcacacacacataatggggccgcgagttgtagctcaaccatcatctctggtttctttctaggtggagatggttaaaattgctggtcacttataattaccagcatcttgtacgtcattgttgttcatcgccaacttattcaagtttgaaagtagaacactgagaagatggctgagaaagagaatattctaatgcagagatatgagatgggaaagttacttggaaaagggagttttgccaaagtttaccatgctcgcaatgttaagacttcagaaagcgttgctatcaaggtgattgacaaagataagatcaagaagtggggtcttatggatcaaataattcaagagatttcggtgatgaagttggtaaaacatccaaacattgtccaattgtatgaggttatggctacaaaaccaagatatattt

SEQ ID NO: 44170 - DNA, 288 bp, Zea mays
  Clone ID: MRT4577_140289C.1
tcgggtggccgaccccaaccccagctggccagttcttcgccggcgaagagcacttcaacgggggcgcccaccccgtggcttggtgctttgtggcccgccaaacccatcaccccaaccctcactcgagctacttggttaacttcgcgtctttcgatctgggctgaatgcgtctttcgatctggacctaactgaccattacccgctcctttctgggtatattctcaccttacctggagaaaaccagaggggatttcaagaaggccaggggcaacaaccaaaccaaacttc

SEQ ID NO: 44171 - DNA, 312 bp, Zea mays
  Clone ID: MRT4577_14028C.1
tagctctactctcgaatatcaaccatccagcacatgagtcagccatgtcgctcatcgctgttcccgtcgtccgcgccggcgaggtgctgccgtccactgaggtggtggtggtctggccaggcgagactgcgtggaacgcctctcgcgtcgtccagtgccatatggctccggagcttcacgaggctggcaagctgcaagccgtcgtggtaacgtctgttcggtcggctcaatctccagcgatcattgcaggcaccatctacccttattttcttcttctcgctggcccaaaacaatacctgacgacgaagctgc

SEQ ID NO: 44172 - DNA, 1088 bp, Zea mays
  Clone ID: MRT4577_140290C.1
tcgcattccacgccgttacgttagagcctggaatcctcttcggtcgcgtgggtttttttcttttttttttttttttttttaaaaacaacatataagtaatattattaagtcccatgactttttttttggcctgaatgcctgatacactttctaatagcattaaagctgccacaatatctaaggtggtaggttgatgattatctaaagttgatgagtctacttctcgtcaggttgttcaccatgccatgcccacacaatatcttctagtgccggtctcatgctttggttcataaagttatgatactcaaggatgtcaccattgattttcttgatctccacgagatgataatttggtgtgatttgaaatatctcagcatttatagacatcacaccttttattcctgattcggcagcttccatgttcaacaatccaccagtttttgttataaccttcagatccaagctctttgcaacttccattagcttcgtgataattgtcatagctgtgttggtagacgtgaatttagacaccttgtttgagttctcaaatataccagagagatcaaacccgttagacagggagatgatatcaaaagcattcaaaatagtcagtttctctgccgctgaattacactcgaccatattgctatttaaggaattcaaagccaaatccatgtcactaggcacataatctctcgttgtagaatcaaacaatcaatggtgacatccttgagtatcataactttatgaaccaaagcatgagaccggcactagaagatattgtgtgggcatggcatggtgaacaacctgacgagaagtagactcatcaactttagataatcatcaacctaccaccttagatattgtggcaggtgtaatgcctgatacattctaatagaaagtgtatcaggccaaaaaaatgtcagggacttaataatattacatcgatgttgtttttattctcatgctcatgcagtgaaatgttctttctattgaccatactactggaacatagtttctatctgaaggaacattttgataatcaattactttgattggtgaaaaaaacagatattagagaatgggtg

SEQ ID NO: 44173 - DNA, 209 bp, Zea mays
  Clone ID: MRT4577_140291C.1
agaggtgaaactaaaaagcgaaagggcttaatatgaagaaggagcaacacgcatccacaccatacttgaagtaaaactgcacatactcggctaatgacaggcacagcttagactatgtcaaccagcacactgacagaggggaaaatgggtcacacgttcacaaatcttttacaccttcaaatagtcagtaacaagcactgaaacggtac

SEQ ID NO: 44174 - DNA, 303 bp, Zea mays
  Clone ID: MRT4577_140292C.1
cgcctccctccgcaatcggctgctgaagctccaccgcgcgcctctccctggagctgcgctctccatgcgcgtgtggctcctcctcgccgacgctcgagtcccagccatggtggctccctctaccggtccccatcttcctgctcggatgtcgtccagctcggcgctccgactgctccactgcgccgaactgctcatctccctgcttgtcgcgtctccctctatttccctcgcgtcttcttcttcctactgcggttttccgacgcccttgctccctgcacacgctggtcgactacgtcgtcgatt

SEQ ID NO: 44175 - DNA, 1399 bp, Zea mays
  unsure (1)..(1399): unsure at all n locations
  Clone ID: MRT4577_140293C.1
cgtgcgcggacgcntnnnncnccggccgggacttctccagatcccctccgcaatctaccttcgcgcggctaccacggcgccggtgctgaagccagcgaccgtggccatgcagtcgccggagccctcctcctcctccccggttctcctcaatatagggggcaagaagtacgcgacaaccgtggagacgctgatgcagcgggagcccgactccatgctcgccgccatgttcagcgggcggcacacgctccatgatcacccaaccacggggaagggagtggtcttcgtggacagggacgggaagcacttccgccacgtgctcaattggctcagggacggcgccatccccgtgctgtccgagtccgactaccagcagctgctgcgagagggtttagtcgactacataaacgagaggctgggttggaaggaaaccgacaattcggaggctgaattgacacgaaaggacgtgatcaagtgcatacaaacgcaaagagtcaggttccgtggcgtgaatctatctggccttgatctgtctaagcttgacttatcagaggtggacttcagctatgcatgcattaagaacactgatttttcatatgctaacctttacaaagcaaaatttgggcaggtagaagcttcgtcttcatctttccaaaacgcaattttgcgtgagtgtgagtttattggagctaatcttgaagaatctattttggatggagcaaaccttcgaagtgccaatttacaagatgcttgcttaacacgatgtagcctcattttaacagatcttcattctgcccatttacagactgctaatcttacacaagccgacttaagaggagctaatcttgaagcggccaatctcaagggtgccaagttgtcaggtacaaacttgcaaggcgcaaatcttcagagagcttacttgcgagaagttgatttgcgtgacactcaattgactggtgctaagctcggaggtgcaaatcttcttggagctatcagatgatctacagattgttcgtgtagcttcatactgtgtatactgtactacacaaattcattggaggtaatgcggcaggaccatctgcggagttctggtctcaatcatgatcgagaacacaaatattccttctgttcaaaaataaatcagttcctagaatgattctaagtcgaactatcttaagttcgaccaactttataggaaaggatggagtttatgtgctgttctttgtacgccgccctctgattggaagtttagaatctagcatgttagctgtcagagctgaaaccatcacagcaagcacatttgctgggccccgattgcagtggacagatgtacctgtattgttgttgattcaatcttggtgtcatccccataaaaaaaaaaaaaaaataaaattttaaatca

SEQ ID NO: 44176 - DNA, 194 bp, Zea mays
  Clone ID: MRT4577_140294C.1
ggccgcttttttttttttttttttggggggggtgcaaacagcactgacatgcgcatattcgtggagcacaacaggaacaacgtccggacagaacgcgaggaaatctgattatcgggggcagcggaaagacccggtcggaccgcgccagctcactgcggggcaggccaatcaccggcggcggcgggggggggggc

SEQ ID NO: 44177 - DNA, 876 bp, Zea mays
  Clone ID: MRT4577_140295C.1
attgggtacctcgaggccggccgggattccgttctccacttctccagatcccctccgcaatctaccttcgcgcggctaccacggcgccggtgctgaagccagcgaccgtggccatgcagtcgccggagccctcctcctcctccccggttctcctcaatatagggggcaagaagtacgcgacaaccgtggagacgctgatgcagcgggagcccgactccatgctcgccgccatgttcagcgggcggcacacgctccatgatcacccaaccacggggaagggagtggtcttcgtggacagggacgggaagcacttccgccacgtgctcaattggctcagggacggcgccatccccgtgctgtccgagtccgactaccagcagctgctgcgagaggcagagtactaccagttgctcggtttagtcgactacataaacgagaggctgggttggaaggaaaccgacaattcggaggctgaattgacacgaaaggacgtgatcaagtgcatacaaacgcaaagagtcaggttccgtggcgtgaatctatctggccttgatctgtctaagcttgacttatcagaggtggacttcagctatgcatgcattaagaacactgatttttcatatgctaacctttacaaagcaaaatttgggcaggtagaagcttcgtcttcatctttccaaaacgcaattttgcgtgagtgtgagtttattggagctaatcttgaagaatctattttggatggagcaaaccttcgaagtgcaatttacaagatgcttgcttaacacgatgtagcctcattttaacagatcttcattctgcccatttacagactgctaatcttacacagccgacttaagagagctaatcttgaagcgg

SEQ ID NO: 44178 - DNA, 407 bp, Zea mays
  Clone ID: MRT4577_140296C.1
caagggggtttgggggcagctccaggaaaggaccggcacagcccaggggggggaagggggggggggaggggggggaaaggcggcggggggaaaaaaagggggggaaagggaaaaagaaacggggaaaaaagcaggagggcggggagaaggggggaaaaaggggggcacagcgggcgggacaaaagagaagggaaggaaaaaactgccaaaagggcggcaaaaaaatgccaaaagaaaaaaaatgaaagcaaaaaaaggaacaggggaggggagccacaggaaagcccccggagcgccacaagggggagccgaaacctaaaaggcggggaaaaactcccccaaaaaccgggtaattgtgcttgaacaattaaagaaaagggcagggaaagtcaagggggggggggagg

SEQ ID NO: 44179 - DNA, 707 bp, Zea mays
  Clone ID: MRT4577_140297C.1
ccacgcgtccgcaagttgtcaggtacaaacttgcaaggcgcaaatcttcagagagcttacttgcgagaagttgatttgcgtgacactgtatgttcttttgtcgtgtcccgtttattaaggatcttgggtccttgtgtttacaatctgcctcacgttctgtgcaagtagtttctacacctctcatgacaccagcatatagacatcggaggatgaattttaattgcgtttactttggtcaacagcaattgactggtgctaagctcggaggtgcaaatcttcttggagctatcagatgatctacagattgttcgtgtagcttcatactgtgtatactgtactacacaaattcattggaggtaatgcggcaggaccatctgcggagttctggtctcaatcatgatcgagaacacaaatattccttctgttcaaaaataaatcagttcctagaatgattctaagtcgaactatcttaagttcgaccaactttataggaaaggatggagtttatgtgctgttctttgtacgccgccctctgattggaagtttagaatctagcatgttagctgtcagagctgaaaccatcacagcaagcacatttgctgggccccgattgcatggacagatgactgtattgtgttattcaaaaaaaaaaaaaaaaaaaaaaaaaaaggcgccgtctagaggtccaagttagtacgcggcagcga

SEQ ID NO: 44180 - DNA, 428 bp, Zea mays
  unsure (1)..(428): unsure at all n locations
  Clone ID: MRT4577_140298C.1
ngaattcggcacgaggatccagctctgattcctggagactattcagatcacacacctcggttgctaatagcataggacacacactctactattcttaggtgttaaagtgcaccctgcagacttcgccggacaggttgaccgccggacagtggcgtcgcacgagcaaacctccacgcagctggccacggacgagcatcatgtggccatccgaggccagccgatcatcctgtaggagatcaggaggaaccgctccttggcgcactagcggtcggtgatcgccatgcacggcgaccagaccaggatccacaaggtgatcgatggctgcgagtgcgagctctagacgcgcagcgacatcaaccgcatcctggtgcccaagggctgctgcatatccttcacggactctgccgtgctgtgcttgagctacatgg

SEQ ID NO: 44181 - DNA, 212 bp, Zea mays
  Clone ID: MRT4577_140299C.1
tgttttccagcaacgcgtagcatgcagcgcaaggagagctcctagcgcccgggcgggtagcttcaccatgaacatgggcagaaggtcccctggtgggacaactatcctgcgcaaggactctatcgcgagcctgaccatgtgcgccatccagcgcgccatacactgcgcgcaatgctgcggaatgactcgcatactgctgtcgctgtcctcgc

SEQ ID NO: 44182 - DNA, 862 bp, Zea mays
  unsure (1)..(862): unsure at all n locations
  Clone ID: MRT4577_14029C.1
gaattacaaaaaaaaaaaaaaaaaaaaaaactaagtcacgacactcccgtttcccgccgcctccgccctctgccgccgcagccgcagccatgggcgcgtacaagttcgtgtcggagctatggaggaggaagcagtccgacgtgatgaggttcgtgcagcgcgtgcgttgctgggagtacaggcagcagcccgccatcgtccgcatcaccaggcccacccgccccgacagggcacgccgtctcggcttcaaggccaagcaggggtatgtggtctaccgtatccgtgtgagacgtggtggcaggaagcgcccagtgcccaagggtattgtttatggcaagcccaagcaccagggtattacccaactcaagttccagaggaacaagaggtctgttgctgaggaaagagctgggcgcaggcttggtggtcttcgtgtcctcaactcctactgggtgaatgaggactccacctacaagtactttgaggtcatccttgttgatgttgctcacagcgctgtccgcaacgatccaaggatcaactggctctgcaagcctgtgcacaagcaccgtgagctgcgtggtctcacctctgcaggaaagaaattccgtggtctgcgtggcaagggtcaccgccaccacaagaacaggccctcaaggagagccacctggaagaggaaccagaccgtctccctccgccgctaccgttaagcttgtgtgttgggtatgttcccgtggaacctgtcctatgcctacctcgacagtatctgtttgcgccgtcaaattttgctaccttcgntctgtggatgaaccttttatgtccaggcatgtctggtgaactatttgccaaaaaaaaaaaaaaaggccct

SEQ ID NO: 44183 - DNA, 391 bp, Zea mays
  unsure (1)..(391): unsure at all n locations
  Clone ID: MRT4577_1402C.1
cgggatgctggtgcagaagaggggcggcggtggcggcggcgacgacgagccgtcgccgagcgtgaagcccgtgcccaccatccgggtcaaggccaagcacgccggcgtcacgcacgagatctacatcagttccgaggcctccttcggtcagtccagccgtctgctctctctctctcgctcgctcgcgctgacggatgctgctgcgcaggggagctgaagaagctggtggccgccaagacggggctgcaccccgacgaccagaaggtgctgtacaaggacagggagcgtgactccaaggcgttcctggacacggccggcgtcagggaccgctccaaggtggtggtgctggaggatcccgaggcccgcgcgcgccgactcatcggngagcgcc

SEQ ID NO: 44184 - DNA, 437 bp, Zea mays
  Clone ID: MRT4577_140300C.1
gctcccccacgactgcagctccgaaccggagagcacaagagatgctgcgaggatagaacgtgaacggcgtcagacggattccggtaccccctgcgggggacaccgcgctggccaaggtggacgcggtcggcggcgccgccgcgtacgctggcatgaacagcctctacaacggcaagtctgggcaccgagccatcttcttaaaccgaatccagagaatctaggacaaagggtacccctaagggactcaattgatgatcccatggattgaaccaccaatcatttatgatgcccgtgctcgaccgaatcttgttgagagaactactgcaagtccgcatcgtcatatgtcgaaaattgttctccgggcacttacaagggactatgccagaaaggctaccaaatagcgtacggaactctgaaatagaaattcaatgaaaaag

SEQ ID NO: 44185 - DNA, 618 bp, Zea mays
  Clone ID: MRT4577_140301C.1
ccgacaatacaaactattcatacacaagacaagagaggatctgtctcatgaaaccctgacagtattaaacacccaacggcagacgaaacaattagggaactttacttgccattagaagaaagtaaacaagcaacagattcctgccattgttcaaggagacccgatcgacactaacattaacactaatagcagccgtcgccggcatcacggagcagcagcgacacatgtttaagcatgccagtgttgccggcgacgagactgatatatagttgcacatctatcacgcgagacatgtatcagcaatataacaacgataagaagcagcattagtttgattactttgtacaaccagtctgcacagagggtacacatgggcagaagtatgtgaactcaatgcaccaaggtgattccgcacatttaggaggaaagcctagttttcattttcagcaagatcaaaagcagtttggtatgcaaggagagcatcatccttgcttccataaatcagcttgtccaagatgcttgcaacacttttaagctgactcaagaacataagacactgggaaaatgtttaaaaaaatctagattgggaaatgtctggtatattttgacaggacattg

SEQ ID NO: 44186 - DNA, 334 bp, Zea mays
  Clone ID: MRT4577_140302C.1
tagggggaaagctgccacgcccgcagagcaccgatcctgaatttcgggcgccacccacgcgttcgtttgagaccaaccagcagcattatagaggggcagtcagtagcaacagtaaagaaacactgcagaccaagatatactccttcctaaagctcagtgctataattgcatagcgtgctaacacgacaatttccctatttttttacaagcccgtataacttccctacatccaccataccttccataaacgagatctgcactatgtgaaaacccaagtattcaaccctataagcgtcaacaaagccacacaggaagcagcataccttgatcaccc

SEQ ID NO: 44187 - DNA, 224 bp, Zea mays
  Clone ID: MRT4577_140303C.1
gcctatgcatgccgcccgggctatcagcggctctactctatggttccaaagcccgacattcgcgcgcgcaggggggggtcccaacgtgtacgggcccccagtttaacacccggggggttgtaacaaaggtgaccacgaaaaagactgaggacaagccttttggggaaccgccggacacacccctttttccgagcaaagaagccaccgggccgcccccccccccc

SEQ ID NO: 44188 - DNA, 3201 bp, Zea mays
  unsure (1)..(3201): unsure at all n locations
  Clone ID: MRT4577_140304C.1
cgctcgcgtgcgcgggcgcgtgcctttgatctctatctgggcgacctttccttctcctcccgaggggcacattcccgccgtctgaacgcgctccctcgttgagggggtgtctccttgtggggactagcgttccttgacggccctcttcctgttgatgtcttccctgtcggccggggtttttttttctcttggcgcaatcgatcgcagcttaatttcccgctgaaaacattaatcgcgagagctggctgactgagcttcacgtttcaaagccggtgtagttttagatgctaataatttgttttttttttttacagagcaagaggcgtcccaagctgttctggatctccgcggcggcgccgttgacgtccgtcgtgctcgggagcgttctggtgtacctcacgcacgctgaaaaccacggcatcgaagtgatcggttacctgaagaaaggcctgaatccaccgtcggtgacaagcctgcaattctcaccgccctacatgatgctcgcgctcaagactgggatcatcaccggcgtcattgccctcgccgaaggcatcgccgtggggaggagcttcgccatgttcaagaactaccacatcgacggcaacaaggagatgatcgcgatcgggacgatgaacgtcctgggctcgctcacgtcgtgctacctgaccacggggcccttctcgcgctccgccgtgaactacaacgccgggtgcaggacggccatgtcgaacgtggtcatgtcgctggcggtgatggtcacgctgctgttcctgacgccgctgttccactacacgccgctggtggtgctgtcggcgatcatcgtctccgcgatgctgggcctggtcgacttcggggccgcgctgcacctgtggcgcgtcgacaaggtcgacttctgcgtctgcgccggcgcgtacctgggcgtcgtcttcggcagcgtcgaggtcggcctggtcgtcgccgtcgccgtctccctgctccgcgtcctgcggttcggcgcccggcccaggaccacggtgctcggcaacatccccggcaccatggtgtaccggaggatggaccagtacgccgccgcgcagacggtgcccggcgtgctcgtgctgcgcgtcgacgcgcccgtctacttcgccaacgccagctacctgcgagagaggatctcgcggtggatcgacgacgaggaggagcgcaccaagagccagggcgagatgggcgtgcggtacgttgtcctcgacatgggtgccatcggtagcatcgacacgagcgggacgagcatgctggacgagctcaacaagtccttggacaggaggggaatgcagatcgtgctggcgaacccgggcagcgagatcatgaagaagctggacagctccaaggtgctggagcagatcggccacgagtgggtgttcccgacggtgggcgaggcggtggcgtcgtgcgactacgtgctgcactcgcacaagccgggaatggccaaggacagcgccgccgcccacgagagcatggtgtgacgagcaccgccacgccaaccgtatgtgtagtgtgctccggttccggtctgacgtaaccagtcgtcacgcggaccgagatgaattaagtatacacgtgttctcgagtattctgcacttaagcacccgatcccatcagaactccgaagttaagcgtgcttgggcgagagtagtactaggatgggtgacctcctgggaagtcctcgtgttgcattcctttttttttggttttatttttgtttgtttttcgaacaccaaaccatagtaaaaatgggtgaccgttctcgtgttaaattaccttttatttgttttaaggggcgtttttcgggtactttgtgcggaggaaggatgtccagtgccgtgggcgagccgagcacggaggtgtgggcataagaggaaggaggacgcaggatatgacggatgcgatcataccagcactaaagcaccggatcccatcagaactccgaagttaagcgtgcttgggcgagagtagtactaggatgggtgacctcctgggaagtcctcgtgttgcattcctttttttttggttttatttttgtttgtttttcgaacaccaaaccatagtaaaaatgggtgaccgttctcgtgttaaattaccttttatttgttttaaggggcgtttttcgggtactttgtgcggaggaaggatgtccagtgccgtgggcgagccgagcacggaggtgtgggcataagaggaaggaggacgcaggatatgacggatgcgatcataccagcactaaagcaccggatcccatcagaactccgaagttaagcgtgcttgggcgagagtagtactaggatgggtgacctcctgggaagtcctcgtgttgcattccttttttttggttttatttttgtttgtttttcgaacaccaaaccatagtaaaaatgggtgaccgttctcgtgttaaattaccttttatttgttttaaggggcgtttttcgggtactttgtgcggaggaaggatgtccagtgccgtgggcgagccgagcacggaggtgtaggcataagaggaaggaggactcaggatatgacggatgcgatcatactagcactaaagcaccggaccccatcagaactccgaagttaagcgtgcttgggcgagagtagtactaggatgggtgaccccaagcgagaaccataccttgcattccttatgtcctggttttatttttgtttgtttttcgaacacccaaaccatagtaaaaatgggtgaccgtcctcgtgttaaattcccttttatttgttttaaggggcgttttgggggtactttgtgcggaggaaggatgtccagtgccgtgggcgagccgagcgcggaggtgtgggcataagaggaaggaggacgcaggatatgacggatgcgatcataccagcactaaagcaccggatctcatcagaactccgaagttaagcgtgcttgggggagagtagtactaggatgggtgacctcctgggaagtcctcgtgttgcattcctttttttttggttttatttttgtttgtttttcgaacacccaaaccatagtaaaaatgggtgaccgtcctcgtgttaaattaccttttatttgttttaaggggcgttttgggggtactttgtgcggaggaaggatgtccagtgccgtgggcgagccgagcgcggaggtgtggcataanggaaggaggacgcaggatcccggccaaa

SEQ ID NO: 44189 - DNA, 267 bp, Zea mays
  Clone ID: MRT4577_140305C.1
agctggttcgtggatggcggcgccacaggctctcctgactatcgctgctggtcgtcgtgctagctgtggtcgccgttgtcgcaaacgtcagtcacaccaagcctctgactcctgacgggcgcatggtacactacatccacagcaacttcatggacgggccgtgggatccctctcacacgatcttctactgcggtcgggacaggtcctgcaccacggattgctcatacgggtaccatggcactcacgcgcatgggtacgagctgcata

SEQ ID NO: 44190 - DNA, 113 bp, Zea mays
  Clone ID: MRT4577_140306C.1
ccccatctcctctggccaaggaatcggtctcatcccggcgacctaccgtccggtacgtaatcgggtctatggtctgtatcacaagccacagctagagggtccggaggctactc

SEQ ID NO: 44191 - DNA, 257 bp, Zea mays
  unsure (1)..(257): unsure at all n locations
  Clone ID: MRT4577_140307C.1
tgcnctactcaccagacgcctcaaccgncttttcatcnntcacccacatcactcgngacgtanatnatggctgaatcnnccgctacngtcangccaatggcgcctcaatatgctntatctgcctcttcntacactgcggacgaggcctatatnacggatcatgtctctactcagaaacctgaaanatcggcattatcctcctgcntgcaactatagcancagccttcanaggcgatgtcctcccgtgaggccaaata

SEQ ID NO: 44192 - DNA, 391 bp, Zea mays
  Clone ID: MRT4577_140308C.1
ggcaaaaccaaaaaacaccattttttccttaaaattttcttagaaaaaacccaaaagggggcttttttttccaaaaatcaccaaaaaaaacacgcggggggggtgggactgctgaaaccgacgatgaacacatgttttaaaacggacggggggggaccttccaaggaaaaacacagatgggaaacagcaaacaggacgcgttcgaaaataaaccctcggggggggggaaaacatccccgggcgaaaaaaggataacctgggggggcggggccaaccgttcagttcctaaaagtaaagttggggggcgcggcccccacccacagtttccaccagtcttaggcggagtaccacaaccggagcccccgggggcacccgaggtggcccccccccc

SEQ ID NO: 44193 - DNA, 376 bp, Zea mays
  Clone ID: MRT4577_140309C.1
aagaggaaaacgcccaaatacaaaaacaacaaagccccagaggacaaaacacaaaaccaggagggaccatcaacgggcacagggcacgaaaaacgaggacaaaagggccaaaaaccaggaaacccaccgaaacaccaagcgggaaaagcggaacaaaccacgccaaacaggggaaacaaccgcagaaccagggctcccggaacggggaacccccccccgcccaaagggccccgcaaaccccccccgggccgcccccgccccgggcacacaagagcccaaagaagcgcacaaacttgaaaggggtaaggggcccacgacagccccgcaacccaaagggcgagacccccggtccaaaccccgaggccgcccagggaaa

SEQ ID NO: 44194 - DNA, 664 bp, Zea mays
  Clone ID: MRT4577_14030C.1
gcgtccataggtatgtctttcctcactgaaaactttttttataaaactatccttagttcatgatcagttggtgaaaaaatgcttcaagcattgttgtttcgaaccacacctttctgtagatgtaattcaagttttctaccacctgttcctactaatgcagataaaagaaaaaccgtctcacattcctttatcttatgcatgaaaactgttccatgtattttcagaaagctagagtgtggcatgttttacatctattataacggtctaccatttttgggcccatctataacaaggacttgtcccctggtagtaaatgaaaatgtttgtccctaaggctgagtccagtgcacagcctctctctcgccctgccacgtcagctctcgcctccactctcgcccctgctgctccagtgcacaggctgcagcaggctacagcctcaggctatagcacacgtggaccaatcagaaaccgccactcactgtcgcccctcgctctcgcccgcgaagacgccatcgtcaacgcgtcgccccgctctcgcctgcctatcgccgggcggtagcagtagcgcccgccgggtcgctctcgcccgccttcagccccgctctcgccttctgctgggcgctatcgccctcactatagcctgcattggcaccagcctaagtct

SEQ ID NO: 44195 - DNA, 266 bp, Zea mays
  unsure (1)..(266): unsure at all n locations
  Clone ID: MRT4577_140310C.1
ggccgaagataagtttgggactcttgtcctcggcttggcccctgacaaattggctgtattctctggtgttacgcagaacttgaatctgttctttctggtttgaatgtgcttgctgcgacttactttgctgttgttcctgctgcgtcctaccggaccctatcatntctgagcggtgcgactgtttatggggggtgatcttgtccgtggttccgcccttcttgcgcttgtccccagtgctgtttcccctgctgcctgcccccctttgc

SEQ ID NO: 44196 - DNA, 291 bp, Zea mays
  Clone ID: MRT4577_140311C.1
aaaaacggaaaagctaccggcggggccttggaagggcgtttatgggggtggttaaagtttttcatttttcctccatggccaaaggaccaaagggttgcggaaaggggcccaaaaaaacaaccaatttttttgaacccatgggggaataagggggcccccttacaaccgatttttgcctgattggaggggggatgaaggaaatcaaaggcaaacgggccatacccttgggggttggggtccccccaggaccatttgattcatccaagggcattagtcccctgaatcacgggg

SEQ ID NO: 44197 - DNA, 360 bp, Zea mays
  unsure (1)..(360): unsure at all n locations
  Clone ID: MRT4577_140312C.1
cgggggaaggaattccggggggctncacatanccngcattttgctaacggactcngacacaagcacgcatgggnnaggctgtgtttctaaccgtgctgctgaccacccccccccgcctatggattataatcagctcaggcctaaaaaaaaacctgcttgccaaggattagcatggagccaagtggaagattcgtcatatatataggggccagcctcgaaagcatctcttgactactggatggagttcatttgtcaaaaaaaagaaactgcttacaagggatgctgtgtaatttctccgacgagaaaactgtaaactaatgatggaagaacttacgcctattcagcataaaaaacacgccc

SEQ ID NO: 44198 - DNA, 501 bp, Zea mays
  unsure (1)..(501): unsure at all n locations
  Clone ID: MRT4577_140313C.1
ttgcttggaaccttgggctgatttatgtgcctgtggatgtgcgggtggatgtgcgggtggatgtgcgggtggatgtgcgggtggatgtgcgggtggatgtgcgggtggatgtgcgggtggatgtgcggggtgtatattattgtacggaaccgtctctgatgtttgaccgagttgagtgacgcgagagaccgggagattacgtttctcttttgttattacggacctttgttcgcgcggttaatcgggtatcggaggacggtcccggtgtcctattggctaatcgggactacgtttagggtttgcgggacgacgtgagcccggtcgggagaacggagtcttgttgtagggttgtacgttgctgcgatcagttacgttattgntccttttgtcgtgtgaggatctgcgctactcgaaaagtaagccggcattcggacctctaagcgttaggagaagaataggcggcctaggaggagttataaggtgaggagcacgactcgactc

SEQ ID NO: 44199 - DNA, 388 bp, Zea mays
  Clone ID: MRT4577_140314C.1
aacgttagcggcgccctttttttttttttttttttttttttttttttttttttttttttttttttttttggggacccaagggcgagttaactatttgcattaaagggaattggcaactttgacatttgttccgctgatgggcctttttcacaagggcatactccatttgaaacacaagttcattttgtttagcatcgaaatatatttattttaatggaacaaacaaatttttatgcccgtttacaacttggggggggattgataccatccccccgggtcatcaaaaatgtaccccgggacttggttggccctcagggagttattaatgccccctttttcaaacttacgtccaaatccactacccttgttacccccccagggagcctgg

SEQ ID NO: 44200 - DNA, 863 bp, Zea mays
  unsure (1)..(863): unsure at all n locations
  Clone ID: MRT4577_140315C.1
cctcgaggccggccgggccgggatgatgtgatgatctaattgtttccctattggtttgattggccgccatgatggctcaaactgtattagctctatctgatcatctccttggcgatccgactttccaaaaccacggtcccatttatttaatcaatactatgacattgcaactgctaagtttctactggtggtttcataatacttgttatcatataatcatgtaacacttacgcagacaatttacgttcaaacgtgctagcaagccgcatgggcatacaaatcgaaacaaagctgatcaggaaacttatctgcaaccggccgtttgagatttttccccaatttgtcgacttgctagtataaagatattaaattaatagatgataagatttactatacaataactataattttgtatgaaaagcaaataatgatgtaaaacaaataaactggaaattaaaagtctcatcggcccgaagccctgaagcacacaacagcccagtgtggtcaagctaattattttgtatttgctagcatgttttttaatgcatgtgctagtattcatcgcaatgcgcagcgtgttcttgctggcaattgactaatgttttcaaaattttggatgaaagaaattttaaaaaatctggggtaaacgaggattctagattaaattagagaaatttatagatttttatgaatttatttagctcttgtccctttagatattgattctaatttttaacaataaatctggctcanaaagttgaacctaaccggcattatccttgacctcacagtatgaggctcatacaatatgaaaggtccagccctgagccccttagggcctcctgtgtgatctagggacacta

SEQ ID NO: 44201 - DNA, 330 bp, Zea mays
  Clone ID: MRT4577_140316C.1
gacacacgtgtggccggtcgatacagaacctgagcataccctagtgaggtagtctggttctacggacacttaccttcatcgaaacgggctttgttccagcatctaggatacagatcagaaggcgctggtcactcgcgtgcagaaattcttgcggaccatgctaggaacacaaggcgctctcatcatcccgttgacaattcacatcgagcttggtttcaagggcctaacggcgcaatgtattgaaattgttgaccccattgtctgctgcacctttggtttggctagctagattagtgctatatgagctatgctatgcacgggtatgttaga

SEQ ID NO: 44202 - DNA, 481 bp, Zea mays
  Clone ID: MRT4577_140317C.1
acactcctatgggcgattgggtctctcgaggccggccgggatccatcatcatccacctcaattgcaaccttgtccgtaaccctcatctcgacttgtattacaggaactggatcaacatccacaaccactacaaactgtgcatcagacagacacaccaccatcgacacctaatgagccctgtcgaggaacaccaactaatgtctgccgtcctacaactgcacaatcctccccaacagcctgcagatgaacttacttgaccaacgcccagatcagcagaatcacgctgttgatcaggacgttcttccacctgaacatctgcgccacgaagaacgtcgttgcttggaccacggcgacgatctgggcctccgagaacagccccaacactgtactgcatccacatcaagcgactctgagcaacgtagactcgatcaagagagaccgaccatgcgcgcgtgcgtgagacgacatgctatctaccatc

SEQ ID NO: 44203 - DNA, 243 bp, Zea mays
  Clone ID: MRT4577_140318C.1
gtcgcaacacacaccgctgctgcaagaacttttgagagcccaaccgcacaggcaggagatagagcatggatccagtgacagtagcgtggggccggtgagcaaagatggaggggaaggaggaggacgtgcgcctgttcgccatcaagttcttggagcggtaggccatcgaaacggttgcgcatggcgccgttttcggtgactactactaggtctacaaggtagtcctgctacggtgtcctttgt

SEQ ID NO: 44204 - DNA, 373 bp, Zea mays
  unsure (1)..(373): unsure at all n locations
  Clone ID: MRT4577_140319C.1
gtctcctactatattttaatcactaccanncgcggttcgcctctatctatcttggcccgcctcaagcttgcattttctctctctctctctttccccggaagtgccaaactttccttgtgccggactgctggcctctttttccgcatccggcgaacaaattcgaaagctatcaactctctccctactactttttcccttctccaggccagccacaccacttcttcgccaagctcgcatccatttccaaactcttacctacatcccccacctaacctcctttatcacccaaatcggtctccttacgctaatggaattcctcttcggccgtatagatccacatctgctgttgctcttgtgctactctgctccccat

SEQ ID NO: 44205 - DNA, 347 bp, Zea mays
  Clone ID: MRT4577_14031C.1
atcacccctctctagcaaaggacatcatcccatttaacactcctaacgacaacaaccccctgcataacataaactgaccccatcttgccccatatcaatcaacgcaaggctccctctgagacagcacaacactccccatcctaccctttacaaccgctgaacccctgttcctcattctggacacgataccactactaccataccacccaagtaacaccagacaaccctgcttcctttacaccgcaacagcttgcgcccccttaccaccagcagggccccactcaccccacactcctactaccactacaacagttggcctccttccaacatgcttttacagacccccc

SEQ ID NO: 44206 - DNA, 611 bp, Zea mays
  unsure (1)..(611): unsure at all n locations
  Clone ID: MRT4577_140320C.1
tcgaggnccggccggttccgcggaaaaaaaaaaaaaaaaaaaaaaaaattaaaaaaaaaaaaaaaaaaaaaaaaaaaaaaaaaaaaaaaaaaccccccaggttaaaataaaggaggcaccaaaatttttttttccccaaactcgaaagtcgaaagggccatgtctccgttgccccgccgccgcctcggggccctcgccctcctcgccgccgccgtcggggcaagggggtccgccgggtccctcaggggggggggaaacaaccggctgccaaagaacggcctccgaaaggggttcatccgggactccgccacctccaacagtttcaacaaggccacgggcgccttcaaaatccacctcgcaagaacctgttacgtccatttcggttcccacctcgttaactacgaaaggaccataaccggaaagttctccaggggggccatctcggacctctcgggggtcaaggcaaaaaagttcttcctcggggtctacgtcaggggaagggccgcgcaccccgaccagggaaccatcgagttccaggccggtttcgtctcgaagtcgttatcaccctccatgtttaacaaggggcgcacctgcggttccagggttggcgc

SEQ ID NO: 44207 - DNA, 850 bp, Zea mays
  unsure (1)..(850): unsure at all n locations
  Clone ID: MRT4577_140321C.1
catataaatttcacagaaatcagctcagatttatttgtgcatgaaaaacgcaggaacagagggggaaaatcgtgttccagacaggccctcagtgggtactatatatagctcgctgtcgaacgagcgggcggcttttgtagtcttcataatagtcttgtttgacgaggaagcttccaggtatctattttccagagattattctgtgtcacattgtccatcttctcctgcattggtctttgtttttcttggaatatatcaaactagatgaatacccgtgtgttgctgagtgctgacgcactttcaccccccttgagttggaggagacgtctggttgaacgcgtgctccatgnnnnnnnnnnnnnnnnnnnnnnnnnncgcttcgatcacgttgttgtacgtcgcggtcgtccacgggaacgcgagcttgcgcatgtgctccatgaccgcggacatcttgtcgtacatccgccgcttcccgtaggcgccaatcaggatgttcagcgtgcgggtctccggctcgaccccgtagcctcggaacttctcataccatctctccatcagctcaacctcgccccggttcccgaagaggctgaggatgatgttcatggtccagacgtccggtttgcatgacacgctgtcgagcatgtcggagagcactcgctccatgtcgtccagccgaacggccttcccgtagccgctgaggacgatgttctgcgtgaccgtgttgggtgatatggagcgctccgccatgtctttgtacatggtgtcggtgaggtcgaacctggcagcgtcaacgcaggccttgatgatggtgctgtaggtgtagacatcaggctggcataaaggggag

SEQ ID NO: 44208 - DNA, 320 bp, Zea mays
  Clone ID: MRT4577_140322C.1
aataagtgtggggtttttttttttgtgttattgggggacaagccctttttcaaattatcacgcttccaaaagcaccgactcttcctttcaattacatgaaaagggttttggtgggaaattaagacggagctgcaaaatctttttttcaaaacccaagggaaagcaattgttttttagctcaaagaaaaaaacgggttgaggcgtctttaacaaacaaatttggttttgcccggaaaaattgcaggatccaatcaaattctttttaaaaaacaagtttattcccggtaacattgccaggttggcttccccacccctgcatt

SEQ ID NO: 44209 - DNA, 1756 bp, Zea mays
  unsure (1)..(1756): unsure at all n locations
  Clone ID: MRT4577_140323C.1
gtaccggccccccctcgagttttttttttttttttttttttttttttttttttttgttacctagagggtttctctagaaagttcttttaggccgtgtttggaacacatgaatttcaaggggttcgcatataaaattcacggaaatcagctcagatttatttgtgcatgaaaaacgcaggaacagaggggaaaaatcgtgttccagacaggccctcagtgggtactataggaagcttccgtcactttatagctcgctgtcgaacgggcgggcggcttttgtagtcttcataatagtcttgtttgacgaggatgcttccaggtatctattttccagagattattctgtgtcacattgtccatcttctcatgcattggtctttgtttttcttggaatatatcaaactagatcaatacccgtacgttgctgacagcactttcaccacccttgagttggaggagacgtctatactagctctgcataccaacagacaacaaaaaatggagttgaagaatggccgccgctctgtttggtggatagcaagaagattctcaaccaatgcaaccaagctctaaaatttcaggaccgtgactcaagtcactgggtcattcaaaccatgacaaaatcagctggaaccagagccgggttctcctgatgcagagcatagatcttgtcggtcattccctccttgcgataagcctccaccaagatagagtacgtcgaagcatcaggctcgcactgcgtatgcttcatgcgcctgaacaccctctccatctccacaagatcatccgctctagcgcacgcgccaagaacagcgttgtggaaaggcgtgttcacgggcacgtcgagcctctcggcgagcttcaccatgcccaccaccttatggaactggcctgccctgctgaacccgtcgatcaggcagcagaaggtcttagtgtccggcctcatgccctcggaacgcatctggttgaacgcgtgctccatgttcccggcgtcgccggcctcagcaaatgcttcgatcacgttgttgtacgtcgcggtcgtccacgggaacgcgagcttgcgcatgtgctccatgactgcggacatcttgtcatacatccgccgcttcccgtaggcgccaatcaggatgttcagcgtgcgggtctccggctcgaccccgtagcctcggaacttctcgtaccatctctccatcagctcaacctcgccccggttcccgaagaggctgaggatgatgttcatggtccaaacgtccggtttgcatgacacgctgtcgagcatgtcggagagcactcgctccatgtcgtccagccgcccggccttcccgtagccgctgaggacgatgttctgcgtgaccgtgttgggtgatatggagcgctccgccatgtctttgtacatggtgtcggtgaggtcgaacctggcagcgtcgacgcaggccttgatcgtggtgctggacgtgcgcgtggcaggctggcataaaggggagctcttcatgtcgttgaggagctggagcgcctcgtccagtaggcagcttcggcagtaggccccaatcaaggcggtgtagagctcgggggtgggctggcatccttgctgcaacatctcgtcgaagagttggtgtgcccgggtcggctgccctgagcggcccagcagcacgatgagcttcatgtaggtgccctctntgggatggtagaacggctgctccttgagcatctcaaagacctgacgccaccgattcgctatcagcgtcagtaacaacat

SEQ ID NO: 44210 - DNA, 970 bp, Zea mays
  Clone ID: MRT4577_140324C.1
cgtcgggtcaagcagctgtacaacaagttcaacatcatctccggcacgtccatggcgtgcccacacgcgtccggggtggccgcactgctcaaggccgtgcacccggagtggagcccggcgatgctccggtcggcgatgatgacgacggccagcgcgctggacaacacgggggcgtccatcaaggacatgggaaaccgcaaccaccccgcgtcgccgctggcgatgggctcgggccacatcgacccggcacgcgccgtggacccgggcctggtctacgacgccgcgccggaggactacgtcaagctcatgtgcgccatgaactacactgctgcacagatcaggaccgtcgtcgcgcagtcgccgtcgtcgtcgtcgtacgccgtggactgcaccggcgcgtccctcgacctcaactacccgtcgttcatagcgttcttcgaccccaatggcggcagcgtcgagcggacgttcactaggaccgtgaccaacgtcggcgacgggcctgcgagctacagcgttaaagttttgggcttgagcggcttgacggtgatcgtgagtccggacaagttggccttcggcggcaagaacgagaagcagaagtacacgcttgtgatccgggggaagatgacgaacaagagcggcgatgtgttgcatggttcgttgacatgggtggacgacgcgggcaagtataccgtgagaagtccgatcgtcgcaaccacagtgagctcagatcggttttagagtcctggcaactaaaacctagattgacaacaactgagcatacagaactgttcagtatgaaaattgctttgcataaaacagtacatcgtttatgagcttcatgccaagctagagactatagtcgttggccttttaatcatcatatatacgtccatgtcatgattgtttaactgtattcaaataactgtacgtgcttctttcagtgtcgaaagttccgcacctcatgcat

SEQ ID NO: 44211 - DNA, 126 bp, Zea mays
  Clone ID: MRT4577_140325C.1
aagccgggggttaaaggtgagcgcgggaatgagactttattatgggtttgcgcaaggtgtctggcaccttttaactatggttgtagcgacattgaacctgccatccaatttaagggaggttatggt

SEQ ID NO: 44212 - DNA, 166 bp, Zea mays
  Clone ID: MRT4577_140326C.1
tcggacctaccttcctgcgacaaccggtgctgcaacagaatggacccactttgaaccaggttggtttggctaaccctgctggctacttgcaacagatgcgtccattccaccaaatgactgggtcaaagcttgctgggtacctacgacagcgaccaccggtaattaa

SEQ ID NO: 44213 - DNA, 549 bp, Zea mays
  Clone ID: MRT4577_140327C.1
tctcaaataatacaagtacataatcaaccacgaccgcatttatcagctatatgagcgagacactagacttattattcacttaaccactcctcacacaataattattttaaacttgagtttcgcgtgacacgaccacttcatacttatgtacacactccattgatgcatgaagcgaggcatcatgacatacatctaatacctcaacaacgcacttgtgctaagaataaaacaatcttcacgatcaactaattcaaccaatccattcatcataacagtcaataagaatagccaatcagcttaccattccaatagctgactcgaatctgcgagatcggtaatgattttccgattcaaacaatttgtcgagcgtatagcaggtgctacacgaaattcacgcacaccaccatccaatctttggacatcttctcttggggattcttttgtccgcgcgatcacaatttggaggcatcacgtagggaccggcatcgagacgggtgactgaacgacgacggcaagacaaagttgcagacgaccgagaattaacgttaa

SEQ ID NO: 44214 - DNA, 2526 bp, Zea mays
  Clone ID: MRT4577_140328C.1
tccttcaccatcctaagctagccaagcatgtggaggctaaagatcggcgagaggccaagcaacccgctgcttcgctcgcccaatggcttccttgggagagaggtgtgggagttcgaccccgccgcaggcacgccggaggagcgcgccgaggtcgataggctgcgccaggagtacacccgcaaccgcttcacgcgacggcaatgcagtgaccttctcatgcgcatgcagtatgcaaaacagaaccttcataatacaaaccttccggctatcaagattgaccaggattcagacgtcacagaagaaactatactaattacattgaggcgtgctcttaatcaatattcttctttgcaaggacctgctgggcattggcctggggattacggcgggatttcgttcattttaccactcatgatatttgcattacatgtcacacgatcaatggatgaagttttgtcaatagagcatatacgtgagatatgtcgctacatttataacatgcagaatgaggatggaggctggggaacacataccttgggaccaagctccatgtttggcacatgtgtaaactatgcaaccttaaggattctaggagaggtgcttgatggagaaaatgatgcattatccaaagggcgttcttggattttgtctcatggaagtgcaactgcagcaccacaatgggcaaagatatatctctcgatgataggtgtatacgattgggctgggaacaatgcaatcattcctgagttatggatgcttccacattttctcccaattcatcctggaaggttttggtgcttttgtcggatggtttacatgccaatggcttacatttatggaaaaaagtttgttgggcctatcactacaactattttagaaataagagatgagctctacatatggccaattgttaagatcaactggaacaaggcttgcaattcttgtgccaaggaagaccttatctatgagccttcatggttgcaaagtattgcaatggcttatttgaataagtttatagaaccattatcaaatctttggccaatgaataagctacgagaaagagctatgagtgacctcatggaacatatccactatgaagatgaaaccagcaactatgttggcttatgccctataaacaaggcattaaatatgatatgttgttggatagaaaaaccaaactcaaatgaatttagacaacatctcccaaggattcatgatttcctatggcttggagaagacggaatgaagtcaaaggtgtatgttggttgccatagttgggaaactgcgctcatagttcaggctttttgctcaacagggctcaccgaggagttttgttcgactcttcaaaaagctcatcagttcttaaaaaatgcacaggttatcgaaaacattcctgattacaagagctactaccgtgaaagaactaaaggttcttggactctatccaatggagaaaacttttggcctattgctgatacaactgctgaggcacttaaggcaatactgttgctgtctaacattccttcagaacttgtcggggatccaataaaacaagaacgactatatgatgccgttgattgcctcctttctttcgtgaacaaagatggtacattatcatcagctgaatgtaaacgaacaacttcatgggtggagtttatcaatccttctgagagttttcgtaatatcatcgtcgactatccatatcctgaatgcacatcatcattaattcaagctttagtgctgtttagaggcaagcatccaatatatcgtcgtgatgagatagacaaaattatcaaaagtggtgcatcattcattgagaaagtacaacgaaaggatgggtcctggtatggttcttgggctgtgtgtttcacttatgcaacattctttgctataaaaggattagttgctgcaggaagaacataccggaatagtttggctattaggaaagcatgcaacttcttgttgtcaaagcaactaggaaccggtggatggggagaaaactatcttggttgtcaaattgaggagtatgttgacagtggcagtccacatggagtcaacactgcacaggcgatgctagctttactctacgctgggcaggtcgaacaagacccagcgccactataccgtgctgcaaaagaattaattaacatgcagatggagaacggagaatttccccaacaagaaattgttggcaacttcaactcctcacttttcttcaattacccgaactaccgaaacttatttcccatctgggctttaggagaatttcgccgccgacttgttgcaaaaaaaggttaagatgggtatcttaagctatttctaataattgtatttgggatacaagtatccatgtatattttatttttcgtgatgatgggaatgtaacacaaaataaaatttatatttagtacgtatatgttaatatttgtaagattatcacaaacaagttgataatcatcagtgatctggttcctcaaattcaataacaaggatgcaaaatgtttggtagcaataaaaaaaaaaaaa

SEQ ID NO: 44215 - DNA, 164 bp, Zea mays
  Clone ID: MRT4577_140329C.1
acatgatcaacggggatggataatatagctgtatttgttttgctttgctgcacatacaagaggacgggcggcctcggtgacttacacagcttttgatcaaaaacccaacaatggcactggagacggctggatcttcaagcctaggaccgagggtgactagctgt

SEQ ID NO: 44216 - DNA, 332 bp, Zea mays
  unsure (1)..(332): unsure at all n locations
  Clone ID: MRT4577_14032C.1
aaaaacaacanatttnacacccttcacaaacttttacccaaaacaccctccagtttacccgcccactttcaacatttttcgtctanaactaaacctaacccccccactatacacttaatacattaaccccttcaacaaaaacaccgacacacaaaactttatttcaaaccatccacaaacactcatacatccatccccaactctaacagaaaatcacaccattcattaatcacccacatcctccacaagccacttcgcacttttttcatcaaaacacacatctcataataacatcaacttccatctcaacttatccgccccatctccccact

SEQ ID NO: 44217 - DNA, 669 bp, Zea mays
  Clone ID: MRT4577_140330C.1
gaaagtacttaccgggtttaggacggtggcagagtggaacaagtgacagtagcaaaagcagaagaagagtagtgagttttaatttggcaaaagcttcttcaccatcctctatgcctcctcttgatcagattgctttgcttgagaccattttaagtcttttacctgaaaagagaggaagatctttttgtaagttcttgttaggtctccttcgtgttgctttcattttaggagttgatgggaactgtgtaaagaagttggagaaaagaataggaatgcagttggagctagcaacgctcgataatcttctgattttgaactattctgattcagagacgttgtacaatgtagattgtgtagaacgaatagtccgccattttgtatcatcattgtcatcatcatcctcacagttacctgagttctctcctccatctttggatccagtgacatctccttctccagcaccgttaaaaaaagtggcgaagctagtagatagctacatggcagaagtcgcttctgatgtgaatctgaaaccggataaaatgcggtctcttgcagcagctcttccagaatcttcaagaccgttgtatgatggtttatacagagcgtttgatatttatttcaaggagcatccatggctatcagatagagacaaggaacaactatgcaaca

SEQ ID NO: 44218 - DNA, 222 bp, Zea mays
  Clone ID: MRT4577_140331C.1
acgtcaccattgatcaatagtaattagaagcagccatgagaagctacacagcttgatcgacccctctgcgaattattgtttattggtacgaccacgctcttacaaattgtaaaaaccagctcatacacacttaagatgaagtcaaactacggctactagtgaggagtactgattagtagcacggaagcttgtttggtcaagatttgactgatttgacagaca

SEQ ID NO: 44219 - DNA, 257 bp, Zea mays
  Clone ID: MRT4577_140332C.1
gccgcaaaaggttcgacgtgctcctatcgttgcggaggcgcgccgcggggatacgaatggagtccggcggcgccggcgagcttctgtccggacctgctgggtcgcccgtcacatccaaacccggcggtgggcgtggcggttggcgtgccgccctcttcatcatcgtgatggggttctttgagcgtattgggttcgtcggcgtgtcggccaacttgatcacgtacctcaccgggccactcggcatgtccacggctgcc

SEQ ID NO: 44220 - DNA, 405 bp, Zea mays
  Clone ID: MRT4577_140333C.1
accaacactcgtccctccccgatctttactttaattcttagccaccgacaacacacctcagggggtgtgtttttttatcaggcatccacaaaaaactccgcaactccaatcctgcctccgctcctcccttcctcactcagcaccctctcacgcccactacctttccattgacatctctctcacccccctatatgacatcccacaactgatcacaacctagtaacatccattttgatggtcaataagatcgtgttacaaacaaaatgtatcattctaaagaccatgtcgtagactcatcatttttatttcctaactagccaacaccaacgaaggcgctctggctctcttgcttagacatatgttcattccaacaaagcccacaccccaacgatccacttgtacagc

SEQ ID NO: 44221 - DNA, 2289 bp, Zea mays
  Clone ID: MRT4577_140334C.1
atggataagcgaactaggaatagaagagaagaggaggacgaggagttaatgctctttcttttccctgctctttatctaattactaatggagggagagagaaaagagcaaggcatgcttctattctacctggcaaggagagacttaaagagattcttgaagggcatgagaagaactgtcttgtcgcattccgtatggagcctcgtatattcaaagatatagcaacatttcttagagaagaacacatcctacgtgacacaaggggtgttaccgtggaagaaaaactaggaatgttccttttcatgttgtcccataatgctagttatgaggatttacaacatgaattcaaacatagcggcgaaactatccatcgacacatccaatcagttttccatgtaatcccaactctcatgtatagatttgtgaagcccgccactggaatttcagttcattggaagattagcacggatgaacggttctttccttacttccaaaattgcattggagctattgatggaacacatgttccaattaccatttcggcagaaaagcaagccccctataggaatcgaaaaggcacactaagtcaaaatgtaatgttggtttgtgattttgacttgaacttcacttttatatcatctggttgggaggggtcagctacagatgctagggttctaaggtctgcactacttgcaggattccatgttcccgagggaaaatattatcttgtcgatggaggatatgctaacacaccatcattccttgcaccgtatcgtggtgttagatatcacttgaaagaatttggccatggtcaccaacggccaagaaactataaggaattgtttaatcaccgacatgctttattgcggaaccacatagagagagcaataggagttttgaagaagcgttttctcattctaaaagttggaacacaccacccaattaggaaccaagtgaaaatagcagctgcggcagtgttgttccataatattatacggatgcacaacggggatgaagcaagaatgtttggaagaggatctcctaggatgaacttgatccaagctgcaactatgaaaaaaatatcccccagatctactactaacaagcgcaagaagagaacatcaccaaaagttggtcgtcttagagcaaactggaatagtggactagaaaagggtttagttgaaattcttcaagatcacaacaatgattgttataagggtcaaaatgggtggtcatcggaagcatggaatagaattgtcaagttattccatgagaaattctcttatgtcacatttacaaaatgccaaatccaagataaagagaaagagttaaagagagactacaaggctcttaaagaggcaaggcaacaaagcggggtatcatgggatgagaggttgtgtagaatagaagcagaagaacccatttggaataacctcaccactagtaacgagagacttaagaagtttcggactaaatctttcccactatttgaggctttaggagagctatatgatggaaatattgctgagggaaccatgaattttacttctattgagccttctcgacctcctgtcacacaaccttgtcaaggtgctgctacacagccttctcaagctgctttcacacttacacaaccttctcaaatcgctttcacacaaccttctctagctgctttcgcacgaccttctcgaaccgcttttagacatccttctctagccgctttcccacagccttctcaagccgcttttgcacagccttctcaaaccattttcacacagccttctgaagccactttcacacagccttctgaagccactttcacacagccttctgaagccactttcacacagccttctcaagccgctttcacacaaccttctcaagctaatatctcacaagccatttgtgatgaagatgatgagctcagagtattggatccaccagcccctgcatcagtgagcaaaagggcaaaaaatgttggtactggtaattcaagaacaagaattaacaagcgtacacaagatgggaatgtggttgagatgatgggaaggtttctagaaatgaaagaaaaacaagctgaggcggatgaaagggccacaactaatgcaaatgaggatgatttccctattcaaacatgcattgctattgtggatggaatggaagagttttctgatgatgagaaggttgattcttatgatgtttttaaggatgcccaaaaccgggccattttcatgactgccaaagatgctacgcgcataaaatggttgaggaagaagattgcaagaacatga

SEQ ID NO: 44222 - DNA, 521 bp, Zea mays
  Clone ID: MRT4577_140335C.1
ggcgattgggtttctcgagggcggccgggacccgtcgctctcctcgcgtgcgagcgccgccaccgcatcttcccatcgaactccgctgaccccgcatcttcccatacgagctgtgtttctccaagttcgctgctggccatatcgacgtcgtcatcctcgatccagacgagtgtgtgtgctatctccacgggtcttcgacagatttagatatatgaagctaaagtaatgaaggatgattttgtagtatcgtctagcataaggaaagaaagctgcaatttgtgctattgtcagagatggatatttaactttagcaatttgcaacttttaagtaatctgttaaattaaagatgagatcttgcagatttttcttattacctaatggattctcttattagctaattcaaatctaatcatgcatattgcagtaaggactatgtatgttgaatcaatgactctggttcaattttaaatatcacatgtgttttaagtttctcaaaaaaaaaaaaaaaaaaggggcggcc

SEQ ID NO: 44223 - DNA, 337 bp, Zea mays
  Clone ID: MRT4577_140336C.1
gccaagttgggtttttttaaaaaatggaccggttccattatactggccaaacacagaataaaatggctcaattcctagaaatatggaatgaagccgttccatcccggttggctcctcaaccaaacacgcccttactaaactataagctgcaacagcacacccttacggccctaaaagcacgaagatgaatggcaaccaggagccatccttgcctttcctttttcacgagcctgggctgacgcatttttctagacagctttcgtcgtgaactttgaagccagtggtcagaatttagaatctcccaccatacaggcaccatctgtcttgaaccttttgg

SEQ ID NO: 44224 - DNA, 771 bp, Zea mays
  unsure (1)..(771): unsure at all n locations
  Clone ID: MRT4577_140337C.1
ccggccgagcgccgccaccgcatcttcccatcgaactccgctgaccccgcatcttcccatacgagctgtgtttctccaagttcgctgctggccatatcgacgtcgtcatcctcgatccagacgagtgtgtgtgctatctccacgggtcttcgacagatttagattgcattgtaccaaggataagaaaaatggataagcgaactaggaatagaagagaagaggaggacgaggagttaatgctctttcttttccctgctctttatctaattactaatggagggagagagaaaagagcaaggcatgcttctattctacctggcaaggagagacttaaagagattcttgaagggcatgagaagaactgtcttgtcgcattccgtatggagcctcgtatattcaaagatatagcaacatttcttagagaagaacacatcctatgtgacacaaggggtgttaccgtggaagaaaaactaggttgtgtgtgtgtgtgtttttctttctttcctcctgaacttgcaaagggcgctatgccacctgtgttcaaatgatacacaacatccaaagagaaagcatgaggaggaaacatgatgcactcctgcctggcaacagatcctccacatgtctgcactctctacatcattggacacactttattcttggcagatagtagttatgtttagtttatgtattcattgatgattttgtagtatcgtccagcataaagaaagaaagctgncatttgtgctattgtcagagatggatatttaactt

SEQ ID NO: 44225 - DNA, 1983 bp, Zea mays
  Clone ID: MRT4577_140338C.1
tttatttttggaggaagcctcgggcgaggccggggtggatgttgggccgatacacgctaatacccggggggcagaaaaatccccacccgagggatggaagacaccgtcgctctcctcgcgtgcgagcgccgccactgcatcttcccatcgatctccgccgaccccgcatcttcccatacgagctgtgtttctccaagttcgctgctggccatatcgacgtcgtcatcctcgatccagacgagtgcgtgtgccatctccacgggtcttcgacagatttagcaagaatgtttggaagaggatctcctaggatgaacttgatccaagctgcaactatgaaaaaaatatcccccagatctactactaacaagcgcaagaagagaacatcaccaaaagttggtcgtcttagagcaaactggaatagtggactagaaaagggtttagttgaaattcttcaagatcacaacaatgattgttataagggtcaaaatgggtggtcatcggaagcatggaatagaattgtcaagttattccatgagaaattctcttatgtcacatttacaaaatgccaaatccaagataaagagaaagagttaaagagagactacaaggctcttaaagaggcaaggcaacaaagcggggtatcatgggatgagaggttgtgtagaatagaagcagaagaacccatttggaataacctcaccactagtaacgagagacttaagaagtttcggactaaatctttcccactatttgaggctttaggagagctatatgatggaaatattgctgagggaaccatgaattttacttctattgagccttctcgacctcctgtcacacaaccttgtcaaggtgctgctacacagccttctcaagctgctttcacacttacacaaccttctcaaatcgctttcacacaaccttctctagctgctttcgcacgaccttctcgaaccgcttttagacatccttctctagccgctttcccacagccttctcaagccgcttttgcacagccttctcaaaccattttcacacagccttctgaagccactttcacacagccttctgaagccactttcacacagccttctgaagccactttcacacagccttctcaagccgctttcacacaaccttctcaagctaatatctcacaagccatttgtgatgaagatgatgagctcagagtattggatccaccagcccctgcatcagtgagcaaaagggcaaaaaatgttggtactggtaattcaagaacaagaattaacaagcgtacacaagatgggaatgtggttgagatgatgggaaggtttctagaaatgaaagaaaaacaagctgaggcggatgaaagggccacaactaatgcaaatgaggatgatttccctattcaaacatgcattgctattgtggatggaatggaagagttttctgatgatgagaaggttgattcttatgatgtttttaaggatgcccaaaaccgggccattttcatgactgccaaagatgctacgcgcataaaatggttgaggaagaagattgcaagaacatgatatgatatatgaagctaaagtaatgaaggatgattttgtagtatcgtccagcataaagaaagaaagctgcaatttgtgctattgtcagagatggatatttaactttagcaatttgcaacttttaagtaatctgttaaattaaagatgagatcttgcagacttttcttattacctaatggattctcttattagctgattcaaatctaatcatgcatattgtagtaaggactatgtatgttgaatcaatgactctggttcaattttaaatatcacatgtgttttaagtttcatcttcaacactgtgacatgaagagcattttcacataactgtttctatttttctattggcaacatctgtatttacctattcttctatggatggctcatgagggattgattttttcactagtctggatttttccatagaaat

SEQ ID NO: 44226 - DNA, 417 bp, Zea mays
  unsure (1)..(417): unsure at all n locations
  Clone ID: MRT4577_140339C.1
cttnnnnnnntggcttgnttaacagaannccacccanaacggtgttgttgaattttagaaaantaaccccggtacacccacanccaacgngaaaaggatccaaaaatacccacggcaaaaatcactggccacacaaagcagacatagagctatggataaataaggctggtgcattgcccagccaccaccaaaaacagcaccccacgggaaggactgatcgaaagtcacgcctagatcttgttgaaggcaactatgacacaactctgaacgaactccccaacaggctcaacgcacagaaagtcctcaatgagagtgcccacagaaacaaggtcgtcaacaaaggccaacaagaattgcaacatcttgaaaccatatccaactgggacaagcttggaagccccccaaagcaacccctcc

SEQ ID NO: 44227 - DNA, 566 bp, Zea mays
  Clone ID: MRT4577_14033C.1
ttccgaatgacattaaatggggctgtcccccttccgcttccgcctcccgctgctcatccgattagcctccgagcaaggttaatgtttggagtttctattggttgttgggagatcctcaaagcattgtattatcagtcaaacatgttccaggtattactaaaagaaagcgaggctatccttggttcgaaacggcgcgcgagaaagggacgaagcttcgcctggctgacggaaacgaaggagcgagagaagaagcttccgctccgaggtacatacacacgaagcggaagtagattgtccagcagaacacgagagagaaaaaagacgatgatttgtagttcgtgtgtataggatttgtgggtatttttgtatttgtatacgaaacagtatctcacaactatagatagagaaataatgttacacattaggacacgttttggggccgaggaggaccggatcgtctctatctccgaaggtgttttgtattatctttatgctcttatttgtaaggctaaaggtactcatgtattcactcataattaaatggaatgaaatcaaattgaatgttt

SEQ ID NO: 44228 - DNA, 660 bp, Zea mays
  Clone ID: MRT4577_140340C.1
ccggccgggctcccacagccgcccccgcccgtcacaccgccatcgatagatgtccgcttcataccttcgcgcgcctccggattagatggacacattaagccctgtctgtactctgtcaatgcatagatgctcaacatgtttgttggtctatgtgtgcgcacggttgttcaagttcaacacagtgagcgtggattgcttgtcgtctatggcaccgatgggcaccaattgttgtggaaaagagccatggacgtacccgtatcacattctatgccggtttatgggattggtgaaaacagccataccatccgcgctgaagtttgctcagattttggtcccgactttgatcccaaggtttttgctgagttgtgcactctggctagtggtagggtcaagcacctggtcctgtcgagatcatcctcggatggaggatcttgaggctgctcaagcttgcttgaatctggatgcttcgcctttacctttaagatttgctacatgttcctatcattgcatggtggaccttctgtcgcctgttactgcgcagtctcgaactcttattggcatgggtaggcaacatacgactgcgagtacaagcaaaatatatcatgaaggtgaagaacctatggtctttttctacctttagcaatccaccctaagttttta

SEQ ID NO: 44229 - DNA, 231 bp, Zea mays
  unsure (1)..(231): unsure at all n locations
  Clone ID: MRT4577_140341C.1
gcatcaacatcacaggagaatggggggaaataaacatggagttgtacaagaactcagtgcactggacagctggttccacactcggttttttgtttgggtgggttggggtttgaccccnttccttgattgcaagtccaaaccgggggggggggaaacagcgtttctccgggttctgtttgcgtttcctgctaggttcctctgggcttctcctgggcgggttctttccccctg

SEQ ID NO: 44230 - DNA, 554 bp, Zea mays
  Clone ID: MRT4577_140342C.1
ttaggtttttgtaactgtcatgtgcgaattttggcaaatgcaagtgccgacgtctggagggtaaagttgctgtgattactgctgcaacgttaggcataggttatgccgtagcggagcgtttgggccacgagggcgcccacgtagtgatcagcagcaggtatttgtctcaggtggatgctgcagtggcagagctgacgaaacagggcatcgctgtaacgggcctgacgtgtcatgtgggcaatgaaccagatagacaaaaactatttaaactggtagaagagaagtttggaggatttgatattctggtttcaaatgctgctgtgaatcctttctttggtaacattctagacacatcagaagattcctggcaaaagatatttgatgtcaatgtaaaatcaacattcctgctcattaaagaagcaatacctctactggaaaagaaaggcggtggctccattgtcattgttagctcacaaggcggctatgaagtgaaccctgttatagcggcatactcaataagtaagactgcactattgggactggtaaagggtttg

SEQ ID NO: 44231 - DNA, 1605 bp, Zea mays
  Clone ID: MRT4577_140343C.1
atgaccgaggaagcgaagctgactgaggagacgaagctatttgaagagaagaaggttgcagatccttacattgctggatttgttgagtccatggcaaaaacaaatacagagaaaattactaaggagatcatggaaggtttatccgaagattctgatggcagcgatagctatgacatggaaagtggggatgaagactctgaggatcggccgtggcgcccaagccatactatcttcggaaaaaacgactatcaagcaaaatttagggagaagtttgatgagccaaacgacgactggctgaagtgtattgaagctaccagtgatgagctacttggagcttactccaacgccgaagataatgctcaatccgcagccttcggaggctgggggaagaaaaggctgaacagggtctttgatgcaattgacttcatataccctgattattgctttccgctgcgagggcaaaggaagaaaagaaaagccaccgcttcggttgccattgtcgtgtcggctgagccgaaaaataagaaaataaaggttttgacccatcggtcgcgatatattgaaccagccatagtgcctgaacttggcgaaggggcctcttcaactgctgaagcaagacaagctgctccaattgcacagagcgttgaagagccaactgtagtgccgaagatacctacagtcgggaccgccaaagctgaagatgataaggccgaagagccacaagttgaaaaagcgataaaaaaggaggggatggccaacgtgttggatgctgtgctagagactacaaaggctttgagccctgctcctacaaagaaagttgttgaagctgcaaaagcgcaagctgaagccgaaactgggcaagcagaagccgaagctacgaaagctcaagctgaagccaaagctgggccttcagcgcccgtcgcagcgaagcctgccgcgcttgaggaaaaaacgacagggctgattgcacctgaaaagatcgagactcctgctcccgaagctccaatcaaaattgttgactacatcattcgacacgcttcggggaagaaattgtccgacgaagaaattctagaagccaaacattatgcacgaaagttgaaatatccgaagggagctttagtgtttaacggcactaacgatgacgacttcttatattgtctcccagacaataaagaaatatccatttgccgagagatagccatcttggagaaggcagggtgtgatcacgttaagaccatggcccaggctgaagctgccttctccgtagatgatacgaaggatccttcagctgaagcaaccttgatgggcgggaaattttacaatgatgtctgggtgaataatggccgagagatggcccatgaaattataaaaaagagtgaaaaagacacccatgacgcccaagcaaaagcaagacaagttgaagaagctgcagaacgcgagaagcgtatagctgaactatctccaccgccggaaccgtacgatcccctggctgatccagagatgaaggaatcattggatatcataagcatggctgaatccattgtcgatgaggtcgtcaacaaattactgaacaaagttgcagagaaagttcttaaagaggaataa

SEQ ID NO: 44232 - DNA, 886 bp, Zea mays
  Clone ID: MRT4577_140344C.1
cccaatcacaccagctctctctagagctagccctctcttcctccaacacttgttgatcccctcccatctcctcaagccttcttcactgaatttctggccggtcgatcgtcatgcacagctacagagccatgcacccgtacactcatcactcgtaccagcaccacaccgcggccgttgcgcccaccaagcacggccacggccacggacatggacatggccatggcgacgaggaggacgaccagtccatgctgctcctctccctctggcctcctggccaccaccacggcaacgccgctgcttcatcggcgtgctcgtctcccccgatctgcgccagcgccaccaccacctctatggcagccgctgcctcctcccccgcttcttacccttggctcacccaccaaagcctttacaataatgccggctgcggcggagggagcagcagcagcagccacagtagcttcctgttccaggagcatcagcaggagccaggtgtcagcatctcactgtccatagccccgccgtgcagcaacaacgcggcttcgtcctgtggtggcggtggcttcgctgcaccgccggcggcaccgtcgacggtgacgacgaccgtgacgccgggcgggggccaggttcccagacagtactggatcccctccgccgccgagatcctggtcggctccacgcagttctcctgcgccgtctgcaacaagaccttcaaccgcttcaacaacatgcagatgcacatgtggggccacggttcgcagtaccgcaaggggtcggagtccctgcgcggcgccatcacggtgggcacggctccgccggcgtcgctgatgcggctgccgtgctactgctgcgcggaaggctgccggaacaacatcgagcacccgcgggc

SEQ ID NO: 44233 - DNA, 465 bp, Zea mays
  Clone ID: MRT4577_140345C.1
ccaaaacactcctttaaacatatgcattaatattgatcctcaagccatatggctagttaacagcatctgcacgagacagcagacggaaccagcaatggagatgggtggcgagctactataatttacatggagaaacttgtatacatggctacatacatacgttgttgctgaaaaccaccatgcccggacccatatacatatttacagaagagctgggggttccatgcataggtatctggactccataacattgcaatatgcttcataacacacaataaacattaccaccgacaactatacctataactttttgcggctggatgacaactggtaatgagtgaatattttacttgaccatgaaatcaggaggatgcatcacggatctgtcagacgactacgcaatagctgaaaatatgatgagttccgacacccacacgatgtaccgattatagggtattctcaggt

SEQ ID NO: 44234 - DNA, 371 bp, Zea mays
  Clone ID: MRT4577_140346C.1
ggggggccaggagtttggataagtcccgatataaaaaaatagtgaccctctggtatagcccgctcaagggtaaataccactggccttgggccctccaaagaaacgcccaaaaaaaaggaatttctgggacaaaaatttttttttataaaaattatgttacatgtatctgggaaggcgttcgcaaaacggactgggtgccgcctcaagaatatgaaccggtgaattacaaaagctgaaactggggaactggggaagtaaaacaacctgaccacccgggggaaaaactcagccttcacccaatggagaaattccccaaatgccaacaggggaaaccaaattttgggttgcacccaggggaactggggaagcca

SEQ ID NO: 44235 - DNA, 313 bp, Zea mays
  Clone ID: MRT4577_140347C.1
ccaattttcatacgacgaattttcatcagcgaatacccaacctacatctcccaccacaccttaatcagcaccaccaccgccatcacaatcgagccagcccatacacgtggcaaccaatcttctcctcttccaacctacctttacaccacaaccacatcaaaccgccatcatggttcgcggagaagctacccaggtcaaggtccactacaagggctccaacgaagacttcatcgtcttcctcgacagcgcggccgactaccaaaagtggctcggcgacaagtcggtgccgctggcccaggtcgtgtcgtcattc

SEQ ID NO: 44236 - DNA, 1732 bp, Zea mays
  Clone ID: MRT4577_140348C.1
tgcctcctaagcgtacagcttatgaagtgatgagtgaagtacactcgaatattgctcttgggaaggctattggtgtgggatttgacaagcctctgagggttgatggtagtttgtcttacctgaaaaaagtactgcacatgtatcctgactgcagtttagtgagaaaccaacttggatccctgctgctgtggagtggagattggatggcttctcacaaagcaataagggttacctctctgtcacatgggcacacatccagtatgggcctaagatcaccacatcacattcaagcctgtgcaatggtttcttgctatgctacctgctgcacgtacacaaagttctcttttgcaacatgtgaacaccagtacctaagtggacctgatgcaatacaccacctgcaaaggtgggttcattgtgaaccatggaaccaagatgcacgctacctgcttgtacttgccattttccaaaaagcacatgaagagaagtaccccaaacatacctgtgttattctgaagaagctcattatgcaagtgttgtccaatattagcaatccacatgagaaagaagctatgcagtatcaggtgttcctgctacttcttctgtcatcagaggtctgtttgcaatctttagactatgaaaactgcatcaccgaagctaaagaagctctaaaactcaccccgtcaagccgtgtggatactttttttgcaaatttgcaactgtgtcgggcctatgtggtgcatggggatcttttgaactccaggaatgagtacatgaaatgcttgagaaaccatacaaatactgagattggctgggtaatgctgaagcaacttgaatctgcatgttctttggagggcttttctgacgaaatagatataaaactgcatgaatgtgttaaaaggaatggcagcgactcatcaaaatggacatcccttttcaatctggcgtgtgctcagtgctttctgtggggtggaaactttgaaagcgctgaaaaagctcttgctcaggcatgtagtcaagtagatccggatagctgcatcttgttccttaatggttcaatgctttttgaaatcaaagctcatattagttgtcaagggtttataaactcctttgctgtttatggtatgaagcaaaaccgtgaacttggttgtttttttccctccattaaaatcctggaataaacttggttgctattggatcaacaaactttttgccagttttattagattttgataaacattccttgtactggtttttgaatgctactaactattcgctatgctaatagtaaattaaggaaagcaaaaaaaaaaaaaaaaaaaaaaaaaaaaaaaaaaaaaaaaaaaaagatccagagccccgagttatggttgcttcgggcgattcacctgaacccgtcctgccataggtactggaaggctctgctgcagcaaatatatgtgtagccttttgtctcatatgtatcgtccatgcgcattctagcgggtgacacgtccgtcggacggtgataatagttgagatcgctggggataagttcgtggctcgcatgtcgtagtgctttgtgctttgcgttgggatagtttgcacctgcaatgttttctgccctttccaaaaggatactactggatcttggaggattattgtttgtcttttgttaattattgtaacttaagtttgcaggaacaaacagacctcatctcttggagtgtatctaacaattgtagctattgctagc

SEQ ID NO: 44237 - DNA, 332 bp, Zea mays
  Clone ID: MRT4577_140349C.1
attcccactttattgatttatttgtaggacacggccaaacaagttgcttcaggtaattatacatgctagcgagcactatcctgcaacgactgaaaccgaacctgctacttgaaagccccattgcctaaaggaaagctggaaatcctaactggttcttgcccacatcgggcaccatcaggtgggtctccaggtggaaccaacccatgaccgccgtcggcgcttgacccagaacctggacaaacccaaaggcagccgcattggcgttcccctggaccatggagttgccagcgagcaccaaggagtgctgacgggcctccagcgtctcagctatt

SEQ ID NO: 44238 - DNA, 280 bp, Zea mays
  Clone ID: MRT4577_14034C.1
acagaaaatcaatggagggagggacaaagcgcctagggttttgttccaagcggaaaaagggggtgcataaatgaccggcgttaaccatttttactggggacaaacctattgtcaacgagggacccagctgggaggcccaaaacaacttcccaatttgcagagaagggccaaccctagttaaccgaatgcatccagaattgactgaaccaataaatcgctggtttccggggaaaatacccgccaaacaaatattcggacccctggcctgccccgtggaact

SEQ ID NO: 44239 - DNA, 387 bp, Zea mays
  Clone ID: MRT4577_140350C.1
agcacccctgacattacattaattaccccctggcaaaaaatgcctatggaaaaaaaaaagtaccatactacacataccaacttggcactcactatttttttctaggagggccgggccaaatattacccactccataacaaaggacaaaataaacgggggggacccccgccgaacaagaacaacaattcccaaaccccattttatatatagggattactttctataaaaaagcatcccttccttaaaaaaaaccccaaggaccaacaaacagggcctttttaatgaacatacatctcccccaaagaaacaggggatgcacccggtctatgccttccaaacccaaacaaaaaccgggggggaaaatggctcccgccaatccaaaaggtt

SEQ ID NO: 44240 - DNA, 656 bp, Zea mays
  unsure (1)..(656): unsure at all n locations
  Clone ID: MRT4577_140351C.1
gtgcggcgctcgagggcggnncgggtccaaataaggtgcttnnaggtcaggctggttgcacgcaggagtcagcgtattacgatggccggcctcggcgcctcatcaacgggcgccttgggcgccaaacagcgccttgcactcgcgcgcctcaccgcggcctgatgcgacactggtggggactagagcggcagcagaagacttcattgagacactcgcatgctccgagaaaacgctctcggccgcacataggctctgtatcgcgggcttctctcttcgaacgaagcgcccctcccccagaggctgttgacactgcgaagattgaaccctgctgggcagtcaaaggcgtccgacaagcgcgagaacaactcaacgaagaagatctccgcgtggctcaagaaataatggtccgacaatgacccgatcctcgacaccgaagacatgatcaaaaaaacaaatagttggggctagaactacagatagtgctaactgctctgtggcgccaacgggctgccgcacctcagcatatgcggcgaacagccgcactggatctaatacaaaagcccgggcctgctcgtcctctacatcgaacatccggatactttgaggactctgcgagctacctcatcaacgtgagagacgacaacaagcgcgtcatg

SEQ ID NO: 44241 - DNA, 311 bp, Zea mays
  Clone ID: MRT4577_140352C.1
agtgtaattatatttttaatatatcataagggctgaacacagtcaccaacttgtttaagcatgtccatgtcaaacgaggcaatgcagaattacccagagtaatgaagacaacaaatgcacataacgctttccaaacggaaaccaacatcttaacaggtggattcaagctctcgaaaacaagcatgagcatatatgctgcgcgaagaagcaaggccaagctgcagtagcatgagacaggggtcacatgctcattaaggactggtgttaaaatcgtgccaatgggcacaaattgtagaagaacttctcccact

SEQ ID NO: 44242 - DNA, 1557 bp, Zea mays
  unsure (1)..(1557): unsure at all n locations
  Clone ID: MRT4577_140353C.1
cctcgaggccggncgggtgttcttgggcgacgcgcgcgcgttcccgggccaccaggaggtgctcgcgttcctcgacgccttcgcggaagagtgcggcgtcgccgcccgcgtcaggctccgctccgaggtgctgcgcgtggcgggggcacccctcggccagcgggagcggtgggcggtctcgtggcgccgcgaggacggcgaggtggcggaggaggtgttcgacgccgtcgtggtctgcaacggccactgtacggtgcccagggtgcccggtattcgaggaattgacaattggagcgggaagcagattcacagccacaattatcgcacccctgaaccgtttcgggatcagaacgttgtcgttgtagggttctcgaccagtggaatcgacattgcttcagagatctcacgtctcgccaaggaagtgcacgtagcagacaggtactccaaggacaggctgggaaagatggcgctgtaccagaatgtctggattcacgcagaggtggactgcatccaggatgacggcaaagtccgctttgctgaaggttccgtggtggatgcggacgttattctttactgcacagggttgggttgagctcaaactggttttctccgtcctgcacctaccatctctttcctcccttgcatttcgtatatatatatatgatgatgatatgattgtaaaaagcaatgcatgaaactgaattttcccggccaggtatcgctaccatttcccgtttctcgacctggatgggctcaccgtcgacgacaaccgtgtcgggccactgtacaagcacgtcttccccccaatgtacgcgccgaacctgtcattcgttggtctaccagtcaagacttcaggagctggagcaggaagccaaaactgctgcgaatccaaaactctgtgcgtgccttcccagaccatcgtcttccaggagctggagcaggaagccaagtgggtcgcggccgtgctgtcggggcgggcgacgctgccaagcgaggaggacatgatggcgtccgtgaggagccactaccagctaatggaggaggccgggaggccgaagcgccacacgcacgcactggcagctcagtgggtaagccaacgctgacaacgtgtgactgtgtgtgtgtgtgtgtgtgttaccggcccgacgctgcagcctgaaactgtgtgcgttcggaccaggcggagcacatgaactggctcgcggaccaggtcggcgagcctccagtggagccgtggaagtgcgagatgttcgataaggtacttgcgagcatcttggcgctggacgaggcctaccgagatcgctgggaacaagaggaggacgctggctccggtgggcatcaggaaggaattaggatcagagcgagctccatcatgtaacggaacgaacctgaacggttgcggcaacctgacgccgtcgtatcctgattttactctcgtgatacttcacttcgttttgccaccatagaacgggaataaaaaactatttattatttttgtttaggagggaataaaaccgtgtttgcaatggactgaaaaaaaaaaaaaaaaaagcggcc

SEQ ID NO: 44243 - DNA, 293 bp, Zea mays
  Clone ID: MRT4577_140354C.1
gttaacaaggcgaaaactgaccattaaccgggcaggggcgccttcctgttaacgagcggaaaccgaagggcacgaggctaattgccccaaaaagcaacacccggcatattggcctgaggggaaaacagaaatggcctagccgggtattcacataacaattttggacatgggccttccgctaaaaatataaaaatatgcccactattatcaaacgaatgaatgccatgtggaaaaaaccctatgggcctcatcatcccttccagaggaaagagtacccaccatgcataacaaac

SEQ ID NO: 44244 - DNA, 1099 bp, Zea mays
  Clone ID: MRT4577_140355C.1
aaaccttcttgtggacggatgcgaaatctcaggccacggccacaccacacccctctcccctccctccaccttctccctcccacgccggtccttcttgagcgccgtgagtcgctcgcccgtgtccgccgcacactattccatgtcagccggcgtccgccctctccaccgagcgctgcatcaacgctggccacgccgcggggcagaagcagcagggcagccacagccctgacgccttgcgtcgaccttggaccctcttttggcgccaacaataggaggaggagcggagccacgttccccgcgccgccgctcctgtcccggatgctgtcacccaccacgcggccggcagctcggactgacgagagatctggcaccagcccggagaagcccctgttgcgccggtgggtactgcgggcgccgtcgagaggatctacgtggttagggttgcagtccccaagtgcgatgagatccagaacgccatctccgacgaccttgtgcaccgggtccggaacgatgtcggcgggaggtgaagcagagatgaaggagctgcccgaggagcttgcctgcctcgcatgcgaaacatcggcccaagtggtggcggcgggacctgccgcgtcggcaccgcttatgtgtcgcatgaagaagggcgagcccatcaagctcgtcttcaccggcaagaagaagggaatcactcccgtcgcctccttcagcgccctcgacaaggagggcgaggaccccaccccgtctgccgcagccgagccgaagcccagcaacgatccagccgaggacgacataagcactttatagaaaataattctcacaggtggaagcttgttgcagtctacagaattaggcgacactcttactggttgccttttgatttaactaccattcaaattagcaactcttgagcagatttattagatccaattgctgtcaaaggataagatgacctttatatagatttttcagttgccatttcaacgatttattgtgattgtaatgctcgcccctatatcaggaaggtgggcatatcagtatcttggatgacgactctactgaatgatgtccataatacacttgcggagtatttggtttgtag

SEQ ID NO: 44245 - DNA, 427 bp, Zea mays
  Clone ID: MRT4577_140356C.1
aaatgggggccgaatggttcattccctttcaccaacccaaccattaaatggttgaattccttattccttggaccaaacacccttcttagtcctaaaagaataaatggcattttccgaacccggccaaacgcatttttttacggggacctattacccaccggtggggggggaatcttaatggtgaaatcacttgaaattttgagtatgcgccaggaatttttaccttttttcattcattaacaagggtaggttccttccttttttggtcttccgtgggaggtccccgattggaacccctcggaattcacattggagtgggcattccagggaataagcaccgattatttccagtcaggattaaagaacccaacattctttatttcaaaataataaacgctctcttagaacctggcttccttccggaaaa

SEQ ID NO: 44246 - DNA, 1489 bp, Zea mays
  Clone ID: MRT4577_140357C.1
ccggccgggacggcaccacacacccctctcccctccctcaccttctccctcccacgccggtccttcttgagcgccgtgagtcgctcgcccgtgtccgccgcacactattccatgtcagccggcgtccgcccacgcgtccggctggccacgccgcggggcagaagcagcagggcagccacagccctgacgccttgcgtcgaccttggaccctcttttggcgccaacaataggaggaggagcggagccacattccccgcgccgccgctcctgtcccggatgctgtcacccaccacgcggccggcagctcggactgacgagagatctggcaccagcccggagaagcccctgttgcgccggtgggtactacgggcgccgtcgggaggatctacgtggttagggttgcagtccccaagtgcgatgagatctagaacgccatctccgacggtgaggctgagctagcgcccgtgccggtgttcgtgtttttggattttgtggatttgatgatgctcgtagaccttgtgcaccgggtccggaacgatgtcggcgggaggtgaagcagagatgaaggagctgcccgaggagcttgcctgcctcgcatgcgaaacatcggcccaagtggtggcggcgggacctgccgcgtcggcaccgcttatgtgtcgcatgtgagcttcttttccgtttgtctgccgacactaggacctcccctgcccccacgagatttgtatctgtacctgactacgatgaggagtacaatgactgtgatgatgatgactatgatggaaccgaatatggcatcaaccatcctgttaatatggggaaaggaagaagggcgagcccatcaagctcgtcttcaccggcaagaagaagggaatcactcccgtcgcctccttcagcgccctcgacaaggagggcgaggaccccaccccgtctgccgcagccgagccgaagcccagcaacgatccagccgaggacgacataagcactttgtaaatctcccactcctctcccatggttttcccctatgtcgcttggtttcttctttttgccaagcttttaaggtttaagaagctaactatgaaactactaaaaaagatttttgggtaacaaatttacatctggacatttgggttgaaatgttactttatttttctccatgattttgtagtagcatgttctctatgttttgtattaagtgcttttgtgttttattaaattcgtgcttccattcaacctcacttactgctcacttactgcagatagaaaataattctcacaggtggaagcttgttgcagtctacagaattaggcgacactcttactggttgccttttgatttaactaccattcaaattagcaactcttgagcagatttattagatccaattgctgtcaaaggataagatgacctttatatagattgttcagttgccatttcaacgatttattgtgattgtaatgctcgcccctatatcaggaaggtgggcatatc

SEQ ID NO: 44247 - DNA, 469 bp, Zea mays
  Clone ID: MRT4577_140358C.1
ggcccaagccgtccgaacctggcaccatccatagggaagtccagtaccaccatttaaccaccaagggcagccaaaattttggccctccttgccctcctggctctttaagcaggtgttgctaccgcgactattattccacaatgctaacaacaatacctttttccggtgacagccgcaagattggaatccccaactatacaatcctacaggctacaagaggccatcacagcaagcatcttacggtcgttagcattgactgtccaacaaccatatgccctattgcaacaaccatgcttagtgaatctatatctccaaagaatcgcaacacaacaactacaacagcagctgcttacaacaatcaatcaagtagttgcagcgaaccttgctgcttacctccagcaacaacaatttcttccattcaatcaactatctggcgtgaaccttgctgtttacttgcaggcacaacaat

SEQ ID NO: 44248 - DNA, 457 bp, Zea mays
  Clone ID: MRT4577_140359C.1
accttgcttataacagcttgaagggtcttatccttagcaaggctttgatggctcagaaagatgccgaagatgaaagcactcggatagccttcgaaaacctacgctcggaagttatatcacttcggaatgaggcccttgagaaggacaaaatcttgctttctttagttgagaggttaaagtctagcgacgctagattggctagtctttctgaagtggaacaaaaaatggagaaatttgaaaagaagaaagaagcagatgcgaagcgtattgctgatttagaatatgctctatctattcaagcgagattgcaaagattcgaagtagaaggactggagaagaagcttgatgaaatcactgaaaacttcaatgtcgaacagacagaacgtgagatatctgaatccaaacgattgagagtttcaaggaatggttaaaagctttgtcaggcgaaggaggatgc

SEQ ID NO: 44249 - DNA, 362 bp, Zea mays
  Clone ID: MRT4577_14035C.1
gtccttttttttttttatttgaaccaaactggggggggggaggaccctcgagtaccgaaaaatgcttacaccatttggctaaccaggctaccaataaacaatcaataaatgctacgagatttgcaacataggacattatcaatactgttccaactattataaacgctacattacatacgtagtcatgaaacaccaaaacaaatatggacgcgcacgcgccaaacaaaagaaacctggtgtttacttgcaactgatctgagacaaacttacagcagaacggcctactttcagcaaaagaatgcctgtacctattggacaaactggcttcattacacacattcctaaccttagacgttggtttc

SEQ ID NO: 44250 - DNA, 535 bp, Zea mays
  Clone ID: MRT4577_140360C.1
aagatatcactatctccgttcttctctcaccgtctcatatacgcacgaactatagccttccatgcacacctcaatcgcgttccttctgacgaacacgatgctctgcccccaccacacatcctacctatacatcaacactggatatcatctcaatcaaggaaatacccaacgaccgaacctaagctcaactcggcatctccatgtatcctccgtatccacaacgcgaacgcctcggttcgccatccacggtccagactacctcctcagtcatcagtttcgagctgcagagcctcatcgagtcctacctcaccgagcaccgtcccgctccagtgcctctccttcgaccggtcttcctgctcactataccctatgaccgctgctccactcgctcaccgactactaggccgccatctgctcgatctctcctcccaaggcctcttcgagctcctcgtacccacccacagattccagctcggcctgatgaacgtcgtcttataacatgcagttacctgatcttcccgtgcagatacgcctc

SEQ ID NO: 44251 - DNA, 673 bp, Zea mays
  Clone ID: MRT4577_140361C.1
cccacgcgtccgcccacgcgtccgcggacgcgtgggcggacgcgtgggtcagcgggctgcaaagccgacgaggataaagaggagcccggctccgcacgcgggagcgagaggatcgccggcgcaggatgtggtgcgcatcgtgcttggcgtccgcctgcgcgggctgcacctgcaacctctgcacgtcggcggcatcggccgtgtcccgccgatccgcgcgcctcgcttactgcgggctcttcgccggctaccttatcctctacttcttgctccgtcagttaggagaaatcacggtctgggaagagcagtggggcgatgagggcacccacgcacccatagcctatgagttgtttggtggtgttaggtgcgattgtgaatatgaataagccgaagctgggagctggtagggatctggtattgtctctgtatgctatctggcatgcctaatgtgatggcactggttagtacctgtttgtatggccttgtatagaatatatttcgaccgagtgtaggttgtggactttaaagtcatatagctatacttgacctgatgtcaagtcgcggttgtgtgtaatgacgacaattatcatgtgtaagaatacgtctattgctcgtaataaaaaaaaaactacgactgtagcttgtgttgaaaaaaaaaaaaaaaaaagcggcc

SEQ ID NO: 44252 - DNA, 198 bp, Zea mays
  Clone ID: MRT4577_140362C.1
cattattatagacctgtaatgcgccgtcatataataatggtctcttctcgtgctagaaaagagaccattattatatggcagtgcattacaggtctatagtctattttttcatgcaatgacttaaattatgagcttacgaggaagggggtgataatgtacgtaattatcccatctatttatttattatattaatacaag

SEQ ID NO: 44253 - DNA, 2003 bp, Zea mays
  Clone ID: MRT4577_140363C.1
cattgggacctcgagccggccggggccatttcctttgtagatccacgagacagaccggccgggaccgtcgcacagagctgggacttttttttaagcaccacagagctgggactttgagagggaggactcagcgggctccaaagccgacgaggaacaagaggagcccggctccgcacgcgggagcgagaggatcgccggcgcaggatgtggtgcgcatcgtgcttggcgtccgcctgcgcgggctgcacctgcaacctctgcacgtcggcggcatcggccgtgtcccgccgctccgcgcgcctcgcttactgcggcctcttcgccgcctcccttatcctctccttcttgctccgccagttcgccgcgccgctcctcaagcatatcccatggataaatgcgtttgatcaaacaccaccagaagaatggtttcaaatgaatgctgttcttcgtgtaagcctggggaacttcttgttctttgcaatattttctctcgtgatgattggtgtgaaagaccagaatgaccggcgagatgcctggcaccatggtggctggattgcaaagattgctgtatgggctgttctcattgttcttatgttctgtgtgccgaacattgtcattactatttacgaggtactttcgaagtttggatctggcttctttcttctagtacaggttgtgatgcttttagacttcacaaataattggaatgactcatgggttgagaaagaagagcggaaatgggaaatagctttgctggtagtgactgtggtttgctatctttctacattggccttctctggtgtgctcttcatgtggtttaatccatccggtcatgactgtggtctcaatgtgttctttatcgtcatgacactcatccttgcttttgcgtttgcaatagttgctttacatcctcaggtccatggaagcgttatgcctgcttctgtcatttctgtttactgcgcatacctgtgctacacgagtctctcgagtgaaccggatgactatgagtgcaatgggcttcacaggcattctaagcaggtttcaatgagtgctcttatactcgggatgctcactacggtgctctctgttgtgtactcagcagtccgtgctggatcctcgactacattcctttcaccgccatcatctcctagatctggagccaaaaacccgctactcggtgacgaggaggacggcaaaggcgatggcaaagaaagcgaaccgcgacccgtgagctactcctacaccttcttccacctcatcttcgcccttgcaagcatgtattcagccatgctcctgaccggctggacgagcgctgcatcagagagctccgagctgatggatgttggatggacgaccgtctgggtgcgcatctgcacggaatgggtcaccgccgggttgtacatctggaccctcatcgccccactgctcttcccagaccgtgatttctcctaggcacccacgcacccatagcctatgagttgtttggtggtgttagttgcgattgtgaatatgaataagccgaagctgggagctggtagggatctggtattgtctctgtatgctatctggcatgcctaatgtgatggcactggttagtacctgtttgtatggccttgtatagaatatatttcgaccgagtgtaggttgtggactttaaagtcatatagctatacttgacctgatgtcaagtcgcggttgtgtgtaatgacgacaattatcatgtgtaagaatacgtctattgctcgtaatgttgtaataactacgactgtagcttgtgtttagggcatctacaacctactacataaatacataaataacatatatcttagggtttttcaacccggtgctctccgtgaacctaccatatatttcctcgcaaaagaataatgtgtcgttcaaaaaaaaaaaacaaacatgaccacctctcctgcaaatgcgacagcatgtaaaaatgctaccaactgcactgataaataacatcgaccaacaaccattaatattgg

SEQ ID NO: 44254 - DNA, 770 bp, Zea mays
  unsure (1)..(770): unsure at all n locations
  Clone ID: MRT4577_140364C.1
ctcgaggccggccgggccgggatttaggtgacactatnagaagacnncggccgggccggcgaaaataattattaaattattaagcgtgcactcaaatgggtatcgatcttaaagccggtggtagaatccccaacagaaacatcaagcctaccagaactgtcaatccttatcacaagctcttaatcagactttacaaattcttggccagaagaaccgactctcccttcaacaaggctgtcctcaagagacttcatcaatctagaaccaacagataccccatctctgtttctagaatcgccaagaaccttaagggaagagaagataaaatcgccgtctgcgttacttccgtcaccaacgacgtcagactcctcgaactccccaagctcaccgtctgcgccttgagattcactgaaaaagccagagaaagaattgtcgctgctggtggtcaagctttgactttcgatcaactcgcccttaaggcccctactggcaagaacaccgtccttttgagaggtgccaagagaagagaagccctcagacatttcggtcccgctcccggtgctaagggatctcacactgctccttatgttagaggaaagggcaagaagcaagaaagagtttaaacgttgtataaatttcagtgcatatttagcgcatgtttttacattcctattaatcatctaaacatgaactcggaccagaattagtggttaanaattagtcaacacctctaaagacctaaaaaaaaaaaaaaaaaggcccctagggnc

SEQ ID NO: 44255 - DNA, 242 bp, Zea mays
  Clone ID: MRT4577_140365C.1
gattggtttcctcattaaatataatagcatacaatcaggagacgtagctgattattaaagagagggtaaaaaaaaaaaaaaggccgggcaaaaaaaaaaaaaaaaaaaaaaggaaaaaaaaaacaaaggagggccgcacagaaataacaaacagagaaaaaagggccaataagacagacgagagacagcggagagggcaccgatagagatgaaaagccggcgcatgtagaagaaagggggca

SEQ ID NO: 44256 - DNA, 293 bp, Zea mays
  Clone ID: MRT4577_140366C.1
ggaacgctgcaggtctcacacatttctatttattcgcaaggacagtggtggaaagaatgccctgtttacactgtgactatcaatttgctgaaaccagtgtgtgtttgtgatcctggtatgagtctgtcctttgatgaagaaaaggtttataccacaaccaagagacatcaaccccaggctcatttgtcccactggtcaaaaacaagctcacctctaagatcccaaaaccattgcctgcacaattgtatttggctttttttgcactaattttgtttcaatgctggtaattgaaa

SEQ ID NO: 44257 - DNA, 296 bp, Zea mays
  Clone ID: MRT4577_140367C.1
tatttttataatatttgttttaaggcaaaacctagattgaattaaatgacagtttattacagcccctttggcagggctccagtttctctgaaaacaatttcgactctcgctctttggcttctctaaaggagccggagttgttttataattcgtttgaaaaaacagtttttcttatgtttatttcgaatgatgtattagggaaacgaaggaggagccgttagaagccacgtttttggtgctctggctcccaacacaaaaatagctcaacctcttcgaggtctctcaacgaaaagccg

SEQ ID NO: 44258 - DNA, 1218 bp, Zea mays
  Clone ID: MRT4577_140368C.1
acttcttctagcttggtccattgacaaaacccggggtcctcgaggccggccgggaacctaaacctcgtctcgcctccttcagtccatcccctcaaccccggcggccaaaagccggcgcaccgaagcggcgggccggcggcaagcggtggccatggcggagctaaagcggctgtcagagagccgggacctgacgcggatcgagcgcatcggcgcgcactcccacatccgggggctagggctggactcctccatggaggcgcgcgacgcctcggagggcatggtcgggcagctgcccgcgcgccgcgccgcggggctcatactccagctcatccgccagggcaagatcgccggccgcgccgttctcctcgcgggccagcccggcaccggcaagaccgcgctcgccatgggcatcgccaagtcgctcggcgcggagacgcccttcgcctccgtcgccgcctcggagctcttctcgctcgacctctccaagacggaggcgctcacgcaggccttccgccgcgccatcggcgtgcgcatcaaggaggagacggaaatcatcgagggcgaggtcgtggagatcttgatcgaccgccctttgtcggcctctgccgctggcggcagctcggctgcccctacaggtgctactgcggctggtaagtcgggtcggctcacgctgaagaccacggacatggaaacggtgtacgagctcgggggaaagatgattgaggctcttgtgaaggagaaggtgcagagcggagatgtgattgcgcttgacaaggcctccgggaaggtcaccaagcttggccgctccattgggaggtcgcgggattatgatgccgtaggtccacacaccaagtttgtcaagtgtcctgatggtgagctccagaagcgcaaggaggtcgtgcactgtgttaccttacatgagattgatgtcatcaatagcagaggttcgggagcagattgacacaaaagttgcagagtggagagaggaaggaaaagctgatattgtccctggtgttctgttcatcgatgaagtccacatgctagacatcgagtgcttctccttcctgaaccgcgcgttggaaaacgacatggcgccgatcttagtaatcgcaacgaaccgagggatcacgtctatccgcgggacaaactaccgctcgccgcatgggatcccgccagactttcttgaccggctactgattatcacgacgcatccctaca

SEQ ID NO: 44259 - DNA, 489 bp, Zea mays
  Clone ID: MRT4577_140369C.1
aggggaaaaaaaatgcctggggaaacaaaaaacactcgttggggttttgctacctaccgagggatttttttttgggttcaggccacgggtcaggcgggaacgctttgtttctgaattttggaaggccattgccatgcactggtgcctgctggacgggcgaggtatttcaaatccagctcaaaggggaatcaggaacaccctggggggggggggattaccacagcaacagggttttggagggggacaaactttgggcccaaacttgggtacggggggacaaggacaacatgcgcatgggggataataccccaagggggggggaataagcacactaaagcatccttaacctccgggtcccaaatttcgggccggcgccgcctccggggaagctcgacatatgggggggggacgggtcgggggaccaaaggaagagccgggggaaccaaaggaaggggagcaccgggaccagggggaggggccttttgggcc

SEQ ID NO: 44260 - DNA, 1799 bp, Zea mays
  Clone ID: MRT4577_140370C.1
cgcctccttcagtccatcccctcaaccccggcggccaaaagccggcacaccgaagcggcggccatggcggagctaaagcggctgtcagagagccgggacctgacgcggatcgagcgcatcggcgcgcactcccacatccgggggctagggctggactcctccatggaggcgcgcgacgcctcggagggcatggtcgggcagctgcccgcgcgccgcgccgcggggctcatactccagctcatccgccagggcaagatcgccggccgcgccgttctcctcgcgggccagcccggcaccggcaagaccgcgctcgccatgggcatcgccaagtcgctcggcgcggagacgcccttcgcctccgtcgcagcctcggagctcttctcgctcgacctctccaagacggaggcgctcacgcaggccttccgccgcgccatcggcgtgcgcatcaaggaggagacggaaatcatcgagggcgaggtcgtggagatcttgatcgaccgccctttgtcggcctctgccgctggcggcagctcggctgcccctacaggtgctactgcggctggtaagtcggggcggctcacgctgaagaccacggacatggaaacggtgtacgagctcgggggaaagatgattgaggctcttgggaaggagaaggtgcagagcggggatgtgattgcacttgacaaggcctccgggaaggtcaccaagcttggacgctccattgggaggtcgcgggattatgatgccgttggcccgcacaccaagtttgtcaagtgtcctgatggcgagctccagaagcgcaaggagatcgtgcactgtgttaccttacatgagattgatgtcattaatagcaggacacagggttttcttgcactgttcactggtgacaccggtgaaattcgtgcagaggttcgggaacagatcgacacaaaagtcgcagagtggagagaggaaggaaaagctgatattgtccctggtgttctgttcatcgatgaagttcacatgctagacattgagtgcttctccttcctcaaccgagcattggaaaatgacatggctccgatcctagtaatcgcaacaaacagagggatcacatccattcgtgggacaaactaccgctcgccacacgggatcccgccagacttccttgaccggttactgatcatcacgacgcagccctacacggaggatgagatcaggaagatcctggacatccggtgcgatgaggaggatgtggagatgtccgcggacgccaaggtcctgctcaccaaaatcggcgtggagacctcgctgcggtacgccatcaaccttatcacatctgccgcattagcctgccagaggcgcaaggggaaggtggtcgacatggaggacattagccgggtgtaccagttgttcctggacgtgaagcggtcgacgcagtacctgatggagtaccagagccagtacatgttcaacgaagtgcccggggaagcagatggagaggacgcgatgcaatcctagatgaacttttcttcaccaggtgtctgtgttagtatgtactgcgtgtctgcgtcgtctatttctggtgcatcttgcttgtttagttgctgttatatcctgacaaggcgtggtgtgtgcgatggactgcctgtaagctgatttaggtaactatatatgcaattcagatgtatcttagtaaaattcaccccagttggagtgacattgtttgtttaaatttgtaccaaaatcttgtagtgtattttgatatactagcatatagtttgtgccaaaaaaaaaaaaaaaaaaaaaaaaaagcggcc

SEQ ID NO: 44261 - DNA, 521 bp, Zea mays
  Clone ID: MRT4577_140371C.1
gcgtgcaggttgactccactccaattttgtttgtggagaagaaagatgggaccaagaggatgtgcattgactacagatccttgaatgaagtcaccatcaagaacaagtaccctctgccaagaatagaagacctgtttgaccagttaagaggagtcggattgttctcaaagatagatctgaggttaggttaccattagcttaagatccgaccttctgatgtactaaagatagcatttatcaccaagtatgggctatatgagtacacagtcatgtcattcggattgacaaatgcactagctttctttatgtacttgatgaatagtgtgttcatggactaccttgtcaaattcgtagtggtgttcaccgatgatatcctcatatattcctagaatgaggaagaacatgaggagcattttgagatggttttgcaacggttacgaaagcattagttgtatgcccagctagcaagaaagttgagtttaaatggacccctaagtgctaagagtcctttgagacattga

SEQ ID NO: 44262 - DNA, 862 bp, Zea mays
  Clone ID: MRT4577_140372C.1
tcgaggccggccgggccggggatcggctgagctctcgccgggcgatatataagaaccaccaattggtaaccacaggcgagcaatatatagagagtcaaccttgcagcggcgatgaagatagtgcttaaggtggcgatcacctgcaagaagtgcaaaacctgcgtccttgggatcacctcgaaagttaatgggatcaagtccctgacatacgacgacgagaagagcactcttacggtggtcggagacgtggacgtggtggtcatcgtggacgcgctgcgcaaggcgaagcatccggcggaggtggtgtcggtgaccgacgagaagaaggaggccgaggagaagaagaagaaggaggaggaagagaagaagaagaaggagaaggaggaagaggagaagaagaaaaggtgctgccccaagccgccgtgcaagccgtgccctccgcctccctgcacgccgtgccctcctccgccgtgccctccgccaccgtgcccaccgccgtacctcaagccgtgctacatccccatcgaagacgagtatcccgggccctgcaccatcgtctgagactgagagagcaacaccatggccatccataccagttcctcgctgatggaaaagccactacgacgcgctcttccagaagaaggcatttgagtttcagctgtagcgccatgcgtcaatcatcggtttggaagaaatggtttccgattttccatgcacattctctttctgtccttctcgttctatggttctagcgtgctctttctccatctaccatattattgtaaattgataggtgtctgaataatatgatataacagacacgaacaaatacataaaaaaaaaaaaaaaaccggccctaggg

SEQ ID NO: 44263 - DNA, 1834 bp, Zea mays
  Clone ID: MRT4577_140373C.1
cattgggtacctcgaggccgagcacttcgacctcggccgggcgggccctgacaaaccctggctcgttccccgctctacgggcctaaacctcacctcgccggcggccaaaaatcgaagcaccgaaccagcggctgcggcggcggcggtgcggcaagtgttgaccatggcggagctaaagcggttgtcggagagccgtgacctgacgcggattgagcgcatcggcgcgcactcccacatccgggggctagggttggactcgtccatggaggcgcgcgatacctcggagggcatggtcgggcagctccacgcgcgccgcgcctcggggctcatactccagctcatccgccagggcaagatcgccggccgcgctgtgctccttgcgggccagcccggcactggcaagaccgcgctcgccatgggtatcgccaagtcgcttggtgcggagacgcccttcgcctccgtcgctgcctcggagctcttctcgctcgacctctccaagacggaggcgctgacgcaggccttccgccgcgccataggcgtccgcatcaaggaggaggccgagatcattgagggcgaggtcgtggagatctcaatcgaccgccctttgtcggcctctggcgttggcggcagctcagttgctccttctggtgcaactgccgctggtaagtcagggcggctcacgctgaagaccacggacatggagactgtgtacgagctcgggggaaagatgattgaggctcttgtgaaggagaaggtgcagagtggagatgtaattgcgcttgacatggcctccgggaaggtcaccaagcttggccgctccattgggaggtcgcgggattatgatgccgttggcccgcacaccaagtttgtcaagtgtcctgatggcgagctccagaagcgcaaggagatcgtgcactgtgttaccttacatgagattgatgtcatcaatagcaggacacagggttttcttgcactgttcactggtgacaccggtgaaattcgtgcagaggttcgggagcagattgacacaaaagttgcagagtggagagaggaaggaaaagctgatattgtccctggtgttctgttcatcgatgaagtccacatgctagacatcgagtgcttctccttcctgaaccgcgcgttggaaaacgacatggcgccgatcttagtaatcgcaacgaaccgagggatcacgtctatccgcgggacaaactaccgctcgccgcatgggatcccgccagacttccttgaccggctactgattatcacgacgcatccctacacggaggatgagatccggaagatcctggatatccggtgcgacgaggaagacgtggagatgtccgcggacgccaaggttctgctcaccaagatcggtgtggagacctctctgcggtatgccatcaaccttatcacatctgccgcgctagcctgccagaggcgcaaggggaaggtggtcgagatggaggacattagccgggtgtaccagctgttcctggacgtgaagcgatcgacgcagtacctgatggagtaccagagccagtacatgttcaacgaagtgccggggcaagcagatggagaggacgccatgcaatcgtagatgaactttcctttacatggtgtgtgtgggttatagtatgtaccgcgtggcgtatatttatgatgcgtctttcttgttcaggttgctgttaccctgacccaaggcgcggtgtgtgcggtggactgtttgttagcttgatgtaggtgactatgcaactcaatctatcttattaaattcaccccggttggaaaccgtggtttgtttaaaaataaaaaaaaaaaaaaaaaagcggcc

SEQ ID NO: 44264 - DNA, 454 bp, Zea mays
  Clone ID: MRT4577_140374C.1
gtccccttccggttgccgtctcggcctcccagctcccaggcggtcaggcgccctcccagctccagccaggctccacgaccagaccgccgtctccgcccctgctccagccaggtcgccgtctcctgcgcgcgaccggactaccggagccgcccctgtgcgtgacctccgaccggagccgcccctgcgcgcgaccggagcatcccctgcgcggctgtgcgcgaccggagtccggagcttcccctgcgcgcgaccagagccgcccctgcgcgcgaccggagcctcccctgcgcgcgaccgccgaccggagctgcccctgcgcgcgactggagcctccctgtgcgagcatgaccgctcgattttgttttttgggcccaaatgtgtatttcgggccaattttgtatttcgggcctttactattttcgggccgcccgtttaaagcccggcacgtttagct

SEQ ID NO: 44265 - DNA, 653 bp, Zea mays
  Clone ID: MRT4577_140375C.1
gccggccggtccgggatctttctctaacactatctgccgctcagcttctcgctaaagatatcagacggaggagccctggacaccgtcaacatcgtgcagcggatgacctatccgtggccgcgaccgctatcgccacgaacccctgctctacgcacttacgccggaccactgccggccgctcctctttcacgatcccataagcatgaatatgggctccctctgtccctggacccagaactgcatgcactgcattccccatactgaggacagcgtgagtgcaactaactccaaggacgtctagcccacctcagcacctgtgaaccatgcctatggctgactcctcatctggaactgcagtgtaccagcaaaggatcatccccgctctcctgctcgaggaccagaacatggccacgaaggtgatcgaattacacatcaccatcgacaacacttcgtctgaagagtatctttctgacagaattcagcctctcttctgcactctacaaagactttttctgctgacctctattatcactgggttaccctcgtccactcgctctatagccctctcctctccagcgaacgactggaatctaggataccttgaaatctgcctacgagatctctacaagtatgttatgacctatgacccccca

SEQ ID NO: 44266 - DNA, 424 bp, Zea mays
  Clone ID: MRT4577_140376C.1
aagtctaacataataataataatggcgctgtttataggcatcaaaaaaacccacccaaacggggaaaaggtaacagaacgacagggggcccaacaaatggaaccaaaaacaacttttggaaaccacggaaaaaaaaaaggcccgggaacgccacaacaccaagggggggcaaaacaacagattccggaagacccttaggggtaaaaaccagtcttagaaaaaaaggaaaaccccctaaaacaactggaaatttttcccggaaaaagggggggggaccccaaaaaaaaaggaacccaccacttggtccgcagaagccaaaactgaaaaactggggaaattggcggaaaaaaaaaccgaaaaaaggttccccaaccggaagggaatctttggaaggggggaaaattgggttcacccacccaaaaag

SEQ ID NO: 44267 - DNA, 467 bp, Zea mays
  Clone ID: MRT4577_140377C.1
ccaaaaaatggaggggataacacatcctaatctttggctaaaccctttaaaggacaaacaaacaaataaataaataaacaagggaccggaaaacaaagcaaacagggggcatttataaacaacagcagaggggttaaggggcagctgcagctcctaaaacccacttccggaggtcaaaaacacaacggggggggttgccacagcgccggggagggcaacaaacctgaggggggaggcaaatgcggttgtccttttctccggaacgggcgcgggggccggaaacaaagcggaggctcccgccggggccatcgggtcgccaaatccccaaccgggggggctcggggctggagcgtcgggggggggggcggaccccggcaacattttggaaggcaagggcgggaaggccatgggggccctggtcggcggcggcggaaaagggcccatcttggggggcccaggggctgggg

SEQ ID NO: 44268 - DNA, 441 bp, Zea mays
  Clone ID: MRT4577_140378C.1
atctataactttttttttttgctttgggagaaatacgaccatggatggtgggtcccaatctatgcatatcaatagaccacagctataccaagagggggagcatattttttaacaaaattggagtcggagacgtcggcggatgcttaacggtggtatcagtgccagcctaatatctttcttataaatcaataccttttgggacgacatgttttttccttatggtacaccccaaaagacttggatgcgtgtccgcgcttttatgttcacttgcatagtatggggagggaactgacaaatgggggtgtatgccaactacttggtcgtattccatcacatatacatagggggcacgacagaaacttcgaacctgtatctcatagacaatgggcgcatgaactcgaagatatcaactacagtgtacattgacgttatcgttcagat

SEQ ID NO: 44269 - DNA, 607 bp, Zea mays
  Clone ID: MRT4577_140379C.1
ccacgcgccgaggcgaagggcaggcccggctccgtcccgttccatgaaggcctaacccgagcgggcaggcttttaagtagggcgcgagtgagagcgagcggccaatcggccgggagcgaagccagcgctagctgccgcctccctccccggtcctcgggtccgccgcgcgcgcgccggccgccaccaccgcacgacgccgaccaccacaattagctagcagcggcgtcgactaataaacgacaatggcgtccatctccctcgaggacgtccgcaacgagaccgtcgacctcgagaccgtcccggtgcaggaggtgttccagcacctgaaatgcagcaaggaggggctctccagcgccgagggagacaatcggctcaagatcttcgggcccaacaagctggaggagaagtcggagagcaagctgctcaagttcctgggcttcatgtggaacccgctctcctgggtcatggaggccgccgccatcatggccatcgtgctcgccaacggcggaggcaagccgcccgactggcaggacttcgtcggcatcgtcgtcctcctcttcatcaactccaccatcagcttcatcgaggagaacaacgccggcaacgc

SEQ ID NO: 44270 - DNA, 1181 bp, Zea mays
  Clone ID: MRT4577_14037C.1
ccggccggtattatccatataaatcatagcggcgtcgctgtgtgtgtttcgagtcagtcagtcagttagttgcgtgccatggctggcatgctctgagtctgagatgatgatgatgcctgatggcggcgtcgtgtcctgtagtcctcccctgccccctcgggcgcttctggcggcgagcagtgtgttgtgttgtgttgtgtgggtgcagcacggtagcaggctagccatgtgccctgctgtgttgtgtcaccatccatctataataatcttatatctataccccaccttttgtgtaaaaaaaaaaaaaaaaaaaaaaaaaaaaaaaaaaaaaaaaaaaaaaaaaaaaaaaaaaaaaaaaaaaaaaattgccaaacgcaagaaacaggaaagcaagaaccggaaaaaacggccaatatacagaacgagccagcactccattttctcatacggttggccccggaattaggcgcctcgattgcttgctagccgccagattagtctttcgctaccctaagatcggtcggaagaagagcagttcaatctcggttcatcagaagtgaaactgcttagatcagatttcgtggattccttcacttcaaagtttgcatgtcattgaactgaatgatccaatctgatttgctgactgctcctctcatcactcaaaatttgtgatggaacaggaccatcaagcctatgaagaggctgatcactacgctaagaggaaagcagccaatatttgtgcttccactggtgctagaactgtcaagagaaaactagaagcaagtaggattccacccaatgatttggttagaagaacaggcaaagaacagaaagtacccgcttatgaagttcgtcagttaaccaagaatgagttgcctctgaaggtgtctgctaggaatgccatcaatagcgatcacttccataggcctttaagtagcagatacaatgatcttaccaagaacatttctgagataaggccagtttgcagagctcttcctttgcctgagaaacctttgcgcatcagagaagaggacgagtgctcagtggctagttgcagcgcaaattactcagagtacagtaccagtgataacaaacaatcagtcggaaccggcagttgtttccctgacgatgttatgtattcatgccaacacggacaggagacccaagatgcctatggatct

SEQ ID NO: 44271 - DNA, 668 bp, Zea mays
  Clone ID: MRT4577_140380C.1
ccggccgcgatgaccttcgagcgcgtggagatgcggagtcccatccacctggacccactcccgatctggacgctcgaccatgtgctcgttgaccttgagaccctggatgccacccggcgcgctgcgccacccacggccctgaaacacccgccggatggccctaacggcggagaagacaggcctttgtgatgcgggatgatgacgacgacgaagaccacacagaagatgcacaacatggtatccgcgttgcaaaggccatccctctggtgatcagaggagcaaggttactctgcgcactgatcttgcatccagtgattcagaggatgaattacatgaacaggctgccccataccacttagtgcaaaaaaggcacctacggaggagtattcttgttgagctgcaacaccagcatcatctaatagctcgagaacaactgagaagtaagctagcttcgttgcaaggatgacaccaaaatgaaattcgcagaacgatctctgcatgttgcccgacttcggaaatatgcagaatcaagaaccgagatagacccaacacttgatgtacacttgccgataacagtaagcactccataaacacttatctatggtgcaaagtgatcatgaacaaaaatcccagattgttgaacgcccaatgagagatgatgcagctct

SEQ ID NO: 44272 - DNA, 237 bp, Zea mays
  Clone ID: MRT4577_140381C.1
tcgacttttataaaagcggatgccatgtattttctctgcagcacgagagttttatccctctagacatctctcctctggacgacttcgcagcaactagtgaccatggaccccacttagattaccacagtcgtttcgtccggttccttcagcagctcacgccgaaatggtttgctcatgaatgctattgtcggttgtgcattcatgattgcctattactataccttgccttggatgccg

SEQ ID NO: 44273 - DNA, 193 bp, Zea mays
  Clone ID: MRT4577_140382C.1
gcacgctgcgtaagctcggaattcggctcgagcagaagtcacgaccccataatgtgacggccggccttgtaatttagcgctcagggggtcttttaaaaagaacgcggcgtacaacacacgcggccatggataacaataaaggaggggagatcgcacacaggtaccacaacgaccctctacgagtaggacaaca

SEQ ID NO: 44274 - DNA, 258 bp, Zea mays
  unsure (1)..(258): unsure at all n locations
  Clone ID: MRT4577_140383C.1
cgctgtccgctgcccaccgcgtgcgcggcgctcccgtgcggcactgccggcggcgcgaccccgcgcccattggacgagcttccgccccgccccgatcgatcccgccgccatgtcgtcagcggccgtgtcgtcctcttnctccaccttcttactcgcgctcgccttcgcctcccccggggggccgcaaggcgggctagggtcggctcctcgccgttccacaccggcgccagcctgagtttcgcgttctgggcgccaccg

SEQ ID NO: 44275 - DNA, 482 bp, Zea mays
  Clone ID: MRT4577_140384C.1
gggttggtgaatcgacaggtgtcttgcagcgtcttgcaaggccttttgttttgttacggccgcgccgcctcgtggcgcgcctcgggctcgcgataattggcgaatttcgacatctggccgatccccggattgaaacaattgcaggggtccagctcgcgatagaactcggccagcgccggcttggcgcgatacaggtggccgacgttgtgctcggccggatattcggcgccgcgcgcgtcgagcaggcgccacatgcggtgctccagatcgaggcagtcgcggcccttgcgaacgatgtagtcctgatggaatacatggcagaggaaatggccgtagtagagcttgatcgagatctcgtcgtcgatctcgctgggcagcgtctcgacccagtcgcgatcgttgcggcgcaacgcgatgtcgagcgcgacaaagagaaaagatttaaaaaatcaaatgaacagaaaagaaaaaaaaataaataa

SEQ ID NO: 44276 - DNA, 295 bp, Zea mays
  Clone ID: MRT4577_140385C.1
cgaatcaatgggttccaagcccgagatcaaattggtgctatgctcaactcatttaaccggggggggctttccgaatattctggggcattagaaaatcttaccctcaaaaagccttctgaggtatttgcttcccaaagcccaaggcttcccattgcccgccgcacttgccttcaagcgcttaagaccatttgcgccaaattccaccgtacttgcaaagcccttaaccttcttgtcaccccggcattaagtggcgtctgcctttaagccctgcaactttcgaaaacggcttgtcttc

SEQ ID NO: 44277 - DNA, 374 bp, Zea mays
  Clone ID: MRT4577_140386C.1
gagcgattgcggcggcggaagtaagaggcgatggggcactccaacgtgtggaactcgcaccccaagaactacgggcccggatcccgcgtctggtacgtgcgttcccttttgccatggtgcgtagcgttaggggtttgattgggtttctctcccgcatgatagctttgaacgaatccaagttgtagggttagtattcttttcgctcggttgggatttaggttcctccgtcgatagggtttttgcagctgctgtcgtcgctaggatcgatggtgttcgagcttgtgtatcgattggactattgtggattagtacatccagtggaattatgaacttgtctgtattcatgttgttatggagtatgacacaagtatttt

SEQ ID NO: 44278 - DNA, 647 bp, Zea mays
  Clone ID: MRT4577_140387C.1
attacagatagatcacgagacgagatggcggcgtcctcctcctccccggcggcggcggcggttgggcgagcggtggaggaggtgcgttcggcgctgaacgagcacgctgacgtggtggccgagctcttcggccgcgtctccaccgagctccgcggcgggttcggccccgccgtcgacactttcgtcggcttcttccacgccgttgactggaaggaaccttggttgatcggcatgataagtttccatgtcattctgctactggtaaccatcatctccaggaggaacatcaatttccaacttatcttgtcagctttaacattttctggtgtattccttgccgagaaaataaacacgttcttaggacaaaactggaagagcttctcaagccagaattactttgatccccaaggcctcttcatctcggtcatgtggtccggtcccttgctcctgattacgatacttattctggtgaacacccttgtgacgctctgcatgctcatggtaaggtggaaaagggccgagctcaagcaccgtgctcgtgaggcccgtagcaagcaggagtgatgatgctgccctgctcttgaaccgtggatctattgtgcagtaggggattaagctgctgatttaacggagaagtttgattggaa

SEQ ID NO: 44279 - DNA, 908 bp, Zea mays
  unsure (1)..(908): unsure at all n locations
  Clone ID: MRT4577_140388C.1
cggggnaaccgtcccgtctccaatcataaatgcacccgccgtttgcgatgcgacggacgacgacgcggccggaggagagggaggcccgcgaccgaggcgaagcgcaggaccgccggcactgcagccgatcgaaaggcgctctcaaaagctctgcgctgcgctggcagctttgagctttctcgggccggagaaaagccgaaacaaacaaacggactggccgagtcgaggagagagagagggtgagagggagaagagaaggcggagagagaaagcgagctgaggagcgcaggcgctgtcgctggcgaggacatgctcgcggcagcgcggtatgggctcaaaccataggcgtgtcaggaacggtggagagcggcgaccactactcgccttcgtctcggtcctcgcgcgctcctgggctgcctcttggtgctagaaaccctcgcgtcgcgggagcttggttgcgactgcaagcgccaagctgctgtgctgtgccgtgggtggcggcggcgggagtggaagtggaaccgcagccggtgctgtgatggacgcgcagcagcagctggatttggtcatgcgtcaccagagcatggccaccgtctgcgagagcgaggacgcgctggggtcgtcggagtcggatcccgcgaggccggcgcgcccgcgcggcaagaggagccgcgccgccgaggtgcacaacctctccgagaagaggaggaggagcaggatcaacgagaagatgaaggcgctgcagaccctcatacccaactcgagcaagacggacaaggcttccatgcttgatgatgccattgagtacctgaagcatcttcagctccaggtgcagatgttgtctatgaggaatggcctctatctgcccccaggaaacctggtctggagcacccgagactctggcaccc

SEQ ID NO: 44280 - DNA, 832 bp, Zea mays
  Clone ID: MRT4577_140389C.1
cctgccgggacagggacgcacagagagagaaacagtcgaaccagcttctgacgataaaagctaggtacaagcttccctctgtcgcagagacacgcaccgatctagagagaggagccaatgctgttgtgcttcgagccttgtgttgcgcatcggttgtagcgtcgtcgacgacctaacaagctcgttctgtcgcatcgggattcattcctcacgcgtgatcccgccagacgaaggaacagcaggggaaacacgatgacccttccatctcatagaagagaatcagatctggagatcaatggggcttcgcaagatacagtcggcgcaaagaaaactgcatgcaagacgacgcagcggcaaatattgcgatctgaaatagaaaaattgaagaaccgcgtccgagcattcaccggagcattcgtagttatgatttcccccgtgctccttgccatcgtgctcaagaaagtcagcttgactggcaccggcgggaggtatcaggggaggatacgactacgagcgctggaagcattcgtcgacctcgtccaaagaaggttcgcccacctcgcagccgtgaccctgcagatgggcataatgcccttcctgtgcgtgatggtcgcggaagcgtgcgccagcttgccgccgctcagctacgtcgccccaaggctggtggccgcgtgcagagtgctggtgttcctctccaacttgctgctcatggccctgggctgcgggatcctcctcctcttccacagcaacgccctgctagtgctcactatctgctccgccatggcgctcggtgtcgctgccgtgcaaattcggtacctctgccgcggggtcg

SEQ ID NO: 44281 - DNA, 175 bp, Zea mays
  unsure (1)..(175): unsure at all n locations
  Clone ID: MRT4577_14038C.1
cacgcgtccgcccacgcgnnccggnnnccacttcaagaggggggggcgtggtgggatanngtcgaaccgggtggtaaatggagcatgnctannttaagtnnaaagccttgnagnaatnngcaacaggnnnaccttgnaagnataannnaaaacatgnnaagtcatnannattgaa

SEQ ID NO: 44282 - DNA, 398 bp, Zea mays
  Clone ID: MRT4577_140390C.1
atattgccgggtcgactgagcattttctatgtcaggcgcgccagcacctctctctatttatgtagagtactgattatttttttctgtaatcgttctgcgcgttggctgattggcagcgacgcgccacacgtttccccgggagtgattaacaaaaggcttgctatccagctcctcggcgggctgtttcaatgccactgtagccaatgtgcgcctgcgtgactcctaaaagacacctgccgccgctgctgcaagacgaaacttgccggtttggacccaggctcccactcccaaaatcgggatgccctccccggccttgtatgccgcctgaactgcccacggaacccccagttgggggccaacccacatggtccgaacgggtagtcccctagtgaagagcc

SEQ ID NO: 44283 - DNA, 1128 bp, Zea mays
  unsure (1)..(1128): unsure at all n locations
  Clone ID: MRT4577_140391C.1
acaccccccccctgccagccggacgacccacgcccggtaccgactggttagttgtagagggtatgcggtgcgcacgtgcacgtgcgcgcaagtcgtctgggatcaacgacgcagagtcgcagtcgcagcacacactgaattctctttagctagctaagagagggtagccacaccaagacaggatgcagacagcgaaggtgaaggcgaaggacatggtgagctcggcgaaggagaaggtgaaggaggggtcggcaaagatgcagggcaagacgggcgaggcgacggcggccacgcacggcgagaaggagatggccaaggaggcggcccgcgccaagaaggaccaggccaacgccgacaagcaccaggagaaggccgaccaccgagcggacgccgccactggccaccacggcacgcgcgtgcccctcaccggcccgcacggccaccacggcgctggcgcggccgtcgaccccgcgtacccgtcctccggcaacacgtacccggcgtcgggcaagtacatctaggtgactgcgtcggatgagcgaggccagggtcgtggtcgcacttgcgtttttgtgtacgtagcgaccgagaagatcgatcctggctgtacgcctgcagtaccggtaccgactggttagttgtagagggtatgcggtgcgcacgtgcacgtgcgcgcaagtcgtctggaataaaaatgctctagttgctgttaggttgcttaatttcagtgtagtcgttcgttcacgggcactgttgccctctatgtagtatgtttttttttttttgtttttaatcgttttagtgtttgaccaagtacgcgtaataggggggggggggcgacaaaaaaaaaaaaaaaaaaaaaaaaaaaaaaaaaaaaaaaaaaaaaaaaaaaaaaaaaaaaaaaaaaaaaaaaaaaaaaaaaaaaaaaaaaaaaaaaaaaaaaacccaaaaaaaaaaaaaaggggggggcctttttgggggcccattttttaccccccgggggggggggggcatancttttttttttttttccccaaattaaatccccgggcccgggttttaaaccccggggtgtggaaaaacattgggggtcccccctttaattccttttgagaatttccccttttt

SEQ ID NO: 44284 - DNA, 277 bp, Zea mays
  Clone ID: MRT4577_140392C.1
cccttccgtgggtccaacccaagcgttattccaagtgcttgatcttgtgcccctgatgccttgggacaggtttcacaattttaagccctccttcaatttgtccaggcttattcccaaatcttgcaggccatgctttaagagcttgggtaacaaaacccaccaattctgctgtttgattcaagaaaattaagctgaggttctccccttggtgaatgaatcttctgagggggggcctggagggaacatactttttcaacttgcatttgctgtgccacaa

SEQ ID NO: 44285 - DNA, 261 bp, Zea mays
  Clone ID: MRT4577_140393C.1
atggtcgacgacggtggcaggctcatggcggtgtgcagccgggaccaggttgtgcgtgtggatgcccgtaggatgagctcactggagacgcgcgtggagctattccatgtggatctgcaggaggagacgctatcgcggatcggggaccttgctgatgaagcaaaaaaggacaaagactgcttccaggagaccagatcatccggatcggtgaacacagcagaattaggcctgcaaatgggtgggtgtaaatgggtattttag

SEQ ID NO: 44286 - DNA, 579 bp, Zea mays
  Clone ID: MRT4577_140394C.1
tcgcagcacgcgtcgtaacttgatccttaaggccgcccttttttttttttttttttttttttttttttttttttttttttttttttttttttttttttttttttttttttttttttttttttttttttttttttttttttttttttttgtttgggaaatgggtggtttattaaaaacctttttagggaaaaacccaatccttgggaaaaaaccctaaaaaggaaaaaaaaaaaaaacccaattctgttttaaaaattaaagtaagggggggtcagatacaaattaaaacttaaaaaaacaaatttcaaaaagaaaaaaagggggcgggaagggggaaaaaaaaaagcccaaggggcataagggtaaagccccccaaagggattttcaagttcttgggtttggggacaggggtggcctttacctttaccaaattcccaattttttttgcaaagaaggctttttcccatttttggggctaaacgcctcggggggtcccggatttttctttgggccccacacaaaaaacccccccccggaggggggaaatcccgggttcccccgcgagggggggaacccaaa

SEQ ID NO: 44287 - DNA, 249 bp, Zea mays
  Clone ID: MRT4577_140395C.1
gcctctcagggagtaggtgccttaagacagggaggcacaggtcatttatgactcaacaaaaacttaaactctacgctacgtgaagggtcactggcctaacccctaaaaacaaattatcaactgtggaagccacatcggtgacataagctcttattatacacttacaaatattaatagttctcaaaataagcacacgcccgaacagctaaaacacgtcaaaaacaagagaatgggtcccttcagatcctc

SEQ ID NO: 44288 - DNA, 220 bp, Zea mays
  Clone ID: MRT4577_140396C.1
gattggcgacatgcctgtgacacattactgattccaagactgaaattgttctgtgttgacctgaaacataagagggagcattcctacggggaaaatttactacattaaaccaatggcaaatctatcagttattaaccagctacatgtttacaaggtaagtatggagagaggaatgtccatattggggtggtgagacttccatcttatctaaaagcttaac

SEQ ID NO: 44289 - DNA, 210 bp, Zea mays
  Clone ID: MRT4577_140397C.1
attcggctcgagggtgtgccatgtttcgtcatgacctaggcgcgcagggtaaatgctgggtattctcgcgatatcacggggtgttacgcgtctaatgcgtgaatatggattgttcttctgctgatcaaagtccgtgacaactaccgcgcaactccagatgcatcttcgggcgaaataaaaacaaaaagggctgccagacaccagttagct

SEQ ID NO: 44290 - DNA, 404 bp, Zea mays
  Clone ID: MRT4577_140398C.1
cgtccagccacgcgtccggtccaatatcatcctcgatcgggagccggacatgtcccgcgtcatcggctgcgtcaccttcgccactgcggatgcgatgcagttcaccatcgacggcacttatacgtcaaggagctgttcagtcgcacaatcatcgtcttcgaagtcgattctcgtggcagctgtagtcgcgtcggcgctaggtacgatagtagcctttgtggcggctgcaatagccgtaagatttccagtggagatgtgctgagcattatattcccaggtggaccatggctatcagtatctcaggttctgtaacgaggagtatatagtcgtcgaacattagagcgtgggttcgtgactacgctagtctacgttgtacctcatttaagtagaccttgctactgtgt

SEQ ID NO: 44291 - DNA, 288 bp, Zea mays
  Clone ID: MRT4577_140399C.1
catacacgaccaacaaaggggattttaaaaaaaatgtggattccctagccagtacatccccaccctcacagggcctccaacttacacggaaccggggggcctggtgcccaagatgaccgcctgaccctgaaccgttttataaccatagggcccgccgaaactctatgggacattcaacacaagggtacctacagggccatgcctcgggtccggagacataaaggccgacgactgatggccatccacctattggccaccacctagagcagggtctccaccttcagcaag

SEQ ID NO: 44292 - DNA, 576 bp, Zea mays
  Clone ID: MRT4577_14039C.1
gtccgcatacccggactggccgcctcagcccgggatgggtcccaacatccacagttactgaccagcgggccttccgtctccccctttggacacggactgagacaccccggtaccagacccatcacgaacgcggacgagaagttacgggattagcagagtgatagacagtagaagaggatcgtcataaaggtgatagacacgctcgcaatgaacccccagggattcgcgaaggaggaggacacgttacgggagttggtcgtctttattattctatctcgcatctagatcatgatgggaatgaccttcgtctagacgaaggtcaaggagattcaattcttcgttgacataacgacctacgtgaacaaggaagtcaaggaggagataatcttcctgggagtcgagatcgttattgtggtagtggttgtcgttcttatggtcgttttcctgtttatgctcatccaagacgaggtgctattgctaaaggttgtcaaaaaggtcgtcttggagttcatgtttctcgttattgtattcgttattaacgttgtattatttgtaatccaacttatgaacaaggtc

SEQ ID NO: 44293 - DNA, 485 bp, Zea mays
  Clone ID: MRT4577_1403C.1
cctggttttactggtacgcccggatacggggtgcagctactagatgtagacgatccccttccatgactggacctgcgtgggagaccaggcaaccagtcatgatgaatgcggttcgcgccgggatcaataaatttcttaacaggatgaagaaggacacacctcggtgctgtacgcctagctgctacgagaggcccactcgcgtggaggccgaccttgtacagtctgtgctgaacctgacagcgcataaagatgaggctgacaaggtgctggcagcccagattgcactggctcagtgatgagatcgtaaagaaggagctccatatccccgtgatgaaatcaaacctaccctgacttattctacaactatagctacatgaacatcatatatcaatgatactttcaacaattgacctatgactgcgacacgtgactgcatgaaagatcataggatgactcgtgtgacaccaactgtgcaggatgtggat

SEQ ID NO: 44294 - DNA, 261 bp, Zea mays
  Clone ID: MRT4577_140400C.1
gctgtagaacagagcaacccttgcgccatatgcctgggtgccatgggcgccgacggagggcaggctatggccaccttcacggcagagtgctcccacacgttccacttccactgcatctccgcgagcgtggcgcatggccacctcgtctgcccgctctgcaacgcgcagtggcgcgagctgccctccgtgcgcccgtcgcatccactttctatgccacccattctaccatgagcatcaataggtttgatggctcctactcac

SEQ ID NO: 44295 - DNA, 614 bp, Zea mays
  Clone ID: MRT4577_140401C.1
gccggccgggtttccaaaagagcggcaagcatggcgagctccacagacaaccgcctctacctcgggctcctcctcctcctcgtggcctccgccaccgtcttcctcgacgtgtccggggacgcggggcttacaccggggggaaatactgctacccctccgccgccgttccgaacggcgtacgcgttcggagactcgttcacggacacggtaaacacacgatcgacgacggctccctactcgttcgggtacgtgtccagcccgccctacggggacaccttcttgcaccgttcgaccaaccgatactccgacggccgactgattgtcgacttcctggacgatgcgctggcgctgccgtcctacctcccgccctaactcgacgtgtgcgaatccaacgacaacggcacggtggccggaatcggcggcaacttcgcggcgtttggggacaaggtcatcgagaacgatgtcttcgcagggacaacactcagtatcgatgttaatgagaagtacatcgtgaatgtaaatgggatggtccgaggtgaagctgatactgttgtattcatcttctgtggggcaagaaggcgtccaccacatgatgtggataggtttgattggcc

SEQ ID NO: 44296 - DNA, 242 bp, Zea mays
  Clone ID: MRT4577_140402C.1
tggggaagtacctaaattttgctctatgggtcaatgttttaaagtcgacaagtcgattcaagtcatctgagcagcgataaggtgactaattgcgattagtcgaacctagtcgactcctagtcgtccacctatactaggaccatgtatgtatatatacatatatatgtgcgtatacacacacatgtgtgtgtccatagcagcatgataggttaaaatgcatcatgttgttctgtgactaaaaa

SEQ ID NO: 44297 - DNA, 905 bp, Zea mays
  unsure (1)..(905): unsure at all n locations
  Clone ID: MRT4577_140403C.1
tcgggagcctgtggaatccagaccgcctcgtcgtcgtcgcccgcgcacccgtcgccgccccagctgtccaccgtcaccaccaccgcgcctctcgagccccttgcagcggcggggggcaaggtccacggcctgtccctcggcggcggcgctgctggctcgtcgcacctcggcgtcgatgcttcgaatgctcactatcgttatggtagcaacaggtaccctctcggagctaaaccggacggcggcgagttgggcttcttctcaggagcgtcatcggggaacaactcgaggggcggcttcaccatcgactctccatcagataacaactcgtggcactccgccctggcgtccagcgtgcccccgttcacgctgtcgacgaagagcggggactccggcctcctgcccggcgcctacgcctcctactcccagtcccactcccacatggagccgccgcgggagctcgggcaggtcaccatcgcctcgctggcgcaggagcaggagcgccagcagccgttcagtggtgggatgctcgggaacgtgaagcaggagaaccagaaccagccgctgcggcccttcttcgacgagtggcccgggacgcgggcggactcgtggccgccggagatggacggcgcgccgcgggccggcaggacctccttctcctcctccaccacccagctctccatctccatcccgatgcccagatgcgactgacgaggaaccgtcgatcgggcggccactagacggtggacgctcacgctcactagtgcgctgtcgcctggagtggagatcgatcgtcacgccgccgccgcctacgccctcgtcctacctatttgntttgccgtagtggattggaccgacctcattaagaacagaacagaacagaaggctctggggaagaacacaagccc

SEQ ID NO: 44298 - DNA, 255 bp, Zea mays
  Clone ID: MRT4577_140404C.1
cgagatgaattcggccttgttcgccttcactggagacgggatgcataggagttcccaataaggaggaccttgtgtgctcgcatagtgagcgagtcctgtgcagcctgccatgcatgcacccatgggtgtactggatccattacagcaggttgttatagcgtacactgcacaaggcatggggagtagtataaggttgctgcattccatgcaatgatgcaataaagggtaaagacaggtttgcacctaatccgaaga

SEQ ID NO: 44299 - DNA, 305 bp, Zea mays
  Clone ID: MRT4577_140405C.1
aatggggccctcataccggcatgtgtgacctaacaaataattaatatattgattgttatttatcttaaaacaagttaactaattattatctttaagcttgtccaagcttttttttttttttttttttttttttttggtggggggggggggccttctcttgttttttttttggtcgctcctgccggtgtgggggcccctttcttgtgttctttggtcgcggccgcgcttggggcgtgtttctttctctggcggccgtttcttgtggttctgtgctcggttccgtgcttggcgttttctttgttttt

SEQ ID NO: 44300 - DNA, 315 bp, Zea mays
  Clone ID: MRT4577_140406C.1
tctaattgttcttcatctttgtcctttttgcaaagactgaaagttggtcagcaccacgtgtttcttcctgtataagaaagagtgatataggttaattaaaaatattaagtacacatactgatatctatatgggtgttattggatgtgttgaaaagtagttaccttgtcggagtcatcaattgcattgaaatttctcttgtatgatactctgaggttgtcaaagcaactgtaacatatcagattaaaagatgttataacaaaacattgtaaaatttctggatgatatgaaaagaaagaccataaaaagtagaccca

SEQ ID NO: 44301 - DNA, 510 bp, Zea mays
  unsure (1)..(510): unsure at all n locations
  Clone ID: MRT4577_140407C.1
tttggcggccgagccagaactattcctctgggggactaggcggacnccgtgcgaccccgcacacgtgccacttattatgttcttgtcggtcccgtgcctatgatggggggggggggggacntgaatcacaacgcgcctgatccttagggaggggggggggagcgcaggcgctacccaccctccgctttttccgcggcggaggaggcgcctcatgcccaagacggcttctccgccttggggggcttccccccctccctggtgaagtcggggggggccctccccttgcgcccgtctgccgccgtcttgtggcttcgcccgttgccgcctttcttgggggcgggggtgccggtgctcttgccgggcctgatgtcgggggtcggcttggcggatcttcggggtctccgtgtccgggatcgcgccggtgccgggcggggccccgggcgccgttgggggctgggggcccgccgttggcgttggggcacctggcgttcgcccgtggggcgaggccgg

SEQ ID NO: 44302 - DNA, 304 bp, Zea mays
  Clone ID: MRT4577_140408C.1
cccacgcgtccgcgcacgcgtccgcacacgcgtccgcggactctgggtgtaagagattgtgaaggaattctcgtcctacctcaagaaagttgggtacaaccctgataagattgcctttgagtaattgggagtgattgcatccatcttgttgcatcggcaagtcatctgcttcgctccaaggttggacgcatagatagcatggtcacatgtctggtcatccttggggataccagcctcaaaaccgacagttgtgtagtcaatggtaatgacagcgcagtcagcctgggaggtaccagtggtcatg

SEQ ID NO: 44303 - DNA, 372 bp, Zea mays
  Clone ID: MRT4577_140409C.1
ggtcgagctccctaagcctcctgcgcacggcctaaaactccctgctctcgcatgttcgccttgctctgcttagcatcgctgcatcgtttcgcacggacgccgcacagccatggctgccagtagaaccttgacggctgccgctggttcccctaccccaagctccagcgcgcatagccgatgggacctccaccgtttcccctcctcagcgcgctccatgctgagctcccgcaggccacaactgatctccgtggctgccggccaccggacagaggcgcaatccctctcccgtggacctccaaccccgccgagccatctcaggtccgcactgaaccgtgaggaatcctctctcgctccttcaccaccgcatggcgc

SEQ ID NO: 44304 - DNA, 299 bp, Zea mays
  Clone ID: MRT4577_14040C.1
ggggggggttttctccagttcattgttttttaaaagtacatggaagaaagagtttctgcccaattccggataaaattgtcaaacccagccggttcccccccccgggtatgcaaaaaccccttataaaacaaaccccgtatccccttttttagaaaagggcgcaaaaaaactttcctccaaaaaagggtcgtggggcgttacgagttaaatgaggcacaaggggcctcaaagggcagccttctttaagtggggtgaaatgggactgctgggtatccaaagaagggccgttcgcgggggaa

SEQ ID NO: 44305 - DNA, 311 bp, Zea mays
  Clone ID: MRT4577_140410C.1
catcattctagtccgggagcgtcctgtactggggggcccacgtgatcaggatacaccatgtcgtgcttactggtccgattgtcagcggacaggcaggccagggcttctttggggctgacgggcgtgttagtgatgtaaggcgctggtgctgatgatgctggtcattcttcaggtggcgtggcgggtgaacgccacgggggtggatctgaagaagggaagacctgcgcaccaattgacaccataagcatcctctggatccgggcgggccaacatgccgggggggggggcgtcggacagggcgtccatgaggc

SEQ ID NO: 44306 - DNA, 833 bp, Zea mays
  Clone ID: MRT4577_140411C.1
ctcttctcacctcccttcctcctgacacccctcctcgcgctccagctaaatccacgccaccgatggcccgcacgggcctcgcggacgcaacggcgccggaagccgacgcaatgccggccgccagcaaggacgccgccgacgtccgcatgatctccaccaaggagctgcaggcgcacgccgccgcggacgacctctggatctccatctccggggacgtctacgacgtcacgccctggctgcgccaccacccgggcggcgaggtcccgctcatcaccctcgccggccaggacgccaccgacgccttcatggcctaccacccgccctccgtgcgcccgctcctccgccgcttcttcgtcggccgcctcaccgactacactgtcccccccgcctccgccgacttccgccgcctcctcgcgcagctctcctccgcgggcctcttcgagcgcgtcggccacacccccaagttcctgctcgtcgcaatgtcggtgctcttctgcatcgccctctactgcgtcctcgcctgctccagcaccggggcccacatgttcgccggcggcctcattggcttcatctggatccagtcgggctggattggccatgactccggccaccaccaaatcaccaggcaccctgccctcaaccgcctcctgcaggtggtctccgggaactgcctcaccggcctcggcatcgcctggtggaagttcaaccacaacacacaccacatctcctgcaacagcctcgaccatgaccctgacctccagcacttgccgctcttcgcgggttccaccaagctctttcacaacctttggtcagtctgctacgagcgcaccttg

SEQ ID NO: 44307 - DNA, 386 bp, Zea mays
  Clone ID: MRT4577_140412C.1
gatcaagccaagaagctcacggtaccgcggagatcaatatgtccctttcgatgtcaacatcccccaaaatttcacgtctagccagcgggagctgatcgagcaattcgccaagcaggatcaaggcggagaccagaagaacgccaaggcagcagctgaagcatcgggtggatatccggttttaggagccacagtagtgccttttagctggtatttataccgtgaccgtagacctgtctcaaattcgcagcggaaagatttatagataggtctttgtttcggattttgtagctggaataaatgaataatacgtctagaactgattttctgtcaaaaaaaaaaaaaaaaaaaaaaaaaaaaaaaaaaaagtgagctcaaaaaaaagaaaa

SEQ ID NO: 44308 - DNA, 649 bp, Zea mays
  unsure (1)..(649): unsure at all n locations
  Clone ID: MRT4577_140413C.1
agcaacaaacgatccacaccaacgtttataagccacgtttggtctgtctcagtggccggtatggtactaatcaaacaaatcccataacagtgcctacgtccgagcggtttatgcagcccagtggttcatgtggcccaaccgttggtgcggcccattgtgcagcccagcctacaacgtctgtcatcctcttcggcagccctaaaccctctgcctccacgacggcgcgccgcacgcagagatgtgcccacgtcctcaatctgcctccatgacggcgcgccgcaccacgacttcaatctccccccccacgacctcaaccgctccgccagctccgccacttccgcacgcacgacctcgacctcgcctgattccgccagctccgccactttctcgcccccgacctcgatgtgtgggattcgataccaaacgaagagacgagaggagaatacaagccctcaacctcgcccttgtccttggtgttccccattcaccgctcaggcgcactccatcgctccttcgacgaggactccaacgactacggctccatcgctcctcatggtgatgcctccgagggaaccgtnacgactacaacgaagccgtacgcgatgccgtcagtggttgcccacataggggcatgctncaccatgcgcgc

SEQ ID NO: 44309 - DNA, 282 bp, Zea mays
  Clone ID: MRT4577_140414C.1
ggggaacacgcttctgccattgcttggctccccccaccctcactccccccgaatcttttctgcttgttgaatctgaaatttgtgctgggttgagcacgagggaggctttccatctctcaggcttcccaaaagctcgggtagcttgaatcatggagagttccacaacgtcctagccaccgccgtggcctgacctcgccataaccttccattccatggaggtctccaccatcagcttctcgtccccgccgccgcgggccacgccggccgacctcgaggccgtcg

SEQ ID NO: 44310 - DNA, 745 bp, Zea mays
  Clone ID: MRT4577_140415C.1
cattgggtacctcgaggacggccgggattgctcgttgcgccgtcgtctccgacatcgtcccttcgttcccacgagcaaccgataatccgccggtgttgagatgttggtttatcaggatctcctatctggcgacgagctcctgtcggattcattcacctacaatgagctcgagaactgcgtactgtggtaggtctaggaaaagtgggtcacccaaggttctgttgaagtggacattggtgcctagtccatccgacgagggtgagagtacgaaaatgttgatgacactgtgcgaaggtgtgatattgatgacacattccgtctacaggagcaacctcctatttacaagagatcatttgggtcttacatcagaaaatacatccagaatctcactgctgggatgcagacagagaaagcggatgacttcaaaaagggcgtctagattgcaaccaagtttctccttagcaagctgaaggacctccaattttttgttgccgaggccatgaaggatgatgcgtctgtgatattcacctattacaaggatgacgccactaatccgacattcctctatttctctcatgggcttaatgagatcaagtgctatgcgtgcagcgcaattatctacgcaggttgcgtactatctatgtactattattatatcgcaaactatagttgtcctggttgaattgaactcaacagggtttgtttgagaaaaaattgtcccaagattgcattgcttgctaaagct

SEQ ID NO: 44311 - DNA, 627 bp, Zea mays
  Clone ID: MRT4577_140416C.1
gtcatttccatcttctggaaggcagtctttctatagaaatccaatcaaggaagttgtgcggtttctagataagaaacaccgaaaccactatcgagtctacaatctatgcagtgaaagagcttacgatcctaagcacttccataatagggtcgttagaatcatgattgatgatcataatgtccccactctacatcagatggtggttttcaccaaggaagtaaatgagtggatggctcaagatcttgaaaacatcgtagcgattcactgtaaaggaggcacagatagaacaggaactatggtttgtgccttccttattgcctctgaaatatgttcaactgcaaaggaaagcctgtattattttggagaaaggcgaacagataaaacccacagcgaaaaatttcagggagtagaaactccttctcagaagagatatgttgcatattttgcacaagtgaaacatctctacaactggaatctccctccaagacggatactctttataaaacacttcattatttattcgattcctcgttatgtacgtgatctaaaaatccaaatagaaatggagaaaaaggttgtcttttccactatttcattaggaaaatgttcggtacttgataacattac

SEQ ID NO: 44312 - DNA, 342 bp, Zea mays
  Clone ID: MRT4577_140417C.1
attcggccgcttccgccctcgcctccgctgccttctccacgccgctggcatgtcttccgacgccgtattcggctctgccccaagccccagcttcgccactggggaacaggcgaaggcgggcccgctcccgcactctaccctggagatcgcgggcgcccgacgaagccttctctccggcttggtcagtctgcgaacaccgtaccgcgcatttcccgtactacgcgtacaaccagacacgtctgaaccatcttggctgcgctcacgcgatcgatcccggccgctaagctgcggagctagtgcctgcgcgcccctgacgacggagccgacgcgctcgactgggtc

SEQ ID NO: 44313 - DNA, 565 bp, Zea mays
  Clone ID: MRT4577_140418C.1
ccggccgggatcacgattcgcccaaacatgatagggccgcatagtactcggaccggaatgacgaccaatgatttcacgctcggtccagccagtctatgcagtccagttacacttgttcccaggaaaccaaagtcatacaatcagtgctagacccgctgctccagaggactgccgctggaggtagggggtctgtactcctcccatcatgctggaggtgaatgattctcctcctcctggccgatgtacccaatctctaggtccctattatgcgcaggctatactgtatcttggacaggcagaatccaatgggggaaaccatggtctcctgctcgaatttgcaatccgactatatgcgtacccccgacgctgctctggtgcttcaagtactgagggatccttgccagctggtggccataatagacatccttggacccgctgtaacactgctgtatgctccccaaccactgcgtctaccacccgaaaatatctaccggaaaacccggggcgacaagagcctgatgtattgccccttcattgggttccccgcgctgccaactttcccggt

SEQ ID NO: 44314 - DNA, 273 bp, Zea mays
  Clone ID: MRT4577_140419C.1
taaaaaacttgattttgatgtttattctccaggtttttggttgttttttttctttcttctttcttaatgcctgaacttttctccattggctcgaaagcagtaaaaattgttcattaatcttccgttaggccaataaaagaagggcctcacaagacaaaacaggagccagaagtaaggactgaagtagaaggggagaatagctaatagctatagtatatgtatatgttaaaaactgaatatcccatcatcctatttcatgtatagttgagttct

SEQ ID NO: 44315 - DNA, 200 bp, Zea mays
  Clone ID: MRT4577_14041C.1
gacgcaaccaggcaccattcagtgcatgcgcacccgcggcccagccatggacatggggtttgtcgagagccagccggagttgacggccgcgaggcgccgggacccggcacgggaagcgggacgccgggcggaggcaggggcgggcgcaagcggaagcacctcacctccatcgccagccacgtgcaccggcaatgttcact

SEQ ID NO: 44316 - DNA, 315 bp, Zea mays
  Clone ID: MRT4577_140420C.1
aactgaaacaccccgagcttacgggggaccaatttcttaaatggggggacaaaagcatccaaaccgcttgtgctttattccccggtatttcactattttcggttgcaattggacaatgggaccatgcccatccccggggggggggccccatcaagagggtgggacaaaggggggacaaaaaaccaaacccttggcaagtgccaaacgcggaaggaacctttaccccatgcgggatttaagactaatgggcttgcccaaaaaaactgcttatactgtcttaacctatgagaaaggacatttctggtggttctaaac

SEQ ID NO: 44317 - DNA, 118 bp, Zea mays
  unsure (1)..(118): unsure at all n locations
  Clone ID: MRT4577_140421C.1
aggtngngcnatggaatacaggggattcatgctcaggcctgatggatccctgtatntcatgtccaactagcctaaggcaggaatcccttgttatttatagattaagggcttgttcggc

SEQ ID NO: 44318 - DNA, 292 bp, Zea mays
  unsure (1)..(292): unsure at all n locations
  Clone ID: MRT4577_140422C.1
gtaggggaggacagggcacaggatatgaaagcgggttggagggtgaaaaggtgatgtattggtgggagtgggttatgttncgagtttttagcgactgtttggtggaaaaaagttgtattacaaccttagccaatgttttgttagtttatttatttcagtttgggtaaagtgttacatagtgtatattgtattttgagaaaggatgtggtatatggagggggtggggggtggtacgttgagtggagataaggacagtctaagggattgcgaggaaggggggggagtataggta

SEQ ID NO: 44319 - DNA, 409 bp, Zea mays
  Clone ID: MRT4577_140423C.1
ctcgaggccggccgggacttacctggacggggtcgactggctatcaagaaggcccgtggcctagatcaatggcccacattgcacttggtggatgcgttggtttaccatctccccaagtgggagagtggacgtcataatttgtgaagtgggagagtggacgtcataatttgtggtagatggggtacgcgacgcagttcaggtctcggtttgctgcttcttgatcagttcagatctcggtttgctgcttcttgatccagatcagggtttctgatccatatagtctgtactttgttacaaaaatcatgtaatttttaaactttttcccatatctgggttcctgatttatgaagtctacagttccggcaaaaaaaaaaaaaaaaaagcggccttctttagcagcattacggac

SEQ ID NO: 44320 - DNA, 1283 bp, Zea mays
  Clone ID: MRT4577_140425C.1
cctcgaggccggccgggatctccttcctcatccgaaacaactgacatcgccccgcagccaagaagctcggctcagctcagctcagttggttcctccattttgagtggaggactgactgccctcccgccggccgactcgcgatgctgatggggttccccgtggggtactcggagacgcccaagctgctgctgcacctcctcttcctcctcgaccacctgcgccgcctctcctcctggctgctccgcctcgcgggcgccgccgacgccgacgccgacaccgacgccggccaccctcgccacccctgcgccgccgcccagcgcctggaggagcactcccccgcgttgcgcttcgactcgctgtcgtgcggaagcggaggaggggtgacggcgccgcgcccgctgcccgagggctgctgcgtctgcctgggcgacttccacgccgccgccgaggtgcgccgcgcccggggctgccgccacgtcttccaccgcgcctgcctcgaccgctgggccgcgcacggccaccgcacctgcccgctctgccggacgccgctcctcccgccgctgccgctgcccctgcccctgcccctcccgctgccgccgtcgtagcgatccggattacctcctacctgttgggcctttgtgcaaaaaagtaaccttccactccactgggcttggtggtttgttatgatttttgagaaattacagggcgctccgtgtgaaaaggggctccctagtgtgctctgttctaggaaaaaggctcaagcctggaagagggagcaaatatggtgatagacagacaataggttactacttactagggcaaagttaaaacaggggaaacaaattacgttcttgttatatacacgtaggtaggtagaatcaatttggcaagagatgtgtctctgctcattttcttttttttctactctctataaaatatttttgttccttcttttaaaaaaaaaaaaaaaaaaagggcggccgccctttttttttttttttaggattcgaaccgtatgaaaccgagttggaactaaaagttgacagtatactacacttcaaaggggaaaaaaatgtctactgcttctagacttcaagctcgtctgcactccgaacagtgcgacgaggatgacgtgttggcaagagaaaacgctgcagaacagcgcaattacagcttctcgggccattcgattgtcgaagaggaaaggggaaaaaagggtagtactacgaagtatgaactatgaaaggccagccaccgggcgacgccgctacaaggacggctgc

SEQ ID NO: 44321 - DNA, 1003 bp, Zea mays
  Clone ID: MRT4577_140426C.1
gggaatcattacttttgagctttggaggaggatgtggaagtcttggactcctccaaaatgtaaatttttcctatggctggctatacggaataaatgttggacataagatagattggaaaggagaggtttggaccatccggagtcttgtttattatgtgatcaaacgcaagaaaccatccaacatctattgtgtacatgcatctttgcaagacagttttggcatatcatttttttcgcccttgggatttggtaatctctctccgtctgaagatgagatctcctttgccgattggtggcgaaaggtatgtaagaggatacatagaaacaagagaaagggtatgaacaacgtcatcattttgggggcctggtgtttatggattcaccgcaacaaggcagtcttcaatggagagaaccctttgctgggcactatccgatgtgtttttcgagatgagttgatagtgttggattaaggctggagctaaacatcttgagaacttaggcctagaggtcgcacttaatatgaacattgcataatttttgtgggtttggagtccccctgtagtcccgccatggcctctgttctggtgaaggctgtagtttggctgaaggttagtgtttgcgcgtgtgttttaccttgcctgttaggctctgtaccttggtccattttcgaccctttcttctctaattaaatgatgcacaactctcctgcactttcgaaaacaaattaattgttggtcaaaggttaacaaccgttagctccctatcaacaaaccagttggattggaagttgtcctgggttattccaccgatcctgccacagtccaaatccttgctgagcttgcaatcggtaacagttccacacttcactcttcagcaagttgttctaagaattaaaggaagaatctagactggtgccaatagtgcactacagttcaagctcatttctgctctccatgctagtccttgtgcatctgcactcgtgagtcgtgatgggcatatttgt

SEQ ID NO: 44322 - DNA, 221 bp, Zea mays
  Clone ID: MRT4577_140427C.1
cttgactgggatttaccccggtcggtgggctggtccatacaccagctaatggatgactggcatggaccatagttggacttgccttgcaacagtatatgctttgttagctaccaatacacatcatcaaatataaactgacgcaagcattctacgtagccctttcttctaatgctgctgtgttattctgtcttgctaaatggaaggacaaaatagatgaggca

SEQ ID NO: 44323 - DNA, 317 bp, Zea mays
  Clone ID: MRT4577_140428C.1
acaagctttttttttctgttgttcttttttttttattttttttttttttttggggggaacagaggtttgttatttgtcaacagatgacacacataattgggatttgacacgcaaccgagcgagatgacgaatatactcgtattgggtagcaccagctatatagagatagccatgtggggagactgggctagtaagaaaccgagagcgaggattcagagatagatttataggttggtgtgagcatgacttgttgggagcctctatgttatagaagaatttaccaacgggtgtagtttgggggtgagcacgcttggggg

SEQ ID NO: 44324 - DNA, 855 bp, Zea mays
  Clone ID: MRT4577_140429C.1
gaaataagtgaatggtcgaatgctatgctggaaaagaatgttgaggagcttcgtgaatccaaggagagatgctttgagaaatccttggattgcgtaagaaaactaaaaaccagctttgccaaggtgggtgcgtattcttccaaagaaaagttcattcgaggtgaccccgagggaatcattgattggataggtgaagaagccgaagcttttgaagatatccttagtgatcatggtgatatttgtgccttcgccggtgcttggggggttgcagcaattctggagaaggctggttgtgaccatgttaaagctgtggctcagaccgaaaccgccttctccacagacgacacgaaggacccctcggccgaagccactttggtgggcgggaagttttattccgatgtctgggtgaacggtggccgagaaatgaccaacaagattataaagaaaaacgaaaaagaaactcatgatgctcaagaagaagctaagcgagccgaagaagctgccgagcgcgcaaggcgtatagctgaactctcactgctacccgagccatacgacccccaggccgatcccgttatgaaagaggcgctggatgtgatgagtgttaccaataccatcgtcgacgaagtcatcgatagactgctgaatgaggccactgagaaaattctcaaagaagactaggcttttgatgtaatgatacaatgtaacatttgtgtatgaaacaattatcaaacatgtatattgatgtaatatatttctttgcgatgcatgaaatttacgcacataccaattttgagccttcggcgaaaaaacaccttcccttcttttcatgcttcgcaaataaaaaagcccttttat

SEQ ID NO: 44325 - DNA, 265 bp, Zea mays
  Clone ID: MRT4577_14042C.1
ctacagacttcaatctggtcattccctgagactccattcacgaaccacatactatgtggtcaaccctgacaacaacgaaaatctcacattaataacactcgccatacccgttaacaagcctggtagatttgatcgattcttcctatctagcactgaagctcaacaatcctacttgcaaggattcagcaggaacattttagaggcctcctacgataccagattcgaggatatacacaaggttctgtttagtagagaggaagggcag

SEQ ID NO: 44326 - DNA, 434 bp, Zea mays
  Clone ID: MRT4577_140430C.1
gcacgcgtacgcatgctcggaattcggctcgagctgtcccctgctacctggcttttgtttggctggctaaccccgcatgacctctgttcaaactcactagctccccacctgttcgctgcttgttgatcttgccaatctgctccttcttatagctagatcttggatggagcctgggatgtcactacaggtagcgcatatcacagcggtatatgaagtactcttctgttatctagtgcaccaggaccggcagggaggctcctcttggtgctatccacagatgcgagctgaatgccagcagcatgccctcatgcagtgtgcgatccaatattagccccatccccactactagttgccggggtgtaaagcccaccaagcaggcagctgtctttagcgagccacggccatggatcccgtgctgacagaggcccttggct

SEQ ID NO: 44327 - DNA, 264 bp, Zea mays
  Clone ID: MRT4577_140431C.1
actgcatccttgctaatactggtacgcaggccgctcttgtcctctacacaggagttcgctgcagccgtcacacactcagtggctctgttcatcggcggtggctacctctggtgactaattttctaaggaacggctctctattcctatactctgaattctatgccgagactagtagctaattctgcacacttcggcgcgatgtggatatacagctgcgcgtcgcttgataggagggtctctatgggtgcgcgatgaatgatactt

SEQ ID NO: 44328 - DNA, 300 bp, Zea mays
  Clone ID: MRT4577_140432C.1
tgtacttgttgctgatttttgaccttgtattcaagttaactgttcccttggtatatatttaataccctgtgcatatcttgatttagtccttagttcatgtggctcggtcacttggtggctggggagatctgtggaaaagtcagtcagtccccagcccattggatctctgtgagcaccatgtagtgatctgtgcagggtattaaccaacagcagacttccaggatttcccgaggctggcaagggttcctgaactagttaccacttcttttcttgccagtctaacagggtgggaaagtccga

SEQ ID NO: 44329 - DNA, 154 bp, Zea mays
  unsure (1)..(154): unsure at all n locations
  Clone ID: MRT4577_140433C.1
acagtggagtcggtgttgttgatcgactatgacacaaagggaatggttgcgcactgcacaaattcaccaccactggtcatggtacgagcttagttcatgtancagaacagtttactgaagccaggtttacccttgacatactgcatttacatgt

SEQ ID NO: 44330 - DNA, 467 bp, Zea mays
  Clone ID: MRT4577_140434C.1
agacggcgccctgggtggtggtttttttttttttttttgggggtttttttttttttttttttaagcaggggccagatgatttaaatttggggggaagccaccccagaaaagaccaaatttagtaaatcccagcccgggggggggggggccactaaagaggaaacaggggagggtaacccaaaacaggaaacatgaaaaaggggggggtcaaacccggctttgggaaaattaggcttactcgggctgaaaagatacttgaaaatccaccacctggtaggtaaacatgggtgcaccaccataaccacctttgctggagggaaaaaacggggggcgaccccttgcattctgaaaccggaaagccaccatagcccccgggggaacccggaagggccctggccctccgggggccaccaacaatttggaccaggaattggacccctgggggggcacccaaacctgggggaaaa

SEQ ID NO: 44331 - DNA, 282 bp, Zea mays
  Clone ID: MRT4577_140435C.1
aattcgaccgtctacccactctcccactcccactcttccccctattctatatctcttcccaaacttctatatcatccaaagtcactttctcatacttaactcctcataaatcttctatattattacctaaatccaactcactctacctcaactttcaccctacccacttcaaaatccacaactcttcctaactaattcgcccaataccatatactctcttctaccgctatccttataaatcattactcctaacctatccccctttcaaacaaccatacaccc

SEQ ID NO: 44332 - DNA, 717 bp, Zea mays
  Clone ID: MRT4577_140436C.1
gcggccgccctttttttttttttttttttttttttttttttttagagcaacagaagcaaggcctagcttatttacagagacggccggcagcgctgcttgtacaatccaacggtacaaactacacagcaagtcgacaacacaaggacaaggctggcatagactgacgaacacaaccaggaaaggagaaaaaaaaacgtcctacggtctggggtgcctgtgcttcggcttcgtcgtcggcggagagccagcatgcatggccacgccgctgtagtccgcgctgtagatcagcccagcctcggcgtccgcgccctgacccgctgtccaccgcagctttgccttctcctcctcctcctcctcgggctgcttcacctccatagccaccgcttcctcaggttgctgcgtctgcttgctctggtgctggtaataacggtatgctgatgatgacgacagctggccaagttctcggcctttgcgaccaagaaggaccagctctgctggatgcttgccgagggaagacgacggaggagaagatgaagaggcggcacctgcgccagctgcaaaagtggctagaagaagaagaaggcctgaaacaagtgctgcacaggatggcttcatcgtgcgtgctgtgctgccgtcttggggccttgggctattgccaacgaggaagagcagaggctgcagagcgagccgacagcaacggaattcgagctcggcccg

SEQ ID NO: 44333 - DNA, 572 bp, Zea mays
  Clone ID: MRT4577_140437C.1
gacacgcacaaatagaaatccataataaacaacacatgatcttaccatgcaaaatgaacgggggtccataggataatacgacaaatagtacatctcatcacacacttactgcaactttacttatctatatgcgagaatgaaactgtagagcattcatgagtcataagcaagtacttgtcgaatgcattatcacggataaacattatcacatctacctaactagatgtatgccttaataagggtaaactgcgagtgcaaactcattcacacataccattccacttcaaatgatgcacacaatatgcaagggatgcttgtaaggaaacaacactgttgagttcaacaaatgcattttaaaggatatgctccaaagagttgttacacacctgactcacacattaacttataaataaggtggcacgacgggatacataggatgagccctgccacctgctccaggaagagacatttcaccttgagggaggaggtctcggaaaccataacctggaagatggtagattcctcctttaacaaatgcgcctgcaggcaggccacctgctcactgttgcatg

SEQ ID NO: 44334 - DNA, 4297 bp, Zea mays
  unsure (1)..(4297): unsure at all n locations
  Clone ID: MRT4577_140438C.1
gaggtctggccgggaccgacgcctgtcgccactggcacgcattcctgctctcctctcctcttctccctcgtcggtgcggcgtggcgcggctcggcgttcggtgagaaaccactcggggatgaggatctgctgctagagtgagaggagctacggtcagtatcctctgccttcgtcggcggcggaagtggaggggaggaagcgatggaggcgagcgccgggctggtggccggctcccacaaccgcaacgagctcgtcgtcatccgccgcgacggcgatcccgggccgaagccgccgcgggagcagaacgggcaggtgtgccagatttgcggcgacgacgtcggccttgcccccggcggggaccccttcgtggcgtgcaacgagtgcgccttccccgtctgccgggactgctacgaatacgagcgccgggagggcacgcagaactgcccccagtgcaagactcgatacaagcgcctcaagggctgccagcgtgtgaccggtgacgaggaggaggacggcgtcgatgacctggacaacgagttcaactgggacggccatgactcgcagtctgtggccgagtccatgctctacggccacatgagctacggccgtggaggtgaccctaatggcgcgccacaagctttccagctcaaccccaatgttccactcctcaccaacgggcagatggtggatgacatcccaccggagcagcacgcgctggtgccttctttcatgggtggtgggggaaagaggatacatccccttccttatgcggatcccagcttacctgtgcaacccaggtctatggacccatccaaggatcttgctgcatatgggtatggtagtgttgcttggaaggaacggatggagaattggaagcagagacaagagaggatgcaccagacggggaatgatggtggtggtgatgatggtgacgatgctgatctaccactaatggatgaagcaagacaacaactgtccaggaaaattccacttccatcaagccagattaatccatataggatgattatcattattcggcttgtggttttggggttcttcttccactaccgagtgatgcatccggtgaatgatgcatttgctttgtggctcatatctgttatctgtgaaatctggtttgccatgtcttggattcttgatcaattcccaaagtggttccctattgagagagagacttacctagaccggctgtcactgaggttcgacaaggaaggccagccatctcaacttgctccaattgatttctttgtcagtacggttgatcccttaaaggaacctcctttggtcacaacaaatactgttctatctatcctttcggtggattatcctgttgataaggtttcttgctatgtttctgatgatggtgctgcaatgctaacgtttgaagcattatctgaaacatctgaatttgcaaagaaatgggttcctttctgcaaacggtacaatattgaacctcgcgctccagagtggtacttccaacagaagatagactacttgaaagacaaggtggcagcaaactttgttagggagaggagagcaatgaagagagagtatgaggaattcaaggtgagaatcaatgccttagttgccaaagcccagaaagttcctgaagaaggatggacaatgcaagatggaaccccctggcctggaaacaatgttcgtgatcatcctggaatgattcaggtcttccttggccaaagcggaggccttgactgtgagggaaatgaactgccacgattggtttatgtttctagagagaaacgaccaggctataaccatcataagaaagctggtgctatgaatgcattggtccgagtctctgctgtactaacaaatgctccatatttgttaaacttggattgtgatcactacatcaacaacagcaaggctataaaggaagcaatgtgttttatgatggaccctttactaggaaagaaggtttgctatgtacagttccctcaaagatttgatgggattgatcgccatgaccgatatgctaaccggaatgttgtcttttttgatatcaacatgaaaggtttggatggtattcagggtccaatttatgttggtactggatgtgtatttagaaggcaggcattatatggttatgatgcccccaaaacaaagaagccaccatcaaggacttgcaactgctggcccaagtggtgcttttgctgttgctgctttggcaataggaagcaaaagaagaagactaccaaacccaaaacagagaagaaaaagttattatttttcaagaaagaagagaaccaatcccctgcatatgctcttggtgaaattgacgaagctgctccaggagctgagaatgaaaaggccggtattgtaaatcaacaaaaattagaaaagaaatttggccaatcttctgtttttgttacatccacacttctcgagaatggtggaaccttgaagagtgcaagtcctgcttctcttttgaaagaagctatacatgtcattagttgtggttatgaagacaagacagactggggaaaagagattggctggatctatggatcagttacagaagatattctaactggtttcaagatgcattgtcatggttggcggtcaatttactgcatacctaaacgggttgcattcaaaggttctgcacctctgaatctttcagatcgtcttcaccaggtgcttcggtgggctcttgggtctattgagatcttcttcagcaatcattgccctctttggtatgggtatggtggcggtctgaaatttttggaaagattttcctacatcaactccatcgtgtatccttggacatctattcccctcttggcttactgtacattgcctgccatctgtttattgacagggaaatttatcactccagagctgaataatgttgccagcctgtggttcatgtcactttttatctgcatttttgctacgagcatcctagaaatgagatggagtggtgttggaattgatgactggtggaggaatgagcagttctgggtcattggaggtgtgtcctcacacctctttgctgtgttccagggacttctcaaggtcatagctggtgttgatacaagcttcaccgtgacatcaaagggtggagatgatgaggagttctcagagctatatacattcaaatggactaccttattgatacctcctaccaccttgcttctattgaacttcattggtgtggtcgctggcgtttcaaatgcgatcaataacggatatgagtcatggggccccctctttgggaagctattctttgcattttgggtgattgtccatctttatccctttctcaaaggtttggttggaaggcaaaacaggacaccaacgattgtcatcgtctggtccattctgctggcttcaatcttctcgctcctttgggttcggattgatcctttccttgcgaaggatgatggtccgcttcttgaggagtgtggtttggattgcaactaggatgtcagtgcatcagctcccccaatctgcatatgcttgaagaagtatattttctggtgtttgtccccatattcagtgtctgtagataagagacatgaaatgtcccaagtttcttttgatccatggtgaacctacttaatatctgagagatatactgggggaaaatggaggctgcggcaatccttgtgcagttgggccgtggaatacagcatatgcaagtgtttgattgtgcagcattctttattacttggtcgcaatatagatgggctgagccgaacagcaaggtattttgattctgcactgctcccgtgtacaaacttggttctcaataaggcaggcaggaatgcatctgccagtggaacagagcaacctgcacattatttatgtatgcctgttcattggagggcttgttcattacatgttcgtctatactagaaaaaacagaatattagcattaatctatagttaattaaagtatgtaaatgcgcctgttttttgttgtgtactgtaatcatctgagttggttttgtgaaattttcgtagaaagaatgaatgtgagatacagaaaatgtaatgccgtggtatatgcgtatggaacgatgtagtatcttttatggttccataatagtgtatttaacaaccccagcaaggggtttcttgggtttctttttttaatcctatttataatgatataatgataggggagcaaagaggccttaggctgtctccagcaacgtcctctaaatttcgtcccctaaaggaatattccctgtactttacagcacactctnaaagattctgtcctctttaaaaaaaaaaaaaaaaagcggcc

SEQ ID NO: 44335 - DNA, 822 bp, Zea mays
  Clone ID: MRT4577_140439C.1
cattgggtacctcgaggccggccgggtcctcttgctcattctttgctccctcctatggcgcactcctcccctgcagctcgccagccgcgccctccctgctcgtcgttcctatcccctatagccgagcccaactctaagcgacgttctatcttcctgcagcgggccgatgcctagctcccagccaccgtattgccatctacctgacgcgctccctcccttgttccatggtcgagctcacccctgcaggagctccctttggcgcctagattttgaatttcctatgagttctttttcccccacgtgcagtcctgacgtcgacctccatcgccctcctgctcgcgagcttcaagtcctcgcgtcattcctccagctcgctccggtcgcggacgccgtcgtggctcagccgctcgtcggatctgcgcagcccctgcgcaacatcataaactccgctcgttgtcgatgccgcgcttcgtgcatcgcgtcttcgacgaaaatcccaaggctatggacagcatatgcgcaactcaaatccgatcggctaggttgtttgatgtgtattttactcattataatttagttgatgatgtgtttgtatgtgtggggtgacaaaaaaataaaataaaaataaaaatgaaggagatgcctcgttcgatagtaaggattaagtttaaatgtaaaaaaaaaaaaaaaaaagccgccgataaatatgtgtaggcatagtgtgattaattgtttcttcgtctacgtgatgtgataactaggtttggaatattaaattatgtgaaatgaatggattcatgattgtaaaaaaaaaaaaaaaaa

SEQ ID NO: 44336 - DNA, 474 bp, Zea mays
  Clone ID: MRT4577_14043C.1
cccacgcttccgcaccgagaccaggcgatgtgggatgacccgaatgactacatgccggagcggttatagctcctctggacagaggggaagttcatgatgccgtacagggatggtgaaggtgcacgccccccggctagatcattacgatgggagtgatgctgctggtcctgtgggcgctgctccaatgctccaataggcccagggtgggcgatatacaaattgtcatggcaacatacactggcaccatcatgtctaatgttgacctactctaagctcagtgcaaggcgatagctaacatgtctgctgctcttaaaataatctaaagcgaaattgcgaatatttgtagttgcttatatactatacttaactatgcaatggttatatctagtgaatatcaatataccagtctctttattataatgctgttcattgaccttcctagcatataacaacataaattgtaagaatatacct

SEQ ID NO: 44337 - DNA, 355 bp, Zea mays
  unsure (1)..(355): unsure at all n locations
  Clone ID: MRT4577_140440C.1
cgccgatactggcatcagcgagctggaaggcgtggggtaccaaggcgacatcagcgacgcgctcggatacaccgtgtacgccaccgccgccgaccgcaagaagggctcgctaggaaccatcgcgcccatcggcatcggcttcatagtcggagccaacatcctagacgcggggcccttcaaacatggctccaagaaccccgaccgctcctgatgacacggcactggcgactncgaattaggcggtgactgatggtaactgcacgaagcactacatgctggaagctctagtgcacaagggagacatcactaaccttgctcaacaatacagagtgaacttgaacgactgatgagacat

SEQ ID NO: 44338 - DNA, 653 bp, Zea mays
  Clone ID: MRT4577_140441C.1
cctgccgggatggcacttgttgaccccgtacccggaggaggaggaggaggcggaggcggaggcggaggcggaggcctcgttttctttaaaaatccccgctcgctaaatcccctcccaccgacgcctgtcgccactgccacgcattcctgctctcctctcctcttctccctcgtcagtgcggcgtggcgcggcgcggcgttcggtgagaaccactcggggatggggatctactgctagactgagaggagctacggtcagtatcctctgccttcgtcggcggcggaagtggaggggaagaagcgatggaggcgagcgccgggctggtggccagctcccacaaccgcaacgagctcgttgtcatccgccgcgacggcgatcccggggtacgcgcgcgcttcaatttttccggctggcttgcgagaggagcgagcgttacggtgctgttttttccctttctacctttgctgcctgttgcgtgcgcgctcgcgtgcgtgcagccgaagccgctgcgggagcagaacgggcaggtgtgccagatttgcggcgacgacgtcggccttgcccccggcggggaccccttcgtggcgtgcaacgagtgcgccttccccgtctgccgggactgttacgaatacgagcgccgggagggcacgcag

SEQ ID NO: 44339 - DNA, 933 bp, Zea mays
  Clone ID: MRT4577_140442C.1
tggagctccatggagagaaagggcattgccagggatgttctgtcctatgtgagcatgctctgctgcttctcaaaggccgggagcctcgactcagtcatgaaactcttcaaccgcatgaacgaggctggcgttgctccagatcggaaagtgtacaatgctattgtgttcgccctggccaagggacggtgcgtgaaggaggcgaagatgcttgtcaggagtatggaggagaagcaggttgccccagacacggccacttttaactctctcatcggccctctgtgcaaggctcgtcagtttcaggaggcaatggaaatgttcgatgctatgttacagagaaagctgtctccttcagtaaggactttccatgcactgcttaatgtggctaggaactccaccgaagtttttgatctcttggataagatgaaacagttgcgatgtgagccagagatggacacttacatcatgttgatcagaaagttctgccggtggagagagcacgagagtgtggaaaagctgtggagtgcaatgcctgcaaatggcctgagccctgaccggagcgcgtacattgtattgatacatggtttattcctaaacggaagactagaggaggcagcaaggtattatgaagagatgaaaagtaagggctttttaccagagaaaaagactgaagaaatggtaatggcttggcttgaaggcaaagagcttgccaaggcatcagttattagctccaagggtggtcgtggtccagtgtctctcaaacttcccaagaagtgacaagtttaaggtttagggtacgataaagttcaagaatgaaatgaaacgaaacgatatatgacggcgcttattgttattcctgtagaactgctaaagttcaagagatattttgctacacagaaaacgggggttatccctaaacctaatcttttggttgtc

SEQ ID NO: 44340 - DNA, 3172 bp, Zea mays
  Clone ID: MRT4577_140443C.1
gcaccagacggggaatgatggtggtggtgatgatggtgacgatgctgatctacgactagatggatgaagcaagacaacagactgtccaggaaaattccacttccatcaagccagattaatccatataggatgattatcattattcggcttgtggttttggggttcttcttccactaccgagtgatgcatccggtgaatgatgcatttgctttgtggctcatatctgttatctgtgaaatctggtttgccatgtcttggattcttgatcaattcccaaagtggttccctatagagagagagacttacctagaccggctgtcactgaggttcgataaggaaggccagccgtctcaacttgccccaatcgatttctttgtcagtacagttgaccccttaaaggaacctcctttggtcacagcaaatactgttctatctatcctttcagtggattatccagttgataaggtttcttgctatgtttctgatgatggtgctgcaatgctaacatttgaagcattatctgaaacatctgaatttgcaaagaaatgggctccattctgcaaaaggtacaatattgaacctcgtgctccagagtggtacttccaacagaagatagactacttgaaagacaaggtggcagcaaactttgttagggagaggagagcaatgaagagagagtacgaggaattcaaggtcagaatcaatgccttggttgctaaagcccagaaagttcctgaagaaggatggacaatgcaagatggaaccccctggcctggaaacaatgttcgtgatcatcctggaatgattcaggtcttccttggccaaagtggaggtcttgactgtgagggaaatgagctgccgcggttggtttatgtttcaagagagaaacgaccaggctataaccatcataagaaagctggtgctatgaatgcattggtccgagtctctgctgtaatatcaaatgctccttatttgttaacttgggattgtgatcactacatcaacaacagcaaagctataaaggaagcgatgtgttttatgatggacccactactagggaagaaagtttgctatgtacagttccctcaaagatttgatgggattgatcgccatgaccgatatgctaacaggaatgttgtctttttcgatatcaacatgaaaggtttggatggtattcagggtccgatttatgttggtacgggatgtgtgtttagaaggcaggcattatatggttatgatgcccccaaaacaaagaagccaccatcaaggacttgcaactgctggcccaagtggtgtttttgctgttgctgctgtggtaataggaaacacaagaagaagactacgaaacccaaaacagagaagaaaaagttattatttttcaagaaagaagaaaatcaatcccctgcatatgctcttggtgaaattgatgaagctgctccaggagctgagaatgaaaaagctggtattgtaaatcaacaaaaattagaaaagaaatttggtcagtcttctgtctttgcaacatccacacttctcgaaaatggtggaaccttgaagagtgcaagtcctgcttctcttctgaaagaagctatacatgtcattagttgtggttatgaagacaagactgattggggaaaagagattggctggatctatggatcagttacagaggatattctaactggtttcaagatgcattgtcatggttggcggtcaatttactgcatacctaaacggcctgcattcaaaggttctgcacctctgaatctttcagatcgtcttcaccaggtgcttcggtgggctcttgggtctattgagatcttcttcagcaatcattgccctctttggtatgggtatggtggtggtctgaaatttttggaaagattttcctacatcaactccatcgtgtatccttggacatctatccccctcttggcttactgtacattgcctgccatctgtttattgacggggaaatttatcactccagagctgaacaatgttgccagcctgtggttcatgtcactttttatctgcatttttgctacaagcatcctagaaatgagatggagtggtgttgggattgatgattggtggaggaatgagcagttctgggtcattggaggtgtgtcctcgcacctcttcgctgtgtttcagggacttctcaaggtcatagctggtgttgatacaagcttcactgtgacatcaaagggtggagatgatgacgaattctcagagctgtacacatttaaatggactaccttattgatacctcctaccactttgctcctattgaacttcattggtgtggtcgctggtgtttccaatgcaatcaataatggatacgagtcatggggccccctcttcgggaagctcttctttgcattttgggtgattgtccatctgtatcccttcctcaaaggtttggttgggaggcaaaacaggacaccgacaattgtcatcgtctggtccatcctgctggcttcaatcttctcactcctttgggttcggattgaccctttccttgcaaaggatgatggtccacttcttgaggagtgtggtttggattgcaactaggggatgtcagcacatcagctcccccaatcagcgtatgattgaagtatttttgccggcatttgtccccatatttacagtgccccctctgtaggtaagagacaagaaatgtctcccgttccttttgatccatggtgaacctcgacctaatatctgggatacactggagggaaaatggaggctgcggcaatccttgtgcagatgggccgtggaatacagcatatgcaagtgtttgattgtgcagcattctttattacttgggcgcaaaactgatcgtctgagccgagcagagcagcaaggtattttgatcctgcactgctcccgtgtacaaacttggttctcaataaggcaggcaggaatgtgcatctgccagtggaacagaggaacctgcacagtatttatgtgcaaacttcattacatgttcgtctatactaggaaaaacagaatatttgtaccaatctatacttgattaaagtatgtaaaggagtccctttttttttcttgtgtactgtaatcgtcggagtaggttttgtgagattttcgtagaaaggttgaatgtgatataatatattttatgggcccaaaaaaaaaaagggaaaaa

SEQ ID NO: 44341 - DNA, 479 bp, Zea mays
  unsure (1)..(479): unsure at all n locations
  Clone ID: MRT4577_140444C.1
agcagtggtaacaacgcagagtacttttttttttttttttttttttttttttgtatctcacattcattctttctacgaaaatttcacaaaaccaactcagatgattacagtacacaacaaaaaacaggcgcatttacatactttaattaactatagattaatgctaatattcggggtttttctagtatagacgaacatgtaatgaacaagccctccaatgaacaggcatacataaataatgtgcaggttgctctgttccactggcagatgcattcctgcctgccttattgagaaccaagtttgtacacgggagcagtgcagaatcaaaataccttgctgttcggctcagcccatctatattgcgaccaagtaataaagaatgctgcacaatcaaacacttgcatatgctgtattccacggcccaactgcacaaggattgccgnagcctccattttcccccagtatatctctcagatttt

SEQ ID NO: 44342 - DNA, 450 bp, Zea mays
  Clone ID: MRT4577_140445C.1
gatcctgtatagcgggcgcgatccacgcgttcgctccagcatgaccccttcgagggacctatgaagctgaggcggccgattttggcactgtcttggtaatcatcgtgggggagcagatcctgttggtggctgccaggaagggcacacagggacacattcgaccagaatgttctactgatcacataggtagaggtgctaagcaaagggagcgagaagacacactacattgctgggctgaatgaaggctcgaagatagaggggaatcacgtgagggaaatacgcaagagcatcatccaccagttcaacgccctcataaagagcaaacaacaagatggagcaccggaaacagtctcccgtgaacacacacaactccaccgaggatgagaagctgggcctcaacgaacacatgcaacacgataaggtctacaacatgctccacggtagctgggg

SEQ ID NO: 44343 - DNA, 403 bp, Zea mays
  Clone ID: MRT4577_140446C.1
gggggggggaaaaaaaaaacccccggttggccccatcaaaaagggttacatggggtacaaaacccctcacgaaacccccttgcttggtgggggggggaatttaccaccacgggggttaaaaggggctggaaccaaaagcgtaaagggctttgttttgggtggtccaacggggcggggtgaaaacgggcctaaaaacctggggggcgaaccccctcccgtgaaacatcctgatttcgggcgggttcgcaaaattaaaaaatttgtttttgcccgggtgaaccccctttgtaaaaacgacgtgggggaaacttttaaacccccgcaaaaactgggtaaatcgggggcccctgggtgcggaagggcgaaaacaggggggaggagttttaaacaaacgggaaatttt

SEQ ID NO: 44344 - DNA, 376 bp, Zea mays
  Clone ID: MRT4577_140447C.1
agaaagcacaatagtgtaccaacaatggcagccaaaatattttgcctccttatgctcgttggtatttctgcaagggctgctacggcgaccattttcccgcattgctcacaagctcctatagcttcccttcttcccccgtacctctcaccagcggtgtcttcggtatgtgaaacccaattttttaacccctacggtgcccaacgggtattcgcaggtgtcttatcactattacccccgttgctcctacaatcatcatccccattatagcagttacccctggtgcacatattgtcgcaaaaaatcatggcgcaacaactactacaacttgtgctagcaaaccatgctgcctactcttatcaacaaccagtttttttca

SEQ ID NO: 44345 - DNA, 504 bp, Zea mays
  Clone ID: MRT4577_140448C.1
gccggccgggccgggacgccggcacttccctcccgacctcactctcccaaaatcggagcgccgtcggctgctctccgtcgccgtcgttgcgagctccccatctatcctccgttagccatggggactcagatcagtaagaagaagaagttcggtagctgacggcgtgttctacgccgagctgaatgggatgctgacgctggagctcgcggaggacgtgtactccggcgagcatgtgcgcgcctcgaccgatgcgctcgtggatcatgcatccgcgacaaggcgtacgctataacgtgctcgtagagaagggacgcatgatcagggagctcacgtatgagggccataagaggttccacttccccgagagcggcgacaagctctacgcctagaagggcgtcaagcgcgcccgctgcgacatcgcgcaaggtgaggccctccgttacgagctccgcggagtgcttgccgcccgaagggcctgctatgccgtgcatcgctctgatgtgc

SEQ ID NO: 44346 - DNA, 500 bp, Zea mays
  Clone ID: MRT4577_140449C.1
accagtggaaagaacaactttactagctaaatgaattaatatttaggttgataactctttctgcactattaaattgagaacttcgaactagggtataatacccccaaaaaactgtgcgcaggggggtttttatttggataaagtcatttttggcgaagtataggcaaatattttggcaaaacatttgagaagtgtaggtagtgcttggtattgacatcagacttaaatgctatttattaactgttacaatgctaggaccatcttcaagagtctaaaattcactctctaaatcatcatcatcatttgacttaaatgctatttaactgttacaatgctaggaccatcttcaagagtctaaaattcactctctaaatcatcatcatcatttgaagatgaggagatttttttgacaatagcctgaaattcgctcccacggggagtcgaacccaagacctgaagagagctacccagaccatctaaccaactcggctagaaatcct

SEQ ID NO: 44347 - DNA, 1531 bp, Zea mays
  Clone ID: MRT4577_14044C.1
cggccgcgccttttttttttttttttttttttttcccagaaacgagtccaaaataattactgcataagttctcagttcggttgtactaatacatagcataataatgtagcatgtcttcttttcaaaactatgtacctttggaatcatcgacagcacaagcaaaacatcctatatgatgccatagtcccagaaacgagtccaaaaataattgttgcataagttctcagttcggatggcataacataataatgtagcatgaatcacagatgagatcacacacccgcgtatcagatgatacggaggtaaccggatcagattctgctgactccaaattatattagactaacgacacccaacataaattatgatccccaacacgattcgagaaccaagaggtcaagaaatgcactctgtgtgcgcttcagtgacgactgacgagggggcgctgctagccagtgcgaattagagcagcccagaacaatcagatcagcgcgatgctgctctcaccgccagggggcttccggatgccgccaaggtattctcggggagctggcgttccatcggcgaagatgtcactgccgctcatctccttaagcttcgcagagctcagagacttctcggccgaggcagggacgtcctccttgaagatgttgttacctgtcagctcctggaacttctggttgtggattttctttgctgtcttcactacaggctcttcgctgaaagagatgttgcttggacctccggcaggattagatactttaactgatgtgtggacgcttcgctgtggaagtgaaaaatcgacatttccttgtagctccatgttacgagcagccaatggcctcgctggaatctcaggaggcggaccaaagatgtcactcccactaagctccttggtcttggcttcagaaagctgcttattgattttagcatcagcatcttccagggtaccactaagctctcgctgcttagccacctcaggtatcgacgacggcttctttggtgaaacacttccatcagcgctaaatgaaatctggcttattccagtcacagtttgctggtacatcctcaaggaagtcttgttatcaggatttgaagcctctgagtcaccattttcactcttctcagcgaaaatcccactcccactcatctctttcaacttcgatccggagcaaaatttcctttcactcttgctcagatcctcggcctcctgctcggtgaccggcgcgccgaacatcgcaggcgtaatcccggcggccggcttgaggctggggcgggaggacgcggccggcgaggcagatgcgtcaggggccgtggccgaccaggagagaaggtcggccgtgctggtgtgcggcttccgaaccggcaccgccctctccattgccctgagtgagaggcagcagctacgactacgagacgttgagatcggggatgctttcgctcggccactaccgcctgcctgctcagctcggcacgcttcccctcgcgatttcttcgcgagcgaaatggcaggatcccggccggcctcgag

SEQ ID NO: 44348 - DNA, 771 bp, Zea mays
  Clone ID: MRT4577_140450C.1
atccaaagatgactattttcagcatagtcacggacaaattgtaaacatggaacgcataacacggacgttctacgtagacgttacgttcgtgtaacgcagcaggcaaggcaagttcaaagtctcccacggggtggtggcggcgctgctgagccgaccgcggcgtggcaggtcagtgtcagtgtcatctctatctccgacgcgaaacgatccatggctggacgtggcagcacgattggcacggccacggcttccttcccgtcgctgccgctaacgggaacaaggaagcttgccccaaacacggtggtcacgacgccgccgaacacgggcacgccccaccccaagtcaacacgatggaacccggcgtgccggttgtccgacacggcgaagacgttagccatcgtcgccagcgctggcgggcacccgcggcgccgggcaaggaggtccaccgccgaccgcacgtactcggcagtcaccgccgccttcgcctcccgcaccagctccaccgcgttgcccagccccagcgcccccgcggtggcccgagcaaccgggtacgcgaccgcgttgccgtagtagccgtcggggatccccaggccacgcacgcccctgcagttggcgacgaccacgaggctcacctcctcgccaggcgcgagctccagcgccgccgtgcgtgcacgccagatggccgccgtgagggcctcgtagctcgtggccgtgtcccggaggcgcggcgggaggcgcttcttgatcgccgcgacgtcgcgcgggccgaag

SEQ ID NO: 44349 - DNA, 871 bp, Zea mays
  Clone ID: MRT4577_140451C.1
gggtacctcgaggccggccggggacttccgctttccggcagggcccagcccgactagggttctgtccaccttccaggtccttcgaacttccacgcattcctactactcctggctcccgcgacctgacgccgccactcctgacttcgccatccggcgatcaccagagccctagctccggcgtctctagcgatccccaaaacccactccgccgcatttctgccgacttggccggattggtcgcttattgagatggctacgccacttatagcaggacttgcagttgcagcaactgctcttgctggtcgatatggcgtccaagcttggcaagcttataaggcaaggcctatagttccaaggatgcgcaaattctatgaaggtggctttcaacctacaatgaaccgaagggaagctgcattaatccttggtgtcagggaaactgccaacgcagagaaggtaaaagaggcgcacaagagggttatggtcgccaaccatccagatgctggtggaagtcattaccttgcgtcaaagattaatgaggcgaaggatgtgttgtcagggaaaacaaaaggaggtgggtcggccttctgattgtagaattaagaatgcactctctgctagaaggataattttgtgcctctaaatttagcattagaagatactgtagaccgcagtttagtcttggtattgcgaaaatttctggacaaagcatattgggccttctgtgaagtagttatccagtgcttattatttattaatactctcagctgtgcctgcttctataaagatatacatgatgaaggttacatcacaacatgtttcttcacaacaaaaaaaaaagtcgtgacgtaaaaaaaaaaaaaaaaaagcggcc

SEQ ID NO: 44350 - DNA, 538 bp, Zea mays
  Clone ID: MRT4577_140452C.1
aaaaaaaaaaaaaaaaaaaaaaaaaaaaaaaaaaaaaaaattctcggaacgctgtaggggactaggggttgcggattgggagcaaaggaggagagggagtgctgggccgccgccggctgcgaacgcggagggggcagcttccaccaatcagtgcaccctcatcctcaaaggctgttctggtttgttacagttccaacagcatggaaaaagtctacgccatcaaaactcctcataagaaaagaaaatcacagggggagctgagtaatccaaagttgccgccacttaaatgcaagtttcgcaaaaggttatcttgccacagggttgagtctgcaaccacagaaagtttgggatacgattgcattttcatgaacaagacctctgtgacggacatggtcagcacacccgaagtattggactcctgtgagagcactataagactatttggggggtgcatcgaactagtggactcaaaaactggaattcaggaacagtctttgagaaaaacaattgagatccggacatctgcatcgagtcgctc

SEQ ID NO: 44351 - DNA, 349 bp, Zea mays
  Clone ID: MRT4577_140453C.1
ctgtgttattgtaaggcgaggcggccgctcgaagcgttgagggggctggtgaagctgcacgcgctggtccggagcaacattgtgcggcggcaggcggcggagacgctgtgatgcatgcacgcgctcgtccgggtccaggcgcgcgcgcgcgcgtgtcttgcaattcgctcgaagcatgacgtggattatacggatccgacatacgccggaacaatacgatcaggcgggtgctccaagcacgcccgtacggatcttgaagaaaactctacacaagactcctagcggagagaggctgtgttggagaggatagaatcttgcattaggaactggctctaccgctaggtgaagg

SEQ ID NO: 44352 - DNA, 222 bp, Zea mays
  Clone ID: MRT4577_140454C.1
tttttttttttttttttttttgaaccccaaccaatcaccaatgccattagaattgggacaaattagcaggttacatcttatctgtcccaccgtcaccggtggcgagcgaaagttagtaccagtacacacaaacacccaccagctcatgaattggcatagaacttactgatcatcgtccgaaccacaagagggatcctcacggggtgcacgccatcttcccat

SEQ ID NO: 44353 - DNA, 399 bp, Zea mays
  Clone ID: MRT4577_140455C.1
gaatacaggagcaacagtggagcaacaaaggcgaacaagatattgagcatgcttatgctccttgcactttctggatgtgttgctaaggcgaacatttttcctcaatactcacaagctagtatagatgactttattaccccataccttccatacaatgaccgcttgagtgtgtgaaaacctttttttttttccgtacaggctgcaacaagcaatcgcaacaagcaacatacctttataacccttggtgttagaacaatcgccagacctatctttggtgcagtaattgtaacaaaccataagggcacagcagatgcagtaactagagctaactgagatcaaccaagtagctctggcacaaccttagtgcctactctgaggaacgacaatgggtagcataga

SEQ ID NO: 44354 - DNA, 399 bp, Zea mays
  Clone ID: MRT4577_140456C.1
caaagctgcaattggggctgctaagggtctatcatgggggcatgatgctgagtaccaggtcatatatcgagatttcaaggcatcaaacattctccttgactcggagttcaatgcaaagctttcagactttggcttggcaaaagcaggtccaactggggacaggacccatgtttctacacaggtcatgggcacaagaggttatgcagctccagaatatgttgcaacaggttaaaaactatctagattttgagtggacgtcatgaaaaattgtgaaatgataaaaacatgccgaactttaggatgtgtttgctctctttaggtagtgtttggttccagagccagctgggatggagcggctctgagccaaggagcgtctgcatccggaagattttagggagc

SEQ ID NO: 44355 - DNA, 1062 bp, Zea mays
  unsure (1)..(1062): unsure at all n locations
  Clone ID: MRT4577_140457C.1
attaggtattcgagacactgcacttatgcaaaacaaaatgttgaaatcctgaagaaaccctaaatcacaacaaaatttgaaaccccaggtccagtttcattttcatgtcaccactatgcatgatgcattaccactggctctaactgcagactggataaagataaggccacaagtcttagccatgtgagacaattgaagaaatgaagtatgatcagaaactttgaaaaagtaactgttttttttaaaagaaagtaaacattaccaggcaatttctacatcgtatgatattgaaggctttgagcagctgaatctcccgctgtagtcgatatgagactccatcaatctgcgaaagggcctctagctgagttggttaggtggtctgagtagcactcctcaggtcctgggtttgactccccgtgggaacgaatttcaggctgtggttaaaaaaatcccctcgtctattcccacgccaaagcacaggtctaaggctcagccccggtcgtggtcgttctcacatgggcttcgatgccgctgtgtatgggtggggcaggggttcgggggttttctcgacctgcgtgagaaggtcttcttcttaacacaatgcccgggggctgtcttaccccccgcaggtcgagtttttttagagtctcttgccacaactatgactgtctttcattaactagcactatatcgtcctaaaaaagcatacaccaaggatatcccattgtatgtctcttctgacctcatctatcaccaatacaacggtcagtgctcaaagttggcccctgatatagtcctattttaatcgataagtcctatgtgtcctcatcacttgttcgatcactagtcacaacattgtcgtacatgttcttaacgagtccaacatacttcgatgaaactttatgtttgtccaaagtccaccacataatgttgcttagtattttgttgtaagccttctccaagtcaatgaaaacaatctttaggnctgtcttctgctttctatgctgctccatcacttgctttattaagaaaaatggatccatggttgaccctgggggcatg

SEQ ID NO: 44356 - DNA, 226 bp, Zea mays
  Clone ID: MRT4577_140458C.1
gacagagtgtaacatcccatcttaagactttggatgattgaaagttattggaatataaaattcaaactgtgcacaacttaggaccaaaatggcctggacgggccaaggggggctatccttcaaaaaaagaacagctcattcacaccacactgacgaggaaaaagccctgacattgaacagacttatagcttaacgaagatgcaaactccttaacagcagaatatgg

SEQ ID NO: 44357 - DNA, 172 bp, Zea mays
  Clone ID: MRT4577_140459C.1
actttctgccggcggcgcgtcggccgcggagtcacgcgtgggcgtgcggaggcgcgcgccatggggctggacgtacacgcctggaggtacagatcagcacgtgtccccatgccgacaggctaagagtgaacagatgctgagacagagaaagcgagcaaaaaggattttttat

SEQ ID NO: 44358 - DNA, 481 bp, Zea mays
  unsure (1)..(481): unsure at all n locations
  Clone ID: MRT4577_14045C.1
gggggaaatattcaccaaatgtttgcgtttgtagtccccccatccccaggtttccttgtttttttttacggggggctgtttcagggacaaactttttaaggggggaaaattgttccagtaaaaaaaaaaacttctttgtttgacgaatttttttaccctgctgggcatgatacctatgctcaacacaatttacaagggcatgctcggaacgggggcattnctcaactcatccataattccctttgcttcaaaaagggttttcccgaggaacattacaacccggcaatttaattttcggggtgtagagggggatactttttgggctgggcgaagacacatttgttttcttgaaggggtttttttccagggggcaagttgttcatcccaaaagagtttgtcactaccaactggaagccccctgtgtacataccccctttaataaaaaattttttcccccgttgggaaaacattcctttccaaa

SEQ ID NO: 44359 - DNA, 523 bp, Zea mays
  Clone ID: MRT4577_140460C.1
gtaccgggcccccttctcgagtttttttttttttttttttttttttttttttttttttttttttttttttttttttttttaaaaagttcaaatataacccctcttatatatatatatataatacacccgaatttacgggcaaaaaagcatgccccctgacaatatttttctcctactagttcagggggatccactccacggtttggttacaagcggaaaacctgacttgatatgcacggttatcccgctcatttgggtcatgtccagggaaaacgtcccttcccggttttggccccggttcacctcccagtcaaaatgatacagaaagctcgccagggccatttgggggtttccctccgggaacgcgatcccagggcacatcctcctgccggggccaaacggaaggagcttcaaagtgctgccccttgaaaccaacgttggttggggcgcccccccccaaaaacctttccggaacgaattcctcggggcgctcccacgtggggtgggtcccggccaattgccc

SEQ ID NO: 44360 - DNA, 593 bp, Zea mays
  Clone ID: MRT4577_140461C.1
ctttcccatccccaggatcggcggcggcggcggccccctcgttcccactctcactctcccagcatccgggctccagagcggagagacggtagagcgagcgagagatgggggagacgaggagctggagctctctgctggtgcacattctggtgatcgccctctgcctcaccgccttcggcttcgccatcgccgccgagcgccgccgcagcacgggttcgatagtcacagacatcaacaactccacatattgcacttatgactccgatatttccaccggctatggtgtcggcgccttcctatttctcctctcgggccaatcactccttatgggagttacaaagtgcatgtgctttgggcaaccgctggcacccggtggaagcagagcctggtccattatctactttgtatcttcatggatcacattcataatcgccgagtcctgcctgatcgccggagcgacaaagaacgtgtacttctacatgtactacacgaaatcgacgcgccaggccgccaaaaagaccaacaaggccaccgccaatgtcggcatggctggctacgcatgacgagggagaaggactctggtttgatggaac

SEQ ID NO: 44361 - DNA, 172 bp, Zea mays
  Clone ID: MRT4577_140462C.1
ttgtaaaggcacaagcagaagcccaccgaaccatatactcagaggcgatatacagacctaggccgcaccgcaccagagcaaagatcaacggcacggaccggtgcggctgacagggagggaggcagaacaccgggcaaacaggaaaagccgatgggagccaaggcccaacgaa

SEQ ID NO: 44362 - DNA, 733 bp, Zea mays
  Clone ID: MRT4577_140463C.1
cccatccccaggcggcggcggccccctcgttcccctctcctctcacagcatccgggctccagagcggggagacgctagagcgaacgggagatgggggagacgaggagctggagctctctgctggtgcacattctggcgatcgccctctgcctcaccgccttcggcttcgccatcgccgcagagcgccgccgcagcacgggttcgatagtcacagacatcaacaactccacatattgcacttatgactccgatatttctaccggctatggtgtcggcgccttcctgtttctcctctcgggccaatcactccttatgggagttacaaagtgcatgtgctttggccaaccgctcgcacctggtggaagcagagcctggtccattatctactttgtttcttcatggatcacattcataatcgccgagtcctgcctgatcgccggggcgacaaagaacgcgtaccacaccaagtacaggcacatgatatacgcagggagctggacctgcgactcgctccggaaaggggtgttcatctcgggggcggtctttgtggtgctcaccatgaccctgaacgtgtacttctacacgtactacacgaaatcgacgcgccaggccgccaaaaagaccaacaaggccaccgccaatgtcggcatggctggctacgcatgacgagggagaagggactctggtttgatggaacttgcttgtgtgctggatttagttagaattctggagc

SEQ ID NO: 44363 - DNA, 348 bp, Zea mays
  Clone ID: MRT4577_140464C.1
gttttatgtcattaccttcgctttgaaacggggcataaaccaaatacttttattgaaaagtacatacatgtcagacatattttgtttttctttattgtcttatgcaattctttagtttcgtattcatttatacatgcgtatggatatctgaccgccatattcggtttcggtataacttggcttttgggggtgtatatttggctttggaaatcaacttttaatctcactcacatgcactttccagaagaaattcgtccaaagtatgacaaaacaaatgataatgctgaagattttaatgaacttttgacatataaatctttattaaaaaaagatagcaaaaattaagtt

SEQ ID NO: 44364 - DNA, 107 bp, Zea mays
  Clone ID: MRT4577_140465C.1
ggccgggccgggatttcagccaccatcgatctgcaagtctcgttacctagcagtgcaatgaaaaaagcaggcgcaatggggagaagcaccatggtcgctctcctcca

SEQ ID NO: 44365 - DNA, 501 bp, Zea mays
  unsure (1)..(501): unsure at all n locations
  Clone ID: MRT4577_140466C.1
cggnaattcccgggnaaaaaaaaaaaaaaaaaaaaaataaaaaaaaaaaaaaaaaaaaaaaaaaaaaaaaaaaaaaaaaaaaaaaaaaaaaaaaaaaaaaaaaaaaaaaataaaaaaaaaaaaaaaggggcgggcggttttaaaggacccaagtttacttccccgggcgggcaacaaattattttttttatagggcccccaaaattaaattaacgggccgaggtttaacaacgccgagcttggaaaaccccgggggttccccaatttaaccgcttggcggaaaatccccttttccccagtgggggaaataacaaaaaggcccgccccaatggcctttccaaaaaatggcccctcttgaggggcaaagggacccccccctgaaggggccctttaagcggggggggggggggggttccccccagggggcccgttcctttgccagggccctagcccccgctcctttggttttttgcctttctttttaggcccggttggcgggtt

SEQ ID NO: 44366 - DNA, 429 bp, Zea mays
  Clone ID: MRT4577_140467C.1
cccagtcgaagccgaggcggtggaccctgtgctgccccgcgcaccagatgggcagctgcagaatgggcgccacggcccgggacggcgccgtggacgcgcgcggcgagagctgggaggccgggagcctgtacgtgtgcgacggcagcgtcctgcccggcgccgtgggcgtcaaccctatggtcaccatccagtccgtggcctactgcctcgccacgggcatcgccgactcgctcaggcgcggcccggtttcacgaaaggattgagattctatttggatatgcacgtatatatccacatcaatttatttcaattttacgtgtgttaaagtggatttcacgaaaggaattgctgcagaataggtctgcagcggttcactgttcgtgtgctggagaataataagaaatggaagtgagacagatctatcttttc

SEQ ID NO: 44367 - DNA, 138 bp, Zea mays
  Clone ID: MRT4577_140468C.1
gcgcccacgcgtgcgcggacgcgtgggaaatgattcattttacccagtcgtcagagaggccgcgactatataggagacccactaaggcaataatgaacccacgggcggcgtagacgtggcattacatgaacatgggtt

SEQ ID NO: 44368 - DNA, 350 bp, Zea mays
  Clone ID: MRT4577_140469C.1
cttgctctccctccaacaagcataattaaggcgcggtgcatgcccttcttcctagcctcgtcttcatgtataccatggtcgcgagggacaagcaccaccaccaccacctgttccaccacaagaaggacgaggagcagctcgccgccggcgggtacggctagtccgcctagtacacggaggccactgtgacgggggtggggtccacgggcgagaacgagtccgactagtacaacaaggaggagaaggagcacaagcacaagcagcacctcggggaggccagcgccatcgtcgacggcgccttctcactctacgagaagcacgaggcgaagaaggacccggagcacgcgcac

SEQ ID NO: 44369 - DNA, 321 bp, Zea mays
  unsure (1)..(321): unsure at all n locations
  Clone ID: MRT4577_14046C.1
aagaaccccatatccccaggggggaaagggggggaaaaaaaaacccgtggaggggctgagcattaagggagagaaagataagaaacccaccagagacgtggggaggtagggaaaggaccaaaaaaaaaagggaacaaaaaaggaaccgatccaaagaaggacaaccgaaagcatttgaaggccgaaccgaaggacggctcagaagaagcaaaaaacactgcagatgtggtcaatgagcggtctatggagataacgcgcacactggaaaatcaccccataaacgcaaagcgcgcagntgaggggaagaacaagcaaatgccg

SEQ ID NO: 44370 - DNA, 541 bp, Zea mays
  Clone ID: MRT4577_140470C.1
ctcttgttctattccccttcccttctcttcggcggcggcttgagaccgagcgagcgagctagggtttggcgcggcggcggaaggaaggaagggagtcgggaagatgagccgcagccttgggatcccggtgaagctgctgcacgaggcggcggggcacgtggtgacggtggagctcaagaccggcgaggtctaccggggctccatgatcgagtgcgaggacaaccggaactgccagatcgagaacatcaccttcaccgccaaggacggcaaggtgtcgcagctggagcacgtcttcatcaggggcagcagggtcaggttcatgatcatccccgacatgctcaagaacgcacccatgttcaagcgcctcgaggccaggataaggggcaaggggtcggccatcggcgtcgggcgtggccgtgctgtcgcgatgcgtgcccgggctgctggtggtcgtggtggtggcccccctgttggaggaggacgaggtggcgcgcctccggtgaggaggtagatgatgtgaggtgagccgctgcctggtcga

SEQ ID NO: 44371 - DNA, 408 bp, Zea mays
  Clone ID: MRT4577_140471C.1
agcaaggacattcggctcgagcgacattcccaaaaaattcattgcacacaaagccctcagacacacgggtggggtcatatgaaccacgccgggggttaacaacccacccgcacacagacaagacatccaaagcacggaaatgcaaaaactaaaaccaccacaacacaggccacacctcgaaacagagggacaaatacaaaatggggcagggccaaaccaaacaaacgtacaccaacacaaacatacaaacccacggactgaaaaaggacgaacccgggcaagccgacatcccataaaataagaaacgctgctacgccgaccaagactgatcaacgaaccacacggaagagggcccatgaagccccaacagcagacgaagaaacaccacctaaacaaactcagccattc

SEQ ID NO: 44372 - DNA, 272 bp, Zea mays
  Clone ID: MRT4577_140472C.1
ggtcacatgatggaacaccaccagcctcccaccataccacgcaaggaaggcccaaatggcgaaagaaaggccggtgaaccccacagcgagacccttggcgatgccctgcttgatccccagcttgatcgtcttgtcgaggatcgccgtgtacctctggatgatcctcttctcggccgtgaaggagtagacggtcttgatggagcccagagcctggtcgaccagggagttcgccttggcgtactcgtggcgcgaccggcgggacaggtagagga

SEQ ID NO: 44373 - DNA, 377 bp, Zea mays
  Clone ID: MRT4577_140473C.1
acatcaaggccatcgacaagcttcctcttctgcctggtgtccttgagattgttggaattgggtatacagggaggctctgatcggcaaaatcaagagcacttacaaagaaatcaccgggagcagcaactgatcgaacatcatttacaagatgggttcttaagcatatggtagaattgcatccgtaagcactgaagctgccatgcaagtgaaagtgcttctggtcccgacctcagtcagagaaaaaaaactctgcagttgagcaagccgttttactttgtttcagtgtaatatttatgacgtattcccagttctttttcaaaaaaaaaaaaaaaaaaaaaaaaaacaaaaaaaataaaaaaaaggggggacacactaaa

SEQ ID NO: 44374 - DNA, 214 bp, Zea mays
  Clone ID: MRT4577_140474C.1
ttctatggtgaaggtatgggtatgctgtctctcactcccccgtctctctctctcttctctctgcctctctttctcgtacccgcgtccacctcgcagcatttagtaagtgcgaccaaatggcgcctctaggagacggcggtgctgctgccgcggcgttgtccaacaacctaggtgatgtcgttcggcgagatgctgatcgacttcgttcccgacg

SEQ ID NO: 44375 - DNA, 267 bp, Zea mays
  Clone ID: MRT4577_140475C.1
ccagctcgcacatgccgtgacttgagactcagccacccagagtggagcagtggttactactggattgaccctaaccaaggatgcactatggatgctatcaaagtatactgtgattccactactggcgaaacctgtatccgggcccaacctgaaaacatcccagccaagaactggtataggagctccaaggacaagaaacacgtctggctaggagaaactatcaatgctggcagccagtttgaatataatgtagaaggagtgacttcc

SEQ ID NO: 44376 - DNA, 1025 bp, Zea mays
  Clone ID: MRT4577_140476C.1
ccggccgggaccacccctgcgctccaccacatcgcagctccccccgcagcctcggggcggtcggggtccgcttcgatgtcgcacgcccgcgcctccccgctgtggcgctgtcccctccctggcacccaccctcacaaagcatcagcctctccaatcagacgcgagccacccaccgcgcgacctcagggtgcctgtgcctgctcccgctgttccttcctcatggccaccgcctgccacctcgccgcgccgctcggcctcgccccgttgccccgcggctgcgcctctgctggcgtcgtggccgtcgtccggtgcgctcggtcgtcaggctccaagatcccgagaggcgttgctgtcagggcgacgtccggcggcgagggcgccacggaggaggtgccggagattgtgaaggctgcgcaggacgcgtgggacaaagttgaggacaagtacgccgtggccaccatcggtgtcgctgccatcgtcgcgctctggacggtagtaggtgccatcaaggccatcgacaagcttcctcttctgcctggtgtccttgagattgttggaattgggtatacagggtggttcacataccgtaacctcgtcttccagccagacagggaggctctgatcggcaaaatcaagagcacttacaaagaaatcaccgggagcagcaactgatcgaacatcatttacaagatgggttcttaagcatatggtagaattgcatccgtaagcactgaagctgccatgcaagtgaaagtgcttctggtcccgacctcagtcagagaaaaaaaaactctgcagttgagcaagccgttttactttgtttcagtgtaatatttatgacgtattcccagttctttttccggactactgtttactacgaaaatcccgatctgtgtaaaaatgtgctgcaacaaattcaaaagaaaacacaaatagtacaacctcatgattttcgtaaaaaaaaaaagtaaaccccaaaaaaaaaaaaagtactgcccttcataatcaggaagggttgatcaagt

SEQ ID NO: 44377 - DNA, 583 bp, Zea mays
  Clone ID: MRT4577_140477C.1
attctcacttcgtctctcgtttcagccgacgccgccgtcggcctcccatgtccagaagacgccccagtacatttctctcaccagctcagtcgtgagagcggtcggaccagcgacggcacacccagagaactgccaagcccattaactctccatgatggcgatcagcaccaactctcgctgcacgaatacctccatgcgttcccgatgcaccaggagagggacctgcctcacgccgcggtccgccatccccggaaagggcgccacccggaccctcgacacgatagggagagcctcacaagctccatcattgatgtcactgcggcgacaaagaggaaacgggcatgcactgagcgcatactacagaataccctggagagcactcctatgctatgagatgccaaacaagtacagatcggagacgatcacgaggtggatccgggagctcctggagcagccacactccattgatcctcgatcgtgatagtgaggaacaaggccgagctgatctcactgctgacgattccgaagcaaagacgtctagctcctcaccgctgaaggaaggactatcgttcctcgagacatc

SEQ ID NO: 44378 - DNA, 404 bp, Zea mays
  Clone ID: MRT4577_140478C.1
gggaacggaaaaaaggccacagtttttgggaagcccctctaacaaacaataacggctcaaagggccaaaactaaacaacgggggcaaacaaacaaaactaaacaccccccggcccaaaaaagggctcaacaaaaaaaaaaggcaaacttgggggggggccccccaaaaaggaaccaattttaaggggctccccaaaaatggggggggccaaggggccccccactaccggggccacccggggaggggggaaacgggaccggcagcaacagggggaaaaaaacggggggggctaacagggggggtttaatctctcttaccttaaacaggggttaacggggggaaaaccgggaaaaccatccccccccccaaaggggaggcggggggtatgttgggggggtatgcag

SEQ ID NO: 44379 - DNA, 474 bp, Zea mays
  Clone ID: MRT4577_140479C.1
cggggcgggccacaggcgtccggccaaataatttgttgggggggaccaaaaaaattggttttgggggctctgaattgtttagagggggccggttgatgatgtcgaaagggaccattaacattttaagggttggatggtggttttggggggcgggtaatatcaatatatacgggtggccaaactagttgggtggatggagtttgaccgtggtggggtaattggaatggggttggggatagtttcccaggatttttaatcggttttccatgggctttggggaccctaaatggataagaccggttaccaaggattgatgtaggttaaaagtctaagggttcatgacagctgttagtggggccttttgtggtccaacttttgttcttgttaaggaggctggagtctgtttatttggcaaccattttggttttgtgggttggatgtcaaaaaaaaataattctttttttctttcttttt

SEQ ID NO: 44380 - DNA, 256 bp, Zea mays
  Clone ID: MRT4577_14047C.1
cgacgtctgtagataacatgcagtgcttgtagtacgtccacggtcgcttgcacgaatccgcgcttgaagcatcttcggagggaaatacttacatcaattcgtgcttgaggctgaatgaagaaatgagaggcttggaaagcttacctatgcaactgtatattctacggaagaatgttgattcactagatctggcttatattcaattagttcgccttccctagtcaatggaaactatcaatgaagcttcaatggcaac

SEQ ID NO: 44381 - DNA, 247 bp, Zea mays
  unsure (1)..(247): unsure at all n locations
  Clone ID: MRT4577_140480C.1
acagaacgaccaccgcgacgaccccggcaacacaacngcccccagcccaagcaccccacaaccggagcaacaaacaccagcggcagccgccgccggcgacagacgacggcagaggaaagcgagacgcacgcgcgccgcaaaggaaccagaagcgacgcaacggccagagacaagcaaggacagcccgccgcccgcacaacaaacgagcacggaacccaccgacaccggaaacagaaccgcacacggg

SEQ ID NO: 44382 - DNA, 214 bp, Zea mays
  Clone ID: MRT4577_140481C.1
attcggctcgagatcgagttctctgtcaagtttcacattggaggtacttccaactggatggggtgaagtcgcccgacctctgcaggaagaagggagagcacaaacctctgggcacaggcctcctgaactgcggatccatgtagttagagcgattctgactccggatgcttcgccatgatgcctgctgactagatcctgtttaagttctttacaa

SEQ ID NO: 44383 - DNA, 594 bp, Zea mays
  Clone ID: MRT4577_140482C.1
ccggccgggatcgtgctcatggaccttgtcgtcatcggtgacttctactctatgctgaagtgagtgaaggccagatgctactatgtacacggtgctcatagatggtattgccaccgtaggaagttgcaagatgcagcaaggatcatggatgagatggaaaccgctggggtgcagccaaatgaggattcatactctgtggtggtcaaagccactgcaaggagggaaaatccacataggcatgtgatttagcgagggagatgctagaggcaggtgaaagggaaattgccatggagccatttctacctgttttggtgatcaagtgttcaacacaccatcttgaaccatcttcacatgagcatgagcacatgtttacataaaggcaagttgaagagatcaagtccaaatgagctaatctggagggccaaaagtgcaactttgggcaacacaacataaacatgaggtttaagcgtttgaataagttgcacacaccctactctatgtttctagcactttgttttggctactaattgtaatacccaaaatctataaataaaaatagagttatgcaaaaaaaaaaaaaaaaaatttgcggcc

SEQ ID NO: 44384 - DNA, 2581 bp, Zea mays
  Clone ID: MRT4577_140483C.1
attccgcttgaactcatttgcaattgcgaacgcttcttctcccagtcccagcacgctcaaccccgtcgccgccttatcgaaccttccgaagatgagccccccggccccggccgccgcggcggcggcgccgccgcgaacggtcgcctcggcggtgctccgcgtccagatggcgctcctcgacggcgccgcggtgtccagcgaggccctcatccacgcggccgcctccgcgctcctctcccgcgccgactacgacgacgtcgtcaccgagcgcaccatctcggacgcctgcggcaaccccgcgtgccccaaccctctcccctcctcctccgccgccgccacggggccccgcttccacatcgccctcagcgagcaccgcgtctacgacctcgaggaggcacgcaagttctgctccgagcgctgcctcgtcgcctccaaggccttggccgcctcgctcccgcacgatcggccctacggggtcccgctcgaccgcctcgccgcggtcgtcgcgctcgttgagggcgccgccgcaggggacgggagcgggttagggttccagggactggatgggaatgggaaggtggaggacgggggaaggaaggtggagatcaaggagaagcaggtcgccggggctggggaggtcttgctgcaggactgggttgggccctccgatgccattgagggttatgtgccgcgccatgaccgcagtgctcatggacaaaagccacaggttcagcagaacgaaggtgctggacctgaactgtccagaactgagaatgtggattatggtgctgctgctcctggtgaagatggcatgacaagttcaccttcattggttaaaacacacgtgagctccgaagtaatagttgagagaatgggcagcctggttcttggtgagaatacaaggacgcctagaaagaagaaaactaaaactccatcaaagatgttagagcaagaggaagataacagtatgctgtcatcttgcatatctgattccattgccaagcagcttgaggatgtagttttggaagagagaaaaggcagtcagaaaaataaaatgagtaaagcatcatcaagagcacagaagggtaagtctacaaaaaggcctgcttcgacaaacatggaggaaaatgctatgaatcagtataactacttgtcaagttctgtattggtagacaatcacccctcatcatctcaatcttcagaaaaagattcaacacaggcttactctgaacaactgtgtgaagaattcagtgaagcagtgaacattggaaatgatgagacaagtgatgaaaagatgagacctgcatggaagtcttcgttgaaagttgccgggtctaagagcagtaggcagtctgttacatgggcagatgagaatggaagtgtcctagaaacaagcaaagcatatgaaagcccttcaagtagtataaaacgacctgaggaaggcatagacaattcactaaggcgtgcatctgctgaagcgtgtgctgcagcacttgttgaggcagcagaagctatttcttcaggcacagcagaagcagaagatgcagtttcaaatgctggaatcatcattctgcctgacatgcttaaccagcaagaacatgacaatggcaaaaacagtggcggagatgatgaccctgagatagatagggatgttatcaagtggcctaagaaacctgtacttctggatacagacttgtttgaagttgatgattcttggcatgacatgcctccagaaggttttagtctaactctgtctgctttcgggacgatgtgggccgcgctattcggatggatatccagttcgtctttggcctatgtgtatgggcttgaaaggggttcagtggaggagttgttgattgccaatgggagggaatgtcctgagaagacagttctgaaggatgggctctcattggagattagaagagctctagattcttgcgtttgtaacgccgtgccagtactcatatcaaacttgaggttgcagataccggtttcaaaactggagattactctgggctacttgattgacacaatgtcgtttgttgacgccctgccttctctgcgatcgaggcagtggcaggctgtggttctggtaatgcttgacgcgctctctgtgcaccagcttcccgcccttgctccagtcttttcgaattcgaagcttgtgcaaaagatgttgaacgctgctcaggttagcagagaggagtatgactccatggtggacctgtttctaccgtttggaagatccgtccaggcgatcacgcccatgtaaacgagaagccgtgtgaatctgcattccggaagctgcgtgaatcgtagggtctgatctgatatttagttttacacaagtcgctgtctagaacgagccatgtatgtatgattgattggttatctattgagcaagatgcgctctggcaatttgtggaagctgaaatacttgcgaccatgacgcctgcctgtcagtttgcgatattctttcaggttgtgagaaattgatttgctgtcgttctcagctaaaaaaaaaaaaaaaaaaaaaaaaaaaaaccgactagttaacccgcgacccggaattaatcgggccggt

SEQ ID NO: 44385 - DNA, 198 bp, Zea mays
  Clone ID: MRT4577_140484C.1
cgggcgtccgctgtaacgcgctaatacggggccgctctgatgagggtctctgctctgccgatacgcgctgatcgccggcgatcgtgatgagcatgtcacggctatgctatcacgttctccacagtccaaatagctcgcctacggatgagcacgatatggcatcagtccgtctgagttcgccgatatctcattgatcta

SEQ ID NO: 44386 - DNA, 563 bp, Zea mays
  Clone ID: MRT4577_140485C.1
ggccgcgctattcggatggatatccagttcgtctttggcctatgtgtatgggcttgaaaggggttcagtggaggagttgttgattgccaatgggagggaatgtcctgagaagacagttctgaaggatgggctctcattggagattagaagagctctagattcttgcgtttgtaacgccgtgccagtactcatatcaaacttgaggttgcagataccggtttcaaaactggagattactctggtttagcttgatgctggtggctgacagttatatcggcggtaacacatgatgaaactacaccgtgtctgtaccagggctacttgattgacacaatgtcgtttgttgacgccctgccttctctgcgatcgaggcagtggcaggctgtggttctggtaatgcttgacgcgctctctgtgcaccagcttcccgcccttgctccagtcttttcgaattcgaagcttgtgcaaaagatgttgaacgctgctcatgttagcagagaggagtatgactccatggtggacctgtttctaccgtttggaagatccgtccaggcgatcacgcc

SEQ ID NO: 44387 - DNA, 256 bp, Zea mays
  unsure (1)..(256): unsure at all n locations
  Clone ID: MRT4577_140486C.1
agaggccgcccttttttttttttttttaagggccaccgggggccaccgaggtttttttgaacgggattaaaaggtggcacatgtccggaggcacccgggttattaacactgtttttcaatacctaacagncactgaacccaggtagctgaggaggggggggcccctgccagcctgttagctggctttgctgtttcctttccaagagaggggggcccactagcaccagggctaacctggaatttttcgggacgcggg

SEQ ID NO: 44388 - DNA, 257 bp, Zea mays
  unsure (1)..(257): unsure at all n locations
  Clone ID: MRT4577_140487C.1
cagagattataagattttgacaagattatgggtgcagcacaccaacatggcacacatatacatatgtaagaaacctgcatgttgtgcacatgtaccctagaacttatagtatgataataaagatttttacaagattactattttaggttcattttcagatgtccagaatgatttatcagctctaagtcaggataacctgtagtaactctagtgttaacatttctgctttcatttcagcttcacgggtgagacgancg

SEQ ID NO: 44389 - DNA, 700 bp, Zea mays
  unsure (1)..(700): unsure at all n locations
  Clone ID: MRT4577_140488C.1
naaagagttggtttccaaagtccgtatttatcaccatgtggttggtggtgttctaaacccgttataatcttaggctggcgaccgcagagaaggcagaggactgcggagggtggaagggaagccacggaagcattggtgccacacagaagagaggtcgcggcgtgggacataggctgtgacagtgcaggaggttgtggcacgtgagggaggctgcgacacactggggattttcgcttctttccgccaaaaaaaagagcggtgactgaacaagttaggtcaaagaagagggctcaatgatatatattggtcctaggatgatctgggcattggagacctgataggctgaaggcccaacttgatgatctgctggctagtcgagcaactagacatgttcaatcagtcatgattaatcaataactagactcctgatcgcttgactcgacgaactaatcgaaccggtgcacttaatcatgtccagggaatgatttgttgattaatcattgataaagctcgactaatcaaacgatttgaaaacactgctctgttgacaagttgaatagtagggcacctctatatctttagaagcttgttatggtagatattgaatctgtggttttgtaaactctgtttccttgtatcaaatcactgttctcaccttcaacatctgtcttatactcttaaaaaaaaaaaaaaaaaaaaa

SEQ ID NO: 44390 - DNA, 745 bp, Zea mays
  unsure (1)..(745): unsure at all n locations
  Clone ID: MRT4577_140489C.1
ggtaccactcgggccggccgggacaaaaaaggttccccctttagtaaactgctttccaaatggccacatgggctttgatttgtgcaaacgccatgcatagctggggttattttgttatcctttcatggatgccagtctatttcaaaactgtaagacttcactctgcttcaattttcttgagtatataaattacttttcccagtattcaacttgatattgctttcgtggtgatcaaatatatcatgtcaatctgagagaagcagcttggttcagtgcactcccttgggtgatgatggcagttttaggctatgtggctggtgttgtatcggacatgcttattagaaatggtacaaacattactttaacacggaagataatgcaggtgtgttgcttcaacaaaaatagtagtgcaagtcagtaaagttttcatttgttttattcgtatgatcttgtgcacctctccgcgctcttaccaaaaggtgacatgcttcctgatatgttgccgtctattaaatattaaccaaacatgttaagtcttacatgaacactagcagtttattttcatcaacactggcaatttattttcatcaatattggttttggtcatttcaaatgtacacttcctgttgcattatcttctcttcctgactattctgcagtcaattgggctttctgggggctaggtattgctntgctctgnctggatgcagcaaagagtccaatcattgcttaagcctggcttaca

SEQ ID NO: 44391 - DNA, 220 bp, Zea mays
  unsure (1)..(220): unsure at all n locations
  Clone ID: MRT4577_14048C.1
gggccaagaacacctttttttccttcaagaataaattgggcccctccgatgttccatccttttgactggagcaggcnnccntataaaaatcctgggcaatcactttatgccgtttgcngtattgaattaaatcagcaggtgttttaatgttttctgcacatggnaagaaattctttagagttatctgtttattagttnnntaagacatgaactgggaatc

SEQ ID NO: 44392 - DNA, 133 bp, Zea mays
  Clone ID: MRT4577_140490C.1
aaggccatctcaaggaatgtaagccttgtcttccactcacaatacctgcatacacagtaggcagacccttcagataggcaacagggcagccttcagctcctgaccagttcttatcaggtagagaggatccggt

SEQ ID NO: 44393 - DNA, 239 bp, Zea mays
  Clone ID: MRT4577_140491C.1
catggcacaggtggtggaattgggcatgacatgggtggtcgattcggcaaaggcggtcggggtcttggcggcggtagcggacacggtgctggttgcggcgggggcgttggtcgtggaagtggccgtggcatgggtgccggattcggcacgcgtggtggtcttggccggcggggtggccttggcggtggaactgggcacggcgtgcgcgccggattcggccagggtggtcatcttcgtgg

SEQ ID NO: 44394 - DNA, 516 bp, Zea mays
  Clone ID: MRT4577_140492C.1
aattcggcacgagggtccaaggatccaccttacctcaccgtcccctatcttactctagttgcggccggcgccatgttctaattcgcactgcccattggggccatgcacgcctaccacaacggtcggtggccgcggcgggcaatgtgatcccgcgggcttcgctcgcccgggatgccggggcgggaccactccatccatgctcagacgccggtgctggccacggggaagggtgcgcatgcctacaagctggccgagtgcgacaccctcgtgacgtgccctactggatgcatcgcgcacgacctggactgctacagacgtgctcaaattgggacacgagcgcttcgatctctgctgcgggtacgagaacgaccgcgatgaggctcggcttgtgctagctcggaagcaagctcaccaaccggccgccgggggactacacagttgtggggggcctcttctcgcctgtgctcgcctggctaacctgggcgtggaagcgcaggtgcgcgcaccgtcgccgga

SEQ ID NO: 44395 - DNA, 237 bp, Zea mays
  Clone ID: MRT4577_140493C.1
atgaggttgcgtgaggagatgagacatcaacaagaatttattaagggcataataccaaacattccaccgccgccacaatggagccaatttgcatccataccaactctggttacgcctgaagcgggcgaaagtgggtctgaacccatagaaactggatttgttgagtccctcttcgcgtaccctcctggtggtggcagcggccaaaattctaaccatccgagtggtggttatctctga

SEQ ID NO: 44396 - DNA, 292 bp, Zea mays
  Clone ID: MRT4577_140494C.1
ctgctgcgcctcctgcagccgccgcgccgtaattgcggggtcgccccccgccttctttgtcctgtcgaagagacgctgatatccccggatgtgacttgccaggaccatgagaccatatgactgccacaataagctacctgatcgctgaagctgacacattggaggtctggatgaacatggctgtgactgtgtctccacgctatctccaggtacctactatcaatgaaatgatcgacatgtggtagaactataatacgaacactgcctatataatttacacatgcatcttcgc

SEQ ID NO: 44397 - DNA, 160 bp, Zea mays
  unsure (1)..(160): unsure at all n locations
  Clone ID: MRT4577_140495C.1
ttgtttgcaatgacatgctgngagcttaacttgaggcatgtacggatataacgaaagataaacataccccccccccccccccccccncatttggttgttccggcncctcaaacttttctatgtntagggttcctccgctgtnaatcaaaggatgttttcc

SEQ ID NO: 44398 - DNA, 423 bp, Zea mays
  Clone ID: MRT4577_140496C.1
atctacttagagaatttgtgcgcttgggagtccctgattattaaataaaccaaggatttgaccatgactgcaattttagagagacgcgaaagcgaaagcctatggggtcgcttctgtaactggataactagcactgaaaaccgtctttacattggatggtttggtgttttgatgatccctaccttattgaccgcaacttctgtttttattatcgcattcattgctgctcctccagtagatattgatggtattcgtgaacctgtttctggatctcttctttacggaaacaatattatttccggtgccattattcctacttctgcagctattggattgcatttttacccaatctgggaagctgcatccgttgatgaatggctatacaacggcggtccttatgaactaattgttctacacttttta

SEQ ID NO: 44399 - DNA, 293 bp, Zea mays
  Clone ID: MRT4577_140497C.1
tctctccctctccttctccttccagctccagaaaatagatacgccgacgaggaggagagagcgaaagaaactgtagtttgtttgcacttgagcagcggcgccggcgatcgacatggcggctcacaagcggctccacgacggcttcgagcaggaccccgaccagcccgagaagaagcggatggagcgctcggtctccttctccacggtgatccgggaggccatggtgatgaagcaggtgcagagtgtgttcctggtgctggagcctctcctgcgccgagtggtgcaggaggaaa

SEQ ID NO: 44400 - DNA, 950 bp, Zea mays
  Clone ID: MRT4577_140498C.1
cgctgctttcagatatctcaccggaccgtcgtcgtcggcccctccgagaacataccaccgcgcccgccgccgcgcgcgccaccacgtccacgtacgccggccggccaccaagcaagcatggatacggtttcacagtccgagcacctgtgctacgtccgctgcacctactgcaacaccgtgctcgcggttggggttccatgcaagaggctcatggacacggtgactgtcaagtgcggccactgcaacaacctctcctacctcagtccacggccccccatggtgcagccgctctcgccgactgatcatcccttggggccattccagtgtcagggaccctgcagtgagtgcaggaggaaccaaccgctgccgctggcctcgccgacatcgactgacctcaccccgagaatgcccttcgttgtcaagcccccggagaagaaacatcgcctcccatctgcttacaatcgcttcatgagggaggagattcagcgcatcaaagctgcgaagccagatatccctcacagggaggccttcagcatggctgccaagaattgggcgaagtgtgacccgcgctgctcgacgactgcctctactgccacttctaacagcgctcctgagcctgctagtagagtcgtcgtgcccactcctcatgtaactgagccacgctttgatctggaggatagggccaaggagcatgtcattgagagcttcgacatcttcaagcagattgagcgcaccatctagatgtctccatttcgagtaccatcagctctatatataacctatgcatgcatatgcatccccatcttgtactttttaccccccatgttactgttgctattattcttgctcttgttggattgtacgcaccctttaattatggacagctgctaccctatataatgtttgccatcttatatattgtcgtcgttccttatatagggttatgatcc

SEQ ID NO: 44401 - DNA, 206 bp, Zea mays
  Clone ID: MRT4577_140499C.1
agctgtgccgaaattagcattatctccattctttgacaccacaaagtctaaaaagcagaaggccaagcgtatggctgcttcggatagtgggtatgaatataggtttcttggcggctgtcgtcgtgatttataatgtgacaaacagatcgatgttggataactgatctctgtattccttccgcaatctctgtggccttcgttgtcct

SEQ ID NO: 44402 - DNA, 307 bp, Zea mays
  unsure (1)..(307): unsure at all n locations
  Clone ID: MRT4577_14049C.1
aattcagccgcccttttttataaacaaanattttgtgtgtttttaggggcttgttgccgcagcttttttttttggaagagacaagattagtataatgccaagtgtgaatgaagagctctatttatttaaaaaaaaacataagaaataatggaagtatgagaaagaccaaaaaaaaaaaccaaaaaaaaaaaaaaaaaaaaaaaaaaaaaaaaaaaaaaaaggggggggccctttaaggggccccaggttatcccccccggccaggcaactctaaagttttcttatggggtccccaaatctaaattcc

SEQ ID NO: 44403 - DNA, 995 bp, Zea mays
  unsure (1)..(995): unsure at all n locations
  Clone ID: MRT4577_1404C.1
cccccaaaacccccgtttttggggggtttattccaataattttccaaggggcccccaagggcccccagagaaaagaaaantttttctttttccccccnccccccccnttttttttttttttttttttttttttttttttttttttttttttttttttttttttttttttttttttttttttttttttttttttttttttttttttttttttttttttttttttttttttttatgaccagaactatatcgatcatatcataattaataatactttgagtttagaggtcgatcgtgttgcaagaaagtgttcacaacacgcagacagaaacatgaaatttggattgcgcttatacaaggaaaaaaaacgccactggtatgtgatagtcatcgtaatacaacagctacagtcatcttcaaaatagctttattgcttattggatggctttccctttccggtgctgctctcgtttctcttcttggcgaacccagttacagctttcttcgcctttgcccattgcttttgcgactccgtgtttctcatgaaagggcaaacttcactaatggtgatcttcgggaccacccgcaccttctgcggcttattgctctccttaggctcgccaccaatggcatggtctgtcgactcatctgcaatgctggtagacagcgttcccacggaactcgagagctgtgctgtagcttccgaggatttcgaagacctctccccgccggcaacatttgaaaacaatcctggtgctgcactgctggtggtcgattgttgttaggcgccacctgcgatatgctgaaagatgcgctccccgtgccccctaccagatctctccaggctgatttctgaatccatgaataaccttttttcggttcaatagaaccagtgttttgtgcacttccagttttgatagaagaacttgctagagccgtaatgccttgaggatctgcagagcttttgtcttttgggagtgccgaagagaactcatatg

SEQ ID NO: 44404 - DNA, 1244 bp, Zea mays
  Clone ID: MRT4577_140500C.1
cgaactgggtctgaccggcagcggtgcggcgctcgagcaggccggggggggatctatctgtctgcccgtggcgtgctccactgattcttcttcttcttctacctcccggcctcctcccccttcttctttgcctgccttattagtatctcgcctcacaccacacagctagcagacagccagacacgcgctgctttctgatctctccccggatcggaggctcctcccaacataccaccctgccagccgcgccgccacgtccacgccggccggccaccaagcaagcatggatatggtttcgcagtccgagcacctgtgctacgtccgctgcacctactgcaacaccgtgctcgcgctgcaggttggggttccatgcaagaggctgatggacacggtgactgtcaagtgcggccactgcaacaacctctcctacctcagtccacggccccccatggtgcagccgctctcgccgactgatcaccctttggggccattccagtgtcagggaccctgcaacgactgcaggaggaaccaaccgctgccgctggcttcgccgtcatcaactgagctaagcccgagaatgcccttcgtagtcaagcccccggagaagaaacaccgcctcccatctgcttataatcgcttcatgagggaggagattcagcgcatcaaagctgcgaagccagatatccctcacagggaggccttcagcatggctgccaagaattgggcaaagtgtgacccgcgctgctcgacggctgcctctaccgaaacttctaacagcgctcctgctgagcctagagttgtgcccactccccagttaactgagccacgctttgacctggaggtactgcaaagccttctcccttcactcttctctgtagacaaataagcaagatttgaatatgctatgctatttcctatacgcacatgcatgcatgctgctcttgcaggatagggccaaggggcaagtcattgaaagttttgacattttcaagcatattgagcgcagcatttaaaggtcgttcgatgccgctgttgtagcccagtatcgatcgagtcccatcagctatatgtataacctatcccgtatgggggtggtcgcctcgcaatcatgcatccccatcctgtacttttacccccgaaagtattcaagttgctgttattctcgttagggttggattgtacgccccatttaattatgaacagctgctccctatatatataatatttgccttttttttgttcct

SEQ ID NO: 44405 - DNA, 352 bp, Zea mays
  Clone ID: MRT4577_140501C.1
gaaccataaatactgggggactttatatacaggaaaacttattttttatgtttccatgcctttacaaaaaacaaagggggcttaaagaaatcaaattcaaaagaaaatggaaatcaacttttttggtgaaatgcctagctttacaacatttgggagggtgccgaactcacttttccctatcctttcgcaaaaggtttttgtttttattaaccccatgtcagtactagtcgaatatgcctctgcctgcaggttttactacaaagcacttcagttttaaagccacaaattaaaaaccagttccttcagcaaggcattaagtaaaccattccacaacttaactacaacactttca

SEQ ID NO: 44406 - DNA, 381 bp, Zea mays
  Clone ID: MRT4577_140502C.1
gccggcctcgtcgccacgctgcacgccttcacgttcggcgacccggacatgtcggggggcaacttctacctgccgaacgtcatttcagaggcggcgccactcaccaccgtgcgccacgtggccgcggacatgttcgcgtccatgccctccggggactcgattctcatgaaggcgatcctgcacgagtggagcgacgcccactgcgccacgctgctcaagaactgctacgacgctctcgccgcgaatggcaaggtcatagccgtcgagtgcgtgatgccggtcaacacggacgtcaccgacaaggcccacggcgtgttacacgtcgacatgatcatgctcgtgcacaacctaggcggcaacgagccatacgagcgcgagttc

SEQ ID NO: 44407 - DNA, 308 bp, Zea mays
  unsure (1)..(308): unsure at all n locations
  Clone ID: MRT4577_140504C.1
cacgcgtactaatttgttccttagacgccgtgggggggggtttttgaaaaaacaaccttgggttttgcattcctccgaaaccaaagcacagatcgactgcaaaccatgacgcgtgggagtgcggnaagggggggggggggggggggggatgtaagatcaattaaaatttnttttagtgggttttgttagggggcatttntaaaacatacaagggacacttatttacatgccatccaaagtttttttgtttttaagtttttgtttaattgaaatttnttgaataaaaattgttttgatgagctggactg

SEQ ID NO: 44408 - DNA, 410 bp, Zea mays
  Clone ID: MRT4577_140505C.1
gcgagcatccacatcttgggtatctgccttctcacgccgagtgagtgtacaagaagaccaagcccacaggagaccactccgacgatactaatatgactctcactcttcagcgatgttcggttgtcgttcacgaggtccaggtacgccttcttttgtgcttaagctaggagggtgggggcctgctgatccatggacggagggaccggcatccggcgccttggtgctctcttccggcgagggcgagtggaccttagagctattgctggcgccgctgcccttcgtgccggagtccccagggtcgcccccgcccggcctactctcctatttgttacgactgcgaagcgtcggcgtcttgccccatctgcacggggaggtctttgatgatgacccgcagtttctcggatcgatca

SEQ ID NO: 44409 - DNA, 275 bp, Zea mays
  Clone ID: MRT4577_140506C.1
gaaaaatcgttctggagagctttagtgctgacagctgacgtggtggtttctctgactgcgtataggtttctgggcatcaaagaaaggcatggaatttgagtacctgaggcctatcctgtcttcctcgcttactatcctcatcctaacttagcttcataagagatttcttcccactgggacccgtgtcaagtgggcttgttcgatagtctaagggctctggtcttcttatgctttattctgtacagacaccaagaacctgattcaagcgcctcacc

SEQ ID NO: 44410 - DNA, 324 bp, Zea mays
  Clone ID: MRT4577_140507C.1
cccacgcgtccgaatccacgttcctcgccccctgcccctccggagagtcatggccaccgccgtttccacccccgcggacctgtcgcccacgcctgccccgagacggcggggccggccgccgaagaaccccgccccagccgaggccccaggcagcccggctgaccaagcggaggtgattggggactacgagcgcgagagggacgcgaggatccgggagaacatggagcggatgcagaagctcggcatcctcgacctcgcgcacaccctcagccactgcgccgccgcctcgggtcggggtaccggcagtgggcggtggcgccggaa

SEQ ID NO: 44411 - DNA, 574 bp, Zea mays
  Clone ID: MRT4577_140508C.1
cccgcgcacgcacgtcggtcgtaccaggcaggacctagatcggatcgagaggtgactcctcaagggcttgctctgatcgagacgaccggagaagaagaagcaggataacggggtgtggttcgacgacagctcggcgccggtgcgcgcgcagaccatagaccagctgcacttggtgcagcggaagcggtctgagcccagcacgcccaagcggtcggagaccaccacgcccatcaagggcggtgcccactcgcccttagtcgtggcgatctgcgaggaggagcgccacacgctacagatgcagtccatgagtgcgtagttggcgtgtctgacgcgtgaaaccggtccgaatgtggttaagggcgatccggctgcgtagggtgatgccgtcgtgcagggtgcgccattgacgccgagggcgcatcagcagctccggctatccgatgtctgcgctaattgcgtatagcgacagcttaatcaagttgatttatgtgtttaataacctttatggtggttgagatgttcgagctggccattaattacgagaaggggttgtttatttaggtgtaccggtgcg

SEQ ID NO: 44412 - DNA, 632 bp, Zea mays
  Clone ID: MRT4577_140509C.1
atccccactttattatttatttatttatttattggaaaaacacgggagaacaagttgttacggttaagtttacttgccgatgcagcacattatctagcaagagggaaattgaagctgctgcaggaaaccccgattgggttgaggaaaggggggaatccaagctgttttttgtccacgtgaagcaaaaaaagggggttttccagttggaacccaccgatgacggccgccggggtttgccccggggcctggacaaaaccgaggcaggccgggttgccgttcacctgccccatggagttgccgccgaccaccgggaatttttgcccgccctccaaaataacgttaatttgggggacggggtaaccgaacaaactttgggggagcttgggggagtcgtaacaccggtcgaacggggccaccggggggaccctggacatccaggggaagttgggcccgggggccgccgggtaaaacgccttgacaaacggagcgtacacttcggcccggagcgccgtgtacgggaccggggagctaaacgccacgacgagcgccccgggggggccgcccacgcgggcctgttccacggggatgccggtgggaggaaaacgtattacccgggggccaccggttccggt

SEQ ID NO: 44413 - DNA, 381 bp, Zea mays
  unsure (1)..(381): unsure at all n locations
  Clone ID: MRT4577_14050C.1
gccctggggttgttttttttttttttgtggaaaccattgggaatttcgcaaaagccagtgaccatcctccgctacccactgcacccgggtatgaagcgatcatcaaccagcggttccacgtcctcgtgtccagctggcctagccaggccaggggttagtcttgggaagctttctccagctttccacccatgcantgcttttttttccttcctgcctcgagaagactctttagtacaaggcgcgcaacggaaaaacaaaaagaagaatgatgtgccatgcaagatatccggagaccccaaacgccccttttctgggtgccccatcttctatgtgcgaagaggtttttggtttttgtttgcttcgtcggtttgttctttccct

SEQ ID NO: 44414 - DNA, 1111 bp, Zea mays
  Clone ID: MRT4577_140510C.1
tataacgcctcgagaacagcttctatgaggcacctgtcttcgctgaccccaacggaaggggattgtgtgcactcttgcgtccctagatttactctatttctgaccatgcacggtgcaccgttgtctctgagctatcaaacgaggactttgactcttatgtcttatctgagtcaagcctgggggggtacccatacaagattctgatcaagacctgtgggactacaaagcttttgctcggtattccgaggatccttgagcttgctaaagagctctcattgccacttgttgcaactaaatactcccgtgggacattcatattccctgatgcacaaccttccccacacaagaactttgttgatgaggttaccttcctaaatcacttcttcgatggcctcaggtttggtggtaatgcttatgtgattggtgattctgcaaagcataagcagaagtggcacgtctactatgccaccactgagcacccctaaggagcttgttgttactcttgagatgtgcatgactaggctggacaagaagagagcttatgtcttcttcaagacctctattgatggttacacatcttgtgctaaggatatgaccaagccttcagtggcatcgtcaaggagtgcgtcgtgaccagtggtgctagcagcaaggccatggcactcagggtccatgggtcgtgggtgtggcttgttcagcgcctactattcgcgggagtcggcgaggtgcctgctgaacttggtggaagtggagtacaattatgatgctgacatcgacctcgtgttcatcgacctgcccgtgctagagcaggagcggtaccggtggacactggagattgtggtgtaggccatgacgcgtgggcgtcgacgtcagcgcttgtcttcgcgtctgagccactctgagttggagaccattgccatttgtgatgtgcatgagagatgtattgtggcgtcttgttgtataattggtatggagagagtatgttttgctatgtccgtatttgcatactctacatgctctgaatgttgtataacactggacaataaatgatgatgtcccttcaataggaatctcatctctaaacaattaataggaatctgatcttctttaa

SEQ ID NO: 44415 - DNA, 264 bp, Zea mays
  Clone ID: MRT4577_140511C.1
gaggaaaacgaggtggcggctagggctggtctcccggctccctactggtagccgtaaatctatgtgtttctgcttgacctatagagtgctgaccacaattatttatactcccctctagcccttatctaatgagacagatctcctcttttctctctaacaaaccttatcttctaatatctatcttctctctaacatatcttatcttctaatccttatctgcatgcttatcttctaatccttatttgcatgcttatgctgttgctc

SEQ ID NO: 44416 - DNA, 1068 bp, Zea mays
  Clone ID: MRT4577_140512C.1
cccacgcgtccgaagagcagacccatgatagattagcttgtattgttgagatggagagaatgcaagtttgaatggctctgtgccacttgatgtacatgagagattggtatctgaccgagaacaattatttcgtgatgattggggtaattgggctgcccggtgtaggcaagtcaaccatcatgaacgagctttattaatatgatgcaagctacctggtttggtggtaatgcttatgtgattggtgattctgcaaagcataagcagaagtggcacgtctactatgccaccactgagcacccctgaggagcttgttgttactcttgagatgtgcatgactaggctggacaagaagagagcttatgtcttcttcaagacctctattgatggttacacatcttgtgctaaggatatgaccaagccttcagtgattgtcatagccttctatttattatttcttctgaattcgagtttcaagacaaagaacatatttaagaatttgaccagaagtcaagcatcaaccatgtcgagattagcgtgcatgatatggttagttcttgtttgctaagcataactctgaccagtggcatcgtcaaggagtgcgtcgtgaccagtggtgctggcagcaaggccatgacactcagggtccatgggtcgtgggtgtggcttgttcagcgcctactattcgcgggagtcggcgaggtgcctgctgaacttggtggaagtggagtacagttatgatgctgacatcgacctcgtgttcatcgacctgcccgtgctagagcaggagcggtaccggtggacactggagattgtggtgtaggccatgacgcgtgggcgtcgacgtcagcgcttgtcttcgcgtctgagccactctgagttggagaccattgccatttgtgatgtgcatgagagatgtattatggcgtcttgttgtataattggtatggagagagtatgttttgctatgtccgtatttgcatactctacatgctctgaatgttgtataacactggacaataaatgatgatgtcccttcaataggaaaaaaagagaaaaaaaaagggggag

SEQ ID NO: 44417 - DNA, 286 bp, Zea mays
  Clone ID: MRT4577_140513C.1
atcatatcatttaatttatgttttcttttttgttcctaaaacaaatttatgaaatttttcccttccgcaagcttgctaaaagtaagggggccgaacttccaccttttccatatttccccatgaaacccactcgtagctttggttagcccacacacaatttttacttggtccgtcaagctgaaacaagattacccccgcctatgatcttttgttttggacaagcttcaaaaaaaaaaccccgtgcccaaactcatttttctgaacaatgttgggcacccctgctctc

SEQ ID NO: 44418 - DNA, 707 bp, Zea mays
  Clone ID: MRT4577_140514C.1
tttttaaaaccctttttttttttttttttttttttttttttttttttttttttttttttttcttttttaaccctgggagggggcctttggacattacaataaccctttaaaggtggacgggacagcagttaaaaaatgcatcacattcacatagagacccactttcaacaacacgagtccagggttgaaggacgtactataaccaagcagggggtgtttttttacccacccccaaacccaggacaaaagttaagggggaacccaaaatacacaaaaccctaatggtggttggatggctcaaaatccaaaccttggaaaaataaagcttaaaatccatttgacagggggagggcgggcccataaaacgggatgttcattctgaaaagttaacagggctgcctcgggtttacaccaaataaacaccttaaatttgggggaaagaaaggaaccttttttttggttccttccattcgaaaataaaaaggccttaacaaaaaatacggggaccattgccctttggaggttttttgcgggcctaaagggctgtttttgtttaaactagctggcgcttgagtttgcccatttgggggctggggcgctcagcatccaaaaatactacccgcattttttgctaaaccgggacctggtccttttgctaataaaacagttaagggacgtactccaccggccctttgactttaaggctg

SEQ ID NO: 44419 - DNA, 143 bp, Zea mays
  Clone ID: MRT4577_140515C.1
tatggcctgaagaccctctatgaccaaatgggacctatctgtcgcttcacaagactgttaaagttggatgagggggagcgacgaaatatcgcatatctttccatacaagaaggatcctgcaggctcgactcaccaatgaaaga

SEQ ID NO: 44420 - DNA, 446 bp, Zea mays
  Clone ID: MRT4577_140516C.1
aaacaaaccgttttaagtaaacccttccttttttggggtaaatttgaacccccccccggttaaaagggggttggtttagaaaaaaaaccccaggaaaatttggggggttttaaagaagaggggggggggaaataataaaaaaatttccccccccccggggggaaaagaaaaaacaataaccgttttttgaaagggggaaaaaaagggggccatttggggtgggggagggccctaaaggggaaaacttttttggcggaaagcttggggggccttttgaaaaaagaaaggcggggggaccctttttttttgcccccccccccccctttttaaaagggggggggggtttcaaaaacttctttaaagaggggccgggcttgggggttttggttaaagcaaaaaaacggggggttgaagaatttggaggcggttttggccaagatctcccc

SEQ ID NO: 44421 - DNA, 462 bp, Zea mays
  Clone ID: MRT4577_140517C.1
aaaccaaaaaaggaaccggggaacccggaccttaaaaggaaagacaaaaaaggggaaaagggcagccaaacaaacaaactaaaaaaaaaggggggaaaggggggccaaccaaaaagcccggggaacaggacccccccggggcccacgggtttcccccccgcccacgggcccaccgggaaacctgggcccggccctccgcgcgggtttcccggacggggccccttgcccgcccgggggggggaccaagccggggccttcccacaccaaaaaaccgggcagggttggcggcccgcccggccccaacaaaaaaccgggcagggcggccccctttgccgggcccggcagcgaaccgggcaaaccggccacctgtgccccttccaccacccccggcaccaagggaggaaacaggggcgggggggggggggttataaggggcccgggggccccccctttggggggggg

SEQ ID NO: 44422 - DNA, 371 bp, Zea mays
  unsure (1)..(371): unsure at all n locations
  Clone ID: MRT4577_140518C.1
ctctanagcatgctcgttctgccgcccgggcaggtacttttttttttttttttttttttttttttttttttttttttttttttttttttttttttttttttttttttggggggggaaagttttttttaatgaatctaaaaatcatttgggttccctatgaccctttggcccctcaaaaatggttttgatcatccctattcttcacaaaatctttttttttcttctaggaaagggccccaaaaatctcattttaaaacaatagtcccccccccccccccccggccgaaatataaaaatgtttttaacccccccgcctgccgcatcaaaagtaaccgattttaagggttcagtacctcggccgcgacccccct

SEQ ID NO: 44423 - DNA, 1089 bp, Zea mays
  Clone ID: MRT4577_140519C.1
tcccacctccgccacctctagaaatctcggtcgcgatagcgcctattcatcccgccaccgccataatcgcccccaacctcgcgaacgagatccgcagattgagaggccttcaccaattgatttctgcgcgcctcgggcccggggaggcgatggcacggtgctgggcgacctgccggagaactgcgtcgtggaggtgctgctcaggctggacccgctggagatctgctggatggcgcggctcagccgcacgttccacgacgccgcgtccggggacggtgtctgggagtccaagctgctgacgaactacgtgcgcctcctcgccgtcgctgcggccggcgatggggaagcggggcaggccgccgggtctgcgccggaggcggagccgctgcccaagaaggaactgtacgcgcggctttgccgtaggaaccgtttcgacggcggcaaaagagttctggctggacaagggtggcggaggtctatgtatgtcaatttcttcaagggcgctttcaataacaggcattgatgataggaggtattggaacttcattcccagtgatgaatcaagattccgcacggttgcgtacctctcgcaaatctggtggtttgaagtcagaggggaggttgaattcttcttcccggaaggcacgtacaacctattctaccgcattcatctcggccgaccattcaagcggaaccagaggagttcagggagagatcaccaagttgcacataggtgtccatgggcaaacacccactcacaataattaagtcaagataccttaccgagtgtagtaatcctttggcagatatatgtctttaacggggccaaattttccaaatggtctacgaaggtcatcaggcttttttcgtgttcggggcggagtgtttttttgccttttgttcctaatgctcttggtcttcacaaccgcagagagaattggaccgtgtctccaaggaaaggaatgagttggtgcgtatcttgtgttatcattcgtggcagtattctgtatttctgtggatccttagaactgtacattttaccaatcttgtttgaatctaaattgagatgaggtctgatctactactact

SEQ ID NO: 44424 - DNA, 286 bp, Zea mays
  Clone ID: MRT4577_14051C.1
cacagctacaggctgtgtttgttaacgtgaacgggtgggagccgagggcggtgactatttacacgtggtttgcactaaacgatgtgcctgtgggcgttcgtgccgcaagccatggctcccaagttgtggggcgtgccgttagtgccttggctgccgtcagcgtgcatctccatcaacatatttctcgcgagatccatcgactacaactcgttcatgcgctatacgttctggacgggcgggcttctcgtttactacatgttgatatggctgtacgcgtgctacgaca

SEQ ID NO: 44425 - DNA, 465 bp, Zea mays
  unsure (1)..(465): unsure at all n locations
  Clone ID: MRT4577_140520C.1
accccaaacccagnnccgnnccancgccgagtgggcagcanaaggggaaaaaagaagaaaaggaaagcnanggcggcggccggcggcgagaacagcggcgcnggcgagggcgagggcgagnncnaccngcgcnacnacgngggacacaagggcaagnncgggcacgagnnccncgagnncgagnnccgccccgacggcaagcnccgcnacgccggcggcgccaacnacaagaacgacaccanganccgcaaggaggncnncgncncgccccccgncccccgcgaggccaggaggancanccaggagnccgacancangaaggaggacgacagcaacnggcccgagcccgaccgcancggccgccaggagcccgagancgncangggcaacgagcacannncanncaccacnnccaagancggcncccncgnnngaggccagcccagcaaggacccggagggcccc

SEQ ID NO: 44426 - DNA, 105 bp, Zea mays
  Clone ID: MRT4577_140521C.1
cactgaacaggaacgtttaccctgaaagccagctacccttgacgctcgtcgagcttcatccccaatactaggagctcgctattctagcagctgggaacgctgatc

SEQ ID NO: 44427 - DNA, 324 bp, Zea mays
  Clone ID: MRT4577_140522C.1
aggtaaaattcaaacaacatttattcattattaaaccatattccggcccaccataattttgggtaaccaaaacacaactggtccattaaaccagtttaatcacgacttacgacacaaaccatacaaattcttttaaagacagcaccatccatgggcaatggccgagacacttaataacccaaataccgcagcagctttaacgactgatgggttaataaccaccccgaaaaccgagcaccaggtggggggggctctccttctggatattggaatctgcaagggggcgaccattcttcaccttttttccggcaaaaatcaaaccct

SEQ ID NO: 44428 - DNA, 327 bp, Zea mays
  Clone ID: MRT4577_140523C.1
gggacaggaaacaaatgctcaggcgaaccaggtttttagccaacagtccaacaaagttaaacttatggggggcttaatgggaaggcccccactggtcacatttagggggcttttattattttttaacgatgtcttcgggaggtttttttagcctggtggggacgggacttttaggggcccccgaagtccaaggaccatttgttttaattcaaccctggagtcccatgatcccaaaaaaaaaacggccggcagggttttcgggggttttggtgaactcggggccccccttttcaaaaattttgggatcagggggaaaaaaaacaggtt

SEQ ID NO: 44429 - DNA, 205 bp, Zea mays
  unsure (1)..(205): unsure at all n locations
  Clone ID: MRT4577_140524C.1
gttaaacataagatatgtcgggatatatagnnnncataaacatacattgttaccacatcatcttataaattggaccctacaaaataattggaccctttattaatttggttcaaccaaaaaccttacaaaaaggccagggaaattattatcctacaacttcaaacaaaaaaagatgatgagcccccacattagattgactgatgtc

SEQ ID NO: 44430 - DNA, 718 bp, Zea mays
  Clone ID: MRT4577_140525C.1
agcagtggtaacaacgcagagtacgcgggacgccgggatggcataccaccacatcattcagtcgcaccaccacccctcgccgcagcctgtctaaacatggtggctggcaactttggatacgagtacgctgatcctacgcgcccacaggtctactactcgcaggcagctgcagcacctccaacattgccaccgcagtatcagcccatcgtctctcctgatgccggacaggccgaaaaacattgagcgcagaaccctggctccccgggtcgtctatgttgcaaaatcctagaggcgtatttatatccatctgtcatcatttgctgttgctactgcatgctgctacatgactccgcggcggagagtagaaggtgttgccgcatttggagatcgaaaaaaagagtatgcatccgaggatgggttcgaaacaagattttttcaatcggatggttcttgtgttggtgaggcggtgaccatgctggatttagattggggggagagccaagtgtctggatccctgttccagtgtttttttttccttctccctctcttgttgttttgaataaaatatatataagtgtccaaaagaacctggcgaaaacgaagagctcgtcgtcatttgtgtagccatctgtatatttgatgtgatttgatctcatggatgtcattcaggttgaggtgcagataaaaaaaaaaaaaaaaaaactcgagagaggggccc

SEQ ID NO: 44431 - DNA, 434 bp, Zea mays
  unsure (1)..(434): unsure at all n locations
  Clone ID: MRT4577_140526C.1
aaaaccaaaactttgtccatgatttgtttggccgaggagtggagaagaataaagtggctctatccattttttgngaaaaaaaaaaaaaaaaaaaaaaaaaaaaaaaaaaaaaaaaaaaaaaaaaaaaaaaaaaaaaaaaaaaaaaaaaaaaaaaaaaaaaaaaaaaaaaaaaaaaaaaggggcggcccgttttaaaagaacccaagcttaagtaacgccgtgcatggcaacgaaaaacttttttttatagggccacctaaaattaaattaactgggccggcgtttaaaaacgtcggaacgggaaaaaccctggggttaccaaactaaatcgccttgaaaaaaatccccttttcgccagttggggtaaaagcaaaaaggcccgaaccaatcgcctttccaaaaattttcgcagcctgaagggcaaagggaacccc

SEQ ID NO: 44432 - DNA, 203 bp, Zea mays
  Clone ID: MRT4577_140527C.1
ttttctcgtccgctgacgcgtgggtggaaggatgaattagttaaacgcgcaagtggccttgtcggtagttcacgaatggtttatgatgcagaccttggtacactgatcattccacaggcaaaggatcgtctatgcaaagtaggtcaaagaggagttgacagtggttctcctctattgcttgatggaagaaagatcctcgttcc

SEQ ID NO: 44433 - DNA, 472 bp, Zea mays
  Clone ID: MRT4577_140528C.1
tttagtttgtgctctatgcgacaatggaggtaaaattgtaagggggtggagtacatcgctggcgacgaacagcagccatggggagggtgcgttctgtctctatctgtacctactctgctggagtactgggcaaacgataaatggacaacatcgtcaccatttatcagggaagctggaggttactgaaattttcaatttttcacaagatgatttgttgaccgaaggcatgatgatacttgatacacactgaggtttttgtctagatgggtcagtgtgttgagacaaaagaaaaacagaaagcatttgagatttgacgttacgctgtcttctattccataaacgaactaaggtgtatattctgcgccatattggaatttatgcaatcaagcctgctagtttgttatccctgttgtgcgttctctgtttgagcttactagctatctatttatgaaccagatcgacgatttacgct

SEQ ID NO: 44434 - DNA, 329 bp, Zea mays
  Clone ID: MRT4577_140529C.1
acgttgtttgacgacactactacctgtgagctcacgccatcgatcagcttagccgtttaagccagtgcgacagatggatcgaaccttacaaatgtcacttagaccttggcttggaccgatatggacataagactgatctgacatgcctgatactctgggtggacgtccaaggcaacgacacgttatgcagtttcgacaagcttgtaatagtcaaatgcacttactgtaatttgcgcaaccaaagcaacgcttgtgacctccaggcaagaagcaatcgacaggaggccgctaccacagctatggctgcgtcagcttccctgagtgcactc

SEQ ID NO: 44435 - DNA, 523 bp, Zea mays
  Clone ID: MRT4577_14052C.1
ccggccgggccgggatagatacgaatgctacctatctagcatggcgaccggtgaccagcccgagacgccgatagcccgcgtctgaggagatgcgggactggtccgacatgacgacagggtgactagctcgatagcggtctcgagtctcggactggaggacctagagagcgcggcgctcgatgccaggctgacgctcctggcggcacgccgcgcgctgcgcgcccgggactctgtcgcgaagctctgacctcgagcccggggtatgcatgaaaccacacctggacgccgatgcgacagcgtgggggacggcctccttccagcgccgagacgaccccatggcgcgctccgccaccacgttcgccgcgtaggagctgagtgagatacatgtcccccagtggtgcgacgactcgatcaacttcgtcaccgagaagactccgagaattaggatactatcggtctacactagcccgtcagaaaccgctcgatcaatgcttattgtcccatgatggatgcccatgctcac

SEQ ID NO: 44436 - DNA, 174 bp, Zea mays
  Clone ID: MRT4577_140530C.1
aaagggcccttgggaagtatttaggggttaattaaaaaaggtgcaagggagagacccttcataaaaaagatattgcaacaaaactttttatacaaattgtctttgaaaaaaatttcggatttaaagttgaggagtgaaagcatgtcggggtcctaagcgggtttttagtttggg

SEQ ID NO: 44437 - DNA, 472 bp, Zea mays
  Clone ID: MRT4577_140531C.1
agatgaacagcgaagtggtcgttccagcgcaaggccttccatggcaggtagaaataattcatcgggcaagcttcttggaatcatattgccaataatgtttgttgttgtagtaactgccatagtcctctttgtttgtaaaaagagaagatatcgaggaataaagctgccacacggaactcatatggccgaggactttgaaagcatcaagtcaactttattatcattgtcatcactacaagttgcaacaagtaactttgatgaaaacaataaacttggtgaagggggattcggtgtagtttataagggagatctttctggacaacaagtggctgtgaagaggttgtcaaaaggttcgggtcaggggctagaagaactaaaaaatgagttagttctggtcgccaaacttcaccataagaaccttgtccgcctagaaggtttttgcttagaagatggagaaagattgcttggctat

SEQ ID NO: 44438 - DNA, 420 bp, Zea mays
  unsure (1)..(420): unsure at all n locations
  Clone ID: MRT4577_140532C.1
ggggtnnaggaaaggggctccagggccttttcaattattattcagggtgcatcttccaagccaggaaacacggggagcccaaaactttgtcttgaaacacaccacccccccaaacaaaacctgtaaccctgcccaaggcaaaaaaataacaccaaagggggcgcctaaaaaagtgacacccggatcaccgggggaacaagactttgacgggggtgggaaattcaccttttgaaacaaaaaccaaaaacaaaccccccccggttagcaaaagcacacttttttttttgcctccgggaagggataaaaagaaagaactgtttggggaaaaaacaccaccctctgggtgctcccttttgttcatcgatggatcaggtttggggccggggggaaactttatttgctggagggctttccctcaac

SEQ ID NO: 44439 - DNA, 762 bp, Zea mays
  Clone ID: MRT4577_140533C.1
acacgacgtagctatatcaatattaacaacatacacaatacaaaagtatactaatagatatattgtacttaataataatataataattattatataacaaagcatacacaaatatatctcatttttattttagaagaagaagaaaaaaaaagaggaggattggattcgtagctagcgcgcgagtaagtactactcagctcgatcaacctgcttttaggggtcgtagtagtcggagtcccagagcggcctgaaccacatggagtggacggactgctggaacgtcatcatgagcagcagtatggccaccgccgccaacacgccccacggcgccaccgcgtccgcctcgtgctgcgacgacgacgacgacgaccatgggtagtggtgcgccgccttcctcctcctggtggcccagtacctacggcgccagctgagcgcgacgaagaggaggaagacggtggccagggcgagcggcgcggcgaagacgcgggcgccgatctcggcgcggcgctcgatggccttgtagtccacgtacccggagacggcaaggaagaaaacgacgatggcgaagaaggccagcaggccgggcggcggcagcgagcacgacgacagggcgcgcgccgcccagctgcgcttccaggaccgccgctggccgtcggagtagtgcagccacgacgacatgctaataactggctacgccgctttcttctcgccactgaccagcaggagcagctcggcgtcccagtcccgaggccagcaaggttg

SEQ ID NO: 44440 - DNA, 1447 bp, Zea mays
  Clone ID: MRT4577_140534C.1
gctcccccctcgccgccccggttccatcccttcctcccccactcttcttgggctgcgcctcgtggtctggcaagtggctcctccctttccctcgcctccccgccgccctgctcctggcctcctcccccctcgtcgctgctgctgcccgccaagggtagcagtgatgctctttatgagaatctttgaggaagagagatgaccccctaacacatcaaatccaaacttatttttgaactattatttataagataatctcatttgtcccagttttaccgagcaaaacttcaaacaagtacttaaaagggactttcctgtttatagatgccactttgataactgatgctgtctcaatattattgtggccttctggtgcttcaccattagttttatttccaaccatatgataggcattgaaaggacaccagctggcttagcctttcggtgactctaaacaccacggcactttcaggtgacacttccacattataaacattgttgtgagaaactaggagtgcacatcagtagccggcggtaggaatgtaaatttttaaattcgcaagtaactagtagtttgtaatgaagttttctttatacctatttgtggatttgaagatgtttgtaacacaagcttttgtgcttgtactgtaagttgacaatttacatttgagatattaaaaaaaatccacttattgaaacaccctagcttcaaatccttcagtcttgcacacagagctacatgtctgtccagtccaaggtggttgcgcttggtgcactgatcttcttccttgtctcgtatggctcttgcactggaggatggactccaagcgccggctgcaggggcccttctcgctgcgcatcactaacgagtccggcgagacactggtggcttaccaggtcatcccggcaaactgggcgcccaacagctactaccgctccaacatccagtacgaggcttttggctctgctgctggacaggctactggctctgctgttggactggtcattagctctgctgctcgactgcacacgttaattaccaggatcattggcttgatctgtttggtattgttgtatcatttgcaagggattgaggtgccttagttttaattagcacttgacatgttgggtgtcctacgctgtgtgtctgctggaggcgtcgtcgatccagagtttcatcttttcgaaaaagttttgaacccaaataattttcctatgaatttcgttgattcctgcgtgacaggtagttgctgtagctctgtgggaaattttcacttgtatttggtgctggattgctgggctgtcctgtcttgttctggctgttgtaggggcttacaactttcaactgttcgacatgttgggtgtcctacgctgtaggtggtgctgtgtgtctgctggaggcgtcgtcggtccagagtttcatcttttcgaaaaagttttgaacccaaat

SEQ ID NO: 44441 - DNA, 369 bp, Zea mays
  Clone ID: MRT4577_140535C.1
gtacgaacttggagatcagagagaccgaggcgcccgtggatgtgcttgccttccttgacccgttggggagggaattttctggagtctgcgactcgagcagggctgcgctggcgctgacatggatgatcctggttcgtgcgtggaggcagcggaagctgaagtggctgcgatgagaacactctcggtagcactgatctgtgcggggccagatcgtggcgctcacgtacttgatactgcatgccatgtccagaatgataccatgacacggcttgcagatcctggatcattaccggaagaacgatcacagcccgacatgcaacctaggcacttgaaaagacgcaaagcgcatacggttagagaaatctatgt

SEQ ID NO: 44442 - DNA, 1637 bp, Zea mays
  unsure (1)..(1637): unsure at all n locations
  Clone ID: MRT4577_140536C.1
tacacctcgggctcgccgggattttgtttccacgagcattctagctagggttcagacgaatttctaggaggaggtcgcgcgacatcgtccatccacggcgaaagcaggctcgccgccccacaacagctttgttccattgcatcctccccaactcaggttgtgctgtgcctgggccctggtggtcaggaaagaggctcctccctttccctctccacctcgccgtgcttctccagtccaccacccccctcgtcgttgcttcttccctccccttccctcgtcgtcgcgctatcccgccggtgcgcgggcgtggggccaagcgccgccgaaaggtagcagcagaggggaagacggacacggacgcaatagcgtccacccccgtaggcgccccccgcccaaagactggtggcaggcctcctacaggcagatgctagagccatgtgactccctaccaaagaatatcctggcaaaaggtgcttctcgctgaccatcgaaacacagagcttcatgtctgtccagtccaaggtggttgcgcttggtgcactgatcttcttccttgtctcgtatggctcttgcactaggattgtcaactttaatgcctcccacatcacgaccgacccctactgggtggctgccagggccacttggtacggtgcgccaaccggcgctggcccctatgacaacggtggtgcttgtgggttcaagaatgtgaacctacctcctttctcggccatgacatcgtgcggcaaccagcccctgttcaaggatggcaagggctgtggctcgtgctaccagatacgttgtgtcaaccacccggcatgctctggcaacccggagactgtgatgatcaccgacatgaattactacccagtcgccaagtaccactttgatctcagtggcacggcgtttggtggcatggcacagcccggccgcgacaatgagctccgccacgccggcatcatcgacatccagtttaggagggtgccctgcatctaccccgggcagacagtgaccttccacatcgagcacggctcaaaccccaactacttagcagtgctcgtcgagttcgaagacggcgatggcgatgtggtccaggtggacataatggaggccaactctgggtggtggatgccgatgcgggagtcgtggggatccatctggaggatggactccaagcgccggctacaggggcccttctcgctgcgcatcactaacgagtcaggcgatacattggtggcttaccaggtcatcccggcaaactgggcgcccaacagctactaccgctccaacatccagtacgaggcttttggctctgctgctggacaggctgctggctctgctgttggactggtcattagctctgctgctcgactgcacacgttaattatcaggatcattggcttgatctgtttggtattgttgtatcatttgcaagggattgaggtgccttagttttaattagcacttgacatgttgggtgtcctacgctgtaggtggtgctgtgtgtctgctggaggcgtcgtcggtccagagtttcatcttttcganaaaagttttgaacccaaatattttcctatgatttcgtaaaaaaaaaaaaaaggcgccgttaagatccagttacgagcgtgcagcgactcata

SEQ ID NO: 44443 - DNA, 931 bp, Zea mays
  Clone ID: MRT4577_140537C.1
ccggccgggattttgtttcccgagcattctagctagggttcagacgaatttctaggaggaggtcgcgcgacatcgtccatccacggcgaaagcaggctcgccgccccacaacagctttgttccattgcatcctccccaactcaggttgtgctgtgcctgggccctggtggtcaggaaagaggctcctccctttccctctccacctcgccgtgcttctccagtccacctcccccctcgtcgttgcttcttccctccccttccctcgtcgtcgcgctatcccgccggtgcgcgggcgtggggccaagcgccgccgaaaggtagcagcagaggggaagacggacacggacgcaatagcgtccacccccgtaggcgccccccgcccaaagactggtggcaggcctcctacaggcagatgctaggacaccagccggcttagcctttcggtgactctaaacaccacggcactttcagagccatgtgactccctaccaaagaatatcctggcaaaaggtgcttctcgctgaccatcgaaacacagagcttcatgtctgtccagtccaaggtggttgcgcttggtgcactgatcttcttccttgtctcgtatggctcttgcactaggattgtcaactttaatgcctcccacatcacgaccgacccctactgggtggctgccagggccacttggtacggtgcgccaaccggcgctggcccctatgacaacggtggtgcttgtgggttcaagaatgtgaacctacctcctttctcggccatgacatcgtgcggcaaccagcccctgttcaaggatggcaagggttgtggctcgtgctaccagatacgttgtgtcaaccacccggcatgctctggcaacccggagacggtgatgatcaccgacatgaattactacccagtcgcccagtaccacttttgatct

SEQ ID NO: 44444 - DNA, 164 bp, Zea mays
  Clone ID: MRT4577_140538C.1
ttttattgcgatttgttctggtaggggacgtggaggtttcgatgataatccattaggatgttgagagggtcttggcaggatcatgctgagattattgtggtacggaagccatacatttagagcattgcagtctactgttccggactgcacataggctgatagag

SEQ ID NO: 44445 - DNA, 495 bp, Zea mays
  Clone ID: MRT4577_140539C.1
atggcgggttcgagacggctcttaacgagtccgtcaagaactgcaaggcgcttgccgaggcggctgagcagaaggaggccgaccgcgtggccatgtccgaggctatctcggctttctatcgggcccttggcctcgatgacgtcccctcgggtagctccccccagagtcacctgtgggccttgggcggccatgtgtgcagcagactccgtggggcgctgcaccacgacgttaggcgggccttcgccgtgcttgcctcccactacgacgtggatctggagcgggtcagcgaggggtactgcttacccgacgaaagaggaggctgccttagccgaggtccagaggcttgacgcggctgtcgagggcccaagcgcggtgctggcttcctccttcgaggtggaggtccttctgcccgtgttgccatctgaggccgggccagatcctgccgagggtggaaacgacgccgagggtgctgttcctcccccagccgatgtctga

SEQ ID NO: 44446 - DNA, 257 bp, Zea mays
  Clone ID: MRT4577_14053C.1
tttttatatttcccaactttttcctttattatctcatttacagcttcctttcttcgtttggttacacaatatatatctgactgaccactcccttcccaaacaatcattaatcacaaagcctttgcgccttccaggttaaacacttgagctgatatggtcagagaacaacaagcttcttacgtgagccgggacggatttacctaacctacgaaatgcacaccgaaaaaggctggaaaaaaaaatccagacaaaaactt

SEQ ID NO: 44447 - DNA, 1940 bp, Zea mays
  Clone ID: MRT4577_140540C.1
ccggccgggattttcccttgtcagttgtaataatagagtgttgaggagtagtagggttgctggcccccgcgtcgcctccgcctgggcgactcgcccagggcggcgccccgcacccttgccgccgtcgcccgcaaattctctctcccctccccttgccgccaccggagggtctgccggaggccggcttggcccctaggatggcggcagcggggtgtttcgcgtgaatctggtgggagatggcgcgacacatcggcggtggagcacgcggcggcacggtacctacggtggccgtagccgtgctggggcgcgccgtggcgcgcgccacagagctcgttgggcggcggctgaggcccaggcggccatgcgtggcgggacgccgctgtgagggcgtcacggactgcctccgcgcctcgctcgtggatctgctccgatcatcgccgtcgtgcgctgtcggtggggctagggcgacgctgagctgtgcttcttcgaggcggaggccatcgacacgtgtgtcggcgggcagatctaagcgggggtcggcgcacaacggcatgggcgactcggctgggccggtgcgctggctgcggcgtggaagaccactgggtggtgactgcggtggagctctggcggtgcggtcgcagcgctgttgctgcctgctggggctacattctggtcccgcggccccacggggcttccggcgcgtgggcgagtggctactgtgttgagtgcttccggtggttgcggtagtgagggtcggtgaggagcagaggatggtgcagcgaccgtggcctgctcgtgcggcgtcgtggccttgtttggggctgcggccaccggatctggctcctcagtggtggtgtgtggcgactgcaggtgggcagcaacctgcagtgccctaatggcgtctgcggtggtgcgcgtgccaacggatctggcgcgtcgcagtggctgctgccagggatggccgacaggaggtgcagcgcgaggtgctgccgtcgcttgaccaggtccatgggcccagccagaggtggtggtggtcgacgcaactttgcggcagccggcacgttgatgtccctctagatgggtctgtgtgggttgtctgggcggcgatggcggtggaggtggttgctttgtcctggttcctggccggtcgttttgctggggttttcttgggcgaaagctttggcgacgcccctgggcgccgcttcccctgttgagggtgtcggctccccagcactgtcttacgtgggcgaaagcccggtccatctcggaccgtcgagggtggcatccccgacgtcactcccttcctgaaggcgtcgcttctgaagtttgtctcggccacgtcgtagcctgtggtggttgctttcgtctttcgggtgccggtttgcgtgtggaggtgggagcttgcattatgaagtcgaagctgctatgtcaggggatgtggctcggcaacgatgacgtggggcgaaccccccttcttcgtgggttggtctgcgtcgaagacgaggcatttggcggaggcggggcggtggattaaggttttggaagtctcgctggtgaagaatcggagctgactcgagtggggtgtctcgtggcttggcaacgacgacgcgtcgcagtcttccttctcctgtgccggtgtttgtaatcgtcgtcgtgtttcctttggccttgtgctgcccgtcttgggagtcggagctcgtcacttgtgttgagctcggcaacgatgactcaggatgggtactgtgtgtgtgggttgctgttgtctgggttgtttgtgcgccctgtattggttttgggcccggtttcccttaaaactgggtcaattcttttcttcttaattgagaggcagagttcctgccattacgttcaaaaaaaaaaagaaaaaaaaccccaaaaaaaacccaaattaacaaataagaaaaaaaaaaaaaaattaaaaa

SEQ ID NO: 44448 - DNA, 696 bp, Zea mays
  Clone ID: MRT4577_140541C.1
gaccctcgaggctggccgggacccaagatccagcaacaccgcaaacatgcagatcttcgtgaagaccctgacgggcaagacaattaccctcgaggtcgagtcctctgacaccatcgacaatgtcaaggccaagatccaggacaaggagggcattcccccggaccagcagcgcctgatcttcgccggaaagcaactcgaggatggccgcacccttgccgactacaacatccagaaggagtcaacactccacttggtcctccgtctccgtggtggcatcattgagccctcgctcaaggcccttgcctccaagtacaactgcgacaagatgatctgccgcaagtgctacgcacgtctaccaccgagggctgtcaactgccgcaagaagaagtgcggtcacaccaaccagctccgccccaagaagaagctcaaatagacgattcgcttatattggcgtctggcgaagagagagtatcgggcacggtggaaacgaattgcaacgattgcatgcgatggatatgagggcaaggtcactactactttcacggcacttaccaccctctgtggcggcgtgctggtcttatctcggatttgagactggacgaagggaactgggcatgtagagtgaaatcgatcaaattcaaacacccaccagcttcgaagctttcccgtctcaaaaaaaaaaaaaaaaaagcggcc

SEQ ID NO: 44449 - DNA, 265 bp, Zea mays
  Clone ID: MRT4577_140542C.1
ccaacatatctcctcgcattttccttgcaaccgattgcctatccccctcccaaccaaagaccgatggcgcccaaggccgagaagaagcccgcggcgaagaagccggcggaggaggagcccgcggccgagaagacgaccgccgggaagaagcccaaggcggagaagcgggtccccgcgggcaagtctgccggcaaggagggctgcgaggtcaagcgtcgcaagatgaatggcaagactaccgtggacacgtacaagatctacatct

SEQ ID NO: 44450 - DNA, 963 bp, Zea mays
  Clone ID: MRT4577_140543C.1
aattcggcacgaggcgcactcggcacggcagtcgtctcgtcgccatctccccaccacctcgtcaccgcagaccatgcccccacggggcccccgcgcggccgtggcctaccggtgaacgccacccagacacacgggaccgcgcagccggcgagcacggcatcgcacatcacgggcgcggccaagaggcgggagccgtgcgctgcgaagtgcggaagcgcctgttaattgctctccctccagtgccgcgcagtgcgcacagggttttaggaagggggcgacaccggtatcgccattcgccagccatggaatccgcaacggcggccgtccgcagcgcgtcgctagcccgggcccggcccgcgccgctcgtccacgggcgcgcgcgcggggcgggtcgcgtcgtgggcgctggcctcgccgcgcgcgcccggcggagggcgctcgtcgccgtagcctcccaccaggagcaccacgagccgctcccgccgcgcgcgcaggagggcggcgccgtggctgtggcgacgcaggctgacgaggcggaggtccatgcgattgacgctccggcggctgctgctgaaacctcgtcttcccaactggctgctggcaagacagtgcgtgttcgatttgtgctgaaaaggcagtgcacgttcgggcagagcgtctgccttgtcggcgacgaccctgcgctcggcctctgggatctgtcgaacgcgtttcctttgaagtgggcggaaagccacgactggaccttagagaaagatttgccggccaacaagctgattgagttcaagttcttgctccaagattccacaggaaagttgcattggcagggtgggccaaacagaagctttcagacaggtgaaaccgccgcaaacacattggttgtgtttgaagattgggatgatgtgaagaatcagaaaatagtagaagggggggagtggcgtctgctgggatagaacaaactgg

SEQ ID NO: 44451 - DNA, 219 bp, Zea mays
  Clone ID: MRT4577_140544C.1
ataattgggagggaaaaccaattcaagaccagcgaacaagctttgttcacatatctaaacagatgtgcccaaaagcactaacctaaactgaacaatttgggtcactccgacaactacatcaagtgctcctgtcccaccagacttatcaaaacataccctaaatttaaagcactctaccctaatcataactcccacaccctctaacgatttgatttacaa

SEQ ID NO: 44452 - DNA, 408 bp, Zea mays
  Clone ID: MRT4577_140545C.1
caaaaaaaaaaaaaaaaaaaaaaaaaaaaaaaaaaaaaaaaaaaaacaaaaaaaataaaaaaaataaaaaaaaaagaaaaaatatgaatacaaaacgaaatgcaattccttaaaagcactcacgcttactcctgctggctgtacattgaactccaggggctactgacaaggactttcaactatgttaaagtgaacttacctaaatcctatccgatttttgctggttgcggtatggaccaatctggcgatgtgagtattactcacgaagagcatgacacactaagaatccattcttccgtgccttcttaactgaaattaagaacgccctttatgctggtcccaaactcattgggtcctttgcttgaaaggtacctgacaacttccactttaagattccttacacttttt

SEQ ID NO: 44453 - DNA, 381 bp, Zea mays
  Clone ID: MRT4577_140546C.1
acaaaacaacaagaaggggggtttttctcctttaaaaaaaaagggcgggggggggcagggaacccccttacccaggggtcagggcccttttgacagggcccttggcctcaaagggatcccagggcttttagtcataaacagcagggttaagggaattgggcttggatcgggtgggtccatttttacagggtacaaccattggggggttgtcagaaggaaatctggtcttcaaaaaaattgccaatcacctaaacaaagggggttccccatttgttcggaacacagcaaccatggggggcaacataatcatggcccaaaggttgccattcgagtcaaacataacaactgggctactgggtgcgggtacaaaagtcacaatcc

SEQ ID NO: 44454 - DNA, 286 bp, Zea mays
  Clone ID: MRT4577_140547C.1
gggtaacagttttgaacaacggcacgaacacaaacaccccacaaaaaacgcaaaaaaaaaaaggcagaagcaagggcacaaaggggaaaaaggagcacccaaaggagggagcaccacaatcgaaacccggaggagaaaccagccccaaaaaagccccaaggaagaaacaacccccataaaaccccgggggcggatccgcgaacagaaaaacccgaaggggggagcccagggggcgcctcagagggggcgcacacaaacggggcctgcaagacccgcagaggggagg

SEQ ID NO: 44455 - DNA, 251 bp, Zea mays
  Clone ID: MRT4577_140548C.1
gtccttacatggctcggagtattacatcgatctagacatggagcccggcaaaggccacgattgctgcgtcgactgttgtgccgtcgagatgctcatctaccagatgtcgtacagtcggacgccgttcaaggatcacaaccgcatggagacattactgaacgtgctgtaacacgagctcgtgttgccagtggacacccggtggcggacaccataactcgcggatctgatgttacacctgcttgaacaagacc

SEQ ID NO: 44456 - DNA, 1330 bp, Zea mays
  Clone ID: MRT4577_140549C.1
gcatctccctttaccattgtctcccccctcgtccgacctcctcgccgccgcagacgaccgccgccgccgctgccgctgccgctgcgaaccctttgtgaatcttcgttgtccggtattcaatgttgcaggggtaccaattgaatgggaagaacactatgtcggtacagaagttgatcccagaacagagagttttttgacttgggaaagcctggagtcagtgcgtagaaacaaagttggcttgaaaggacctatggctacacctattggaaagggccatcgatctttgaatcttacattaaggaaagaacttgggctctatgccaatgtcagaccttgcaacagcctcccaggttacaagaccagatacgatgatgttaaccttgtaacaattcgtgaaaatactgaaggagaatatagtggtcttgagcatcaggttgtgagaggtgttgtggaaagtttgaaaattattacacgccaagcaagtttgagagtggcagagtatgctttccattatgccaaggccaatggccgggaaagagtctctgcgatccacaaagccaatattatgaggaagacagatggtcttttcctcaagtgttgccgtgaagtgtctgaaaagtaccctgaaattcaatacgaggaggtcatcattgacaattgctgtatgacgcttgtgaagaatcctggtctttttgacgtattagtgatgccaaatctctatggtgacattattagcgatctatgtgctggtttgattgggggcttgggcctaacacccagttgcaatattggtgaaggtggcatttgtctagcagaagctgttcatggttctgctcctgatattgctggcaagaaccttgcgaacccgactgctcttatgctgagtgctgtcatgatgttgcgccacttgcaattcaacgacaaagcagaccggatccacaacgccatcctccagactattgctggggggaagtacaggactgctgatcttggtggaaaggcatcaacatccgagtttacaaatgcagtctgtgatcacatctgagaatcggatgtggttctttccttctgattgttctgtcttcctaatatctttttgtcgcatatggggaggagctttagctttaagagattaactggcagcacctcgaacttctttgggtggttaacacggcttgagaccgtcaaatatttgtgtcgcatatcttgctgtccagaaattctttcaacttcagaacggagtaaataattctgtaatcaacaacagcactacagcaataggtagggtttatttcaaaaaaaaaaaaagggcggccgccaccgcggtgga

SEQ ID NO: 44457 - DNA, 141 bp, Zea mays
  unsure (1)..(141): unsure at all n locations
  Clone ID: MRT4577_14054C.1
ggtccgnattccgggtcgnaccagcgtccnagtgctcgagnccatgccgcctcgatcccccgtccacggcaccgtcgtcggcgtcttcgaggccacgcggccccgaagccgcccgcttcgcctgcgaccaccttgtcccca

SEQ ID NO: 44458 - DNA, 752 bp, Zea mays
  unsure (1)..(752): unsure at all n locations
  Clone ID: MRT4577_140550C.1
cctaatctcctgccgccgccacccggtccttcctcctcgcctctgcctttcgatctccgccgctcggtctcctcccctgcatgcgctccgtcccttcctcctcgttggcgctcaactggcagtggatgagcagcggcggacgagcagcggcggacgagatcggcgcgtcacgagagcgaacacggcagctatcacgggcagagcagagcgaagccggcgtggcggccgggcgcgatctggagaactagtgggcggtgatgcccgatatgggccggcgcgacctacgcagcggagcgatctggacgagatgactggtgccggtttcctcaccatgctgcgaccagtgcctcggcaggtgagttgtgttgttgtcctcttcgacgacggcggcgggcggcacgcccatcagtgcccgtgtgccccgaccgatgtggactgcttgcgttgggccatagcagctgcttgctcaagccggcgtgtggactgcctgattggtcaatgaaggcctcaaccattggaggcacaaaattgtgaagcttaagattccccacccttgtttcaatctccgaggatttctcaatgtgataatttttgcagaagcacatgctgatggtgcacttgcctttggaataattactttgctctacaacagtatgaagggtaagctaattctattgtcactgtgcttcacacttctctgtcatggtttacagattcagatctagcaattatgctanaggcagagacagaga

SEQ ID NO: 44459 - DNA, 393 bp, Zea mays
  Clone ID: MRT4577_140551C.1
cctttgtctttttttgctttttttttttttttttttttttttttttttttttttttttttttttttttttttttttttttttttttttttttttttttttgattctttgtatgcataaatgaaaaccccaggattaacatgtcccaactggtattctaaccagttagcccaatatttcaagaacgacaatgaaataaaccctacctactgctgtagtgctgttgttgattacagaattatttactccgttctgagtttgaaagaatttctggacaacaagatatgcgacacaaatatttgacggtctcaaaccgtgctaaccacccaaagaagttcgaggtgctgccagttaatctcttaaagctaaagctcctccccatatgcgacaaaaag

SEQ ID NO: 44460 - DNA, 1907 bp, Zea mays
  Clone ID: MRT4577_140552C.1
gaaaaccaggattaacatggcacagctggcattctgaccagttggcccaatatttcaagaacgtgaatgagataaaccctacatactgttataatgctgatgttgattattacagacaattcttggctccattccaatgttgaaagaatttctgaaccgcaagaaatgtgacaaaattatttgacggtctcaaaccgtgttaaacaccccaaagaagttcgaggtgctgccagttaacctcttaaagctaaagctcctctcatatgtgacaaaaaaatattaggatgacaaaacaatcagaaggaagaatcacatccgtttctcagatgtgatcacagactgcgtttgtaaactctgatgtcgatgcctttccaccaagatcagcagtcctgtacttcccctcggcgatggtctggaggatggcgttgtggatccggtctgctttgtcgttgaattgcatgtggcgcaacaacatgacagcactcagcataagagcagtcgggttcgcgaggttcttgccagcaatatcaggagcagaaccatgaacagcttctgccagacaaatgccaccttcaccaatattgcaactgggtgttaggcccaagcccccgatcaaaccagcacatagatcactaataatgtcaccatagagatttggcatcactaatacgtcaaaaagaccaggattcttcacaagcgtcatacagcaattgtcaatgatgacctcctcgtattgaatttcagggtacttttcagacacttcacggcaacacttgaggaaaagaccatctgtcttcctcataatattggctttgtggatcgcagagactctttcccggccattggccttggcataatggaaagcatactctgccactctcaaacttgcttggcgtgtaataattttcaaactttccacaacacctctcacaacctgatgctcaagaccactatattctccttcagtattttcacgaattgttacaaggttaacatcatcgtatctggtcttgtaacctgggaggctgttgcaaggtctgacattggcatagagcccaagttctttccttaatgtaagattcaaagatcgatggccctttccaataggtgtagccataggtcctttcaagccaactttgtttctacgcactgactccaggctttcccaagtcaaaaaactctctgttctgggatcaacttctgtaccgacatagtgttcttcccattcaattggtacccctgcaacattgaatacctgcttgacagactcagcgatctctggcccgatgccatcgccgggaaagagcgtggcacgaatggtctccccggactccgttgaaaacggcgccacggccggtgccaaatccctgccgattatccgcggcaggacgctcccctgcagcagcctccggagcgccatgcctgccccacacagcccggacaacgaagattcacaaagggttcgcagcggcagcggcagcggcggcggcggtcgtctgcggcggcgaggaggtcggacgaggggggagacaatggtaaagggagatcccggccggcctcgaggggcccaatcgaattttttctgctctggacttgcctttcttggagaaagaagaattgggaaacaggctaaactcctgccttcggataaggctccgggtctaattgcccggccgggagatttggcatcattaatacgtcaaaaagaccaggattcttcacaagctgaaggcagatgcagttcataaacaccagtatcagaaaagctgataatattaagaaaaataactatcaagagcctatcaacaattgacagagaaacggatactttcaactgacagaacataccgtcatacagcaattgtcaatgatgacctcctcgtattgaatttcagggtacttttcag

SEQ ID NO: 44461 - DNA, 425 bp, Zea mays
  Clone ID: MRT4577_140553C.1
ggggccacaaaaacattttctttccttttttatagggaaaaaactgtaaccgttgttccggggccctttttttccaaagaagacttatttcccaagttcaaaccctttatttaacgacaaaatggccccccttttttttgggcccagatcagaacaagttttacccgttaggcgctgccatgatgggaagagccttcttgttttgccccaggatggtgaacccccccccggggatgggggacgggttaaccccacccttggccagttgatcgggcggggatccatgggcgatgtccctgggaggaaaccccagggggccccacttgggtttgccgtaaaaaaggccctccagggcctttaactgggcgaagggggagcccaacccttcgttggggcctttcttcagggggaggagcccctcgggg

SEQ ID NO: 44462 - DNA, 142 bp, Zea mays
  Clone ID: MRT4577_140554C.1
ggcgccggtgcccactgagttctccaagctgaccaacctgacatatctctggatgggtggcatgaacctcaccggagagatcccagaggccttctctagcctcaaagagcttactctatttagcatggcttccacacaacat

SEQ ID NO: 44463 - DNA, 316 bp, Zea mays
  Clone ID: MRT4577_140555C.1
gtcagttggctgtgaagttgacaatgaaaagatggaactcctgctgtcccaactgagcggtaaggacatcaccgagctcattgccgcgcgcatggagaagtttgcttcagtcccatgtggtggacggggtgtcggtgttgcggagctgcacctgctgctggcgtagttgctctgcaactgaggcatagaagaggagaaggtggaagagagggagaagcgatgatgatatgggctcagctcttcgctagctgacatcatcacagtatgtttggcatgaaccaaggaaacagagtcatttaatttagctgttatgtgg

SEQ ID NO: 44464 - DNA, 1384 bp, Zea mays
  unsure (1)..(1384): unsure at all n locations
  Clone ID: MRT4577_140556C.1
cattgggtacctcgagggcgggcggggtcctggcggaccacccttctctcctccgcatccccccggccggttcctccttgccgccgccgtcgctgtgccaagccttgcgaataaccgttgtccgggctgtggggggcagacatggcgctccggaggctgctgcaggggagtgtcctgccgcgggtaaccggcagggtttcggcaccggccgtggcgccgttttcaacggagtccggagagaccatccgtgccacgctctttccgggcgacggcatcgggccagagattgccgagtctgtcaagcaggtattcaatgttgcaggggtaccaattgaatgggaagaacactatgttggtacagaagttgatcccagaacagagagttttttgacttgggaaagcctggagtcagtgcgtagaaacaaagttggcttgaaaggtcctatggctacacctattggaaagggtcatcgatctttgaatcttacattaaggaaagaacttgggctctatgccaatgtcaggccttgcaacagcctcccaggctacaagaccagatacgatgatgttaaccttgtgacaattcgtgaaaatactgaaggagaatatagtggtcttgagcatcaggttgtgagaggtgttgtagaaagtttgaaaattattacccgccaagcaagtttgagagtggcagaatatgcttttcattatgccaaggccaatggccgggaaagggtctctgcgattcacaaggccaatattatgaggaagacagatggtcttttcctcaagtgttgccgtgaagtggctgagacgtaccctgaaattcaatacgagagtcatatcattgacaattgttgtatgacgcttgtgaagaatcctggtctttttgatgtattagtgatgccaaacctctatggtgacatcattagcgatctatgtgctggtttgattgggggcttgggcctaacacccagttgcaatattggtgaaggtggcatttgtctagcagaagctgttcatggttctgctcctgatattgctggcaaggtgagatcttggaacagtttctgctgtctaccataacttattgtgttttacttgtgtggtttcacataatatgttagagatttttgtgatttttcaaggcagttcatcagttaatgtcttttatatataatatataattgttttctacttctgtagatacagcttaacgcttaacctgaaagttgtctggcatgttcctgctattaacatttcggtatattgatattacagttactatatatttaacctgggatttgtggattgttttttagaaccttgcgaaccccgactgcntcttatgctaaagtgctgtcatgatgttgcgccaacttgcaat

SEQ ID NO: 44465 - DNA, 723 bp, Zea mays
  Clone ID: MRT4577_140558C.1
atgaaggcgttatggtgtggtctgtccacggaaggaggcggacgcgcgacagtgaccctgctccgacgagcgattcagcccacgccgaccgatctccaccgcacacaaggtcacggtcgagtccggcgatgtatggcgcgtgtaccacacacccggtcgaagctctcccaggtcacagatggactccgggcgacagcgcggacgagactctcgcgacagatctatggtggcggcggtccgagccccaaggttccaaacgacgagagagcggaggctgggatgggttcgaaggataggccctgcgtctttattcagctacgcggagagaaaatcgggcgggtttgctcctggccgcgcgaagaccacggcgattctgttgtggtgcgcgcacgactcggcgaggaagacggggatgacaccgacccaacggccccacccagcaggttcaaagtagtagatctgagaagggcacttctcaaaatccacacaccaaaaagatataaacaaatctttcgcgggatgctgaagaagctcaactcagctgaagtcaagttcagctggaaagctcagctgcagctgaagaagctcaactcagctgaagtcaagttcagctggaaagctcagctgcagctgaagaagctcaactcagctgaagtcaagttcagctggaaagctcagctgcagttgaagaagttcagctgcttttcaacaagaacactctag

SEQ ID NO: 44466 - DNA, 232 bp, Zea mays
  Clone ID: MRT4577_140559C.1
catagtctcccccatgctgacccttcccgaacctgagagtaacaactccataggcgagcactttaatcaaaacttcattgaggagcgctcatagtctccgtctctcggagctaataccatcctttcggcttcagttgctacgtacacacttacgatctatcattatcaagactcctctttacaagcacatatcattattaagtcggatcaatactctggcgataactgtacc

SEQ ID NO: 44467 - DNA, 838 bp, Zea mays
  unsure (1)..(838): unsure at all n locations
  Clone ID: MRT4577_14055C.1
agaatcagaaacgaggaacngagctcagaagaataaccagagcaagatttttacagattcctttgcaatttgcgtagcatccagttcacggcgagcaagatggtggccaaggaggcgatcccgctgctgacgccgcacaggataggccggttcgagctctcccaccgggtggtgctcgcgccgctcacgcgctgccgctcctacgccaacgtcccgcagccgcacgccgcggcctactactcgcagcgggccaccaagggcggcctgctcatcgccgaggccaccggcgtctccgccaccgcgcaggggtacccggagacccccggcatctggacgcagcagcaggtcgacgcctggaagcccatcgtcgacgccgtccaccgcaagggcgctctcttcttctgccagatctggcacgtcggaagggtctccaccaacgatttccagccagatggacaggcgccgatctccagcactgacaagcagataacacctgatgctgagtccggcatggtctactccaagccccgacagcttcaaacggacgagataccgctgattgtcgatgacttcagacgtgctgcccgggatgccgtcgaggcggggttcgacggcgtggagatccacggngcacacgggtacctattggagcagttcatganagacagctctaatgatcgcaccgacgagtacggtggcagcctcgagaaccggtgccgcttttgcggtggaggtaattgatgctatagtccatgagatggntgcggatcgcgtangcatcaggttgtctccattcgtggactacatggactgcttcgactcggaccacatgcactcg

SEQ ID NO: 44468 - DNA, 975 bp, Zea mays
  Clone ID: MRT4577_140560C.1
cattgggaccctcgaggccggccgggagcaagagggcgaggctgtgtgtgagagagggggaggcagagaacattcggcagtgtgagaatcggaatcggagatggcttggaatggccgcttcggcgacgacgaggaggggagcggccttgagctcagccttagcctcccgggctacttctccggatcgccaacccaagctgcagcaggtttcgaggacaaagcagacggcggctctgctgctgctgctgctgctgggcgagcaaagggaagcaatggcttcaaggccaggccggcggcagctgctccggtcgtgggatggccgccagtgcgcgcgttccggcggaacctcgcctcggcgtcctccaagccgtcccgcgatccgccaccaagccacagaggaaacgagtccgcgcgccgccggcggcaaggccgtcgagggcggcaacaagggcctgttcgtcaaggtcaacatggacggcgtgcccatcggccggaagctcgacctggccgcgcacgccggctacgacacgctctccgccgccgtcgacagcctcttccgcggcctcttcgctgctcaagcggcggggccaggcggggagcggcaggctgtcgcgggtatcctgagcggcggcggcggcggcgagcacacgctggtgtacgaggacgacgagggcgaccagatgctggtcggggacgtgccgtggcagatgttcgccgccaccgccaggcgtctgcgcgtgctgcggagctccgatctcaacccctcgtcgctaagggcagcgaccaggaagagagctgcagcttagtgctgcgctggcgtaccctggagtctcaactctgaacattttgcggccttttcggagggccaccaatgtaaaattgaagcggtttttcgtggatttttgttaccattaccatcatgtatgtgatcaagtagggaagcaggaatctagaggagatgagtggtgttgttag

SEQ ID NO: 44469 - DNA, 240 bp, Zea mays
  Clone ID: MRT4577_140561C.1
gtttcatctcctatttcaaaaactgctgctgctgccatctagcgtgtgaaggtgcttattcaaaaccaaaatcatatcattaaatctcgtatgctatcaaagccctacaaccgttttttcaacttctccatacctaccattaaagattaaagtttctcttccttgtggaggggtaacactgctaatgttattcgttacttccctactcaagcttttaacttttcatttaaagactacttc

SEQ ID NO: 44470 - DNA, 453 bp, Zea mays
  Clone ID: MRT4577_140562C.1
ataagcttatcaaaggaataatctgtacgaaccggaatgaaatgattcgatttagtcaatctgtccacagtaaccgggattgcatctttcttacttggtgacagaggtaaacctgatacaaaatccatcgtgattttgtcctattttcactcaagaatcataatcggttgaagtaacccagacgaaacttgatgttcagctttaacttgctaacaaattaagcattttataacaaatttcgagataggtagttccataccacgccaccaataaagttgtttcagatcattatacattttagtactacccagatgaacaggtaactaactgctatgagcttcatttaaaatcatctgaaataactctgaatttctcggaacacatattcgatctctaaatatcaaacaaccttcaccatcaatcaaaattctgaatcagtatttagatcacact

SEQ ID NO: 44471 - DNA, 1229 bp, Zea mays
  Clone ID: MRT4577_140563C.1
gagctgagcgcgctccgtttcagtttcagagagcggttgctgtgcatgtgctggtgctgcgacttgactgttcgagcacagctgcgtctgcgtccccatggtgtagataggaggggaggaagcaggaagagggggaggcagcctgtgtgtgtgagagagaggcagaaagtagtgaggaaggaagcaggaagatggcttggaatgcccgcttcggcgatgacgaggaaggcagcggccttgagctcagcctgggccttccgggctacttctccgggtcgccagaccaagccgcaggtttcgaggagaaagcgagccggggttctgctgctgctcctcctcctcctcctcccgctgctgctcgagcgaaaggaagcgacggcttcaaggcgaggccggcggcagctgctccggtcgtgggatggccgccggtgcgcgcgttccggcggaacctcgccacgtcgtcctccaagccgtcgagccacggaggcaaggagcccgccgcgagcgccgacggcggcaacaagggcctgttcgtcaaggtcaacatggacggcgtccccatcggccgtaagctcgacctggcggcgcacgccggctacgacacgctctccgccgccgttgacagcctcttccgcggcctcttcgctgctcaagcggcggggccaggcggggagcagcaggctgtcgcgggtatcctgagcggcggcggcggcggcgagcacacgctggtgtacgaggacgacgagggcgaccagatgctggtcggggacgtgccgtggccgatgttcgtcgccaccgctaggcgtctgcgcgtgctgaagagctccgacctgagcccgtcgtcgctgagggcagcgagagccgcagctgagtgctgaacgcaccctggacctggagcctgaacgttttgcggcctctccggagggcccatccgtgtaaaatcgaagcagttttcgtcgattttgcttttagcaagggattatatgtcctagtgatcaagtagggaagcaagaatctatctagaggtgatgaggggtgtcgtagaaccatgcaatcctagtgctagattttttttctgaaagtttaacaaggtttcttggcgctggataggacagcggatacgttatcgagctcgccacggcccatgggctactacatgttttgtgagttgtgtgacctggggcgacctagttcttttgtattattttttctggaaaaaatttatagct

SEQ ID NO: 44472 - DNA, 214 bp, Zea mays
  Clone ID: MRT4577_140564C.1
cgcctcccggagtgcgccgcgtctgcccccacccaggcgccgccgtcgcgcggcggaggcgatgaagctgaaccattgggagggcctctagactggcctgtcccacgtctccgacccccagccggacctgcagcagtacgcgaccggcccccacatcccgagcggggccgctctacatcacaagcccgcggcctacccctcgaccccactatca

SEQ ID NO: 44473 - DNA, 163 bp, Zea mays
  Clone ID: MRT4577_140565C.1
ggatcgggcccatggatattcgcggtgatcgatctcggcagcctcaacggcggcgggcgaggagaggtcgcgcaccttggcggagctcgacgacgcctgcatagactggggcttcttctgggtggagaaccacggcgtggacgcgcctctgatggacgaggtc

SEQ ID NO: 44474 - DNA, 263 bp, Zea mays
  Clone ID: MRT4577_140566C.1
gatagaacacatactgagactgcatgtcttgcattggaacacgtacacgttgggtgggtactcttgcaggcctgagaatttatgccggtgataaactggctgccagttgagctgagcttggtaagctctagagcctcatacgttattggtcttgctccgattctgtcggtatttttagggtttgatctgaatcatggtaaaagaggaagaaattttaaccgaattcgatcggctcatgggtaagtaataatatcattgttatg

SEQ ID NO: 44475 - DNA, 315 bp, Zea mays
  Clone ID: MRT4577_140567C.1
cagcctctggttttacagatagagtgtttaactgagagttcataggtcaatgaacataagacatgcatctactccatatatttgattactgcccacgagattagcaggctggcttgcgcatccaacctaccgcttgatttaatcaaagtagcaagacagctcttgcagcagtcttgctgctcctcaaaaaaggctcggaccaatacaagctgcagcaacagccatggcttcagcgaagcagagcaagaagatgcgcatacttctgatcccattcttcgccaccagccacatcggggcctacatcgacttcgccgt

SEQ ID NO: 44476 - DNA, 914 bp, Zea mays
  Clone ID: MRT4577_140568C.1
ggggtttgtttgggtgttttttttcaaccaaacacagggacttgcataattgaagcctgcctacagacctggccaccctacaaaacatgtccataaatccaggctacaagattttttattttaaattacaacacagaaactagacaaacataactccaagaaacatataagaaccattccagttttgcactttatgagctaaacgtaaaccactgcaattgtatgcagccgtttgtcacatgtgatacctaaagcaattttcatgaatggctgcgccaggaattacttcaaatgttgccattgaaagtgagctgctgtcccgacagtgcccaccgcaacttgtagtaataatgaaatcagtataccatgagaattttgatgccatacctcccgtaaggtattctttgaaccttgggtcatgcatcaatcatgcttgtgtagcgctaatgtgagatgggtaactcatttacatcaattcatagtgaatcttcttcaagcagatcaagccagtcttaactaaaaccagccatgcatttgattttggatgaccatcagtgccacaataatacaagacaatacgttgaacatttttcaatcatcagaacccttgtggagcgcaggttggctgttgttttgaagaggctgggaaatccagtgcagcccatcgagcaattctgagtacatcctctggtccaatgtccctcgcttcctccctttcagctcctccagcacctcaaatgcctcctccgtgcgtccagcccggcacatctcctccagcagcgtcctgtaggtgatcatatctggcttcctaccacaatccagcatatccagcagcacccgccttgattcgtcaaacctccactccaatgccagcgccgacacggcgatccccacgcgtccgcggacgcgtgggg

SEQ ID NO: 44477 - DNA, 225 bp, Zea mays
  Clone ID: MRT4577_140569C.1
gctcagaaaaccgaagttccaaattactcccagcttacatttaaggagcacccaggtaacccattatttggttcttgaaaaacgcccttaggcatataccagccctcctttggggaattgcaatgactcctcggggggcaaaaaaaaacatttgccaaactgtgaagggacgaaacaatttaacggcccagggggggatttacttggaggggaagcaaataaaca

SEQ ID NO: 44478 - DNA, 425 bp, Zea mays
  Clone ID: MRT4577_14056C.1
cgtcaacaggaccgggcctgtgttgatggcacgcatattctgcaggtccgcaagggcctgaaactcgcggctcgagccattttgcgcggcctttgccgcggcgctcagcaccgggccgcccaaccgcgctttggtctcaaccgcaatgcgcatcaggatgaagcggcgcaacatgtccatcaggacatgagccgcgatcgccagaatgacgatcgacgacagcttgatcagcgtatcgacgctgcggctggtcagcacgcggtccgacatgtcgaagagatagatcgggatggacagaaccagcaggttcacgaccagcgagaaaatgccgacggtgatgaggttgcgccgcgcggaagccagacccttgccaagaacgcccctgaatttgttgtcgcctgatcgcctgggcagttgcggatttt

SEQ ID NO: 44479 - DNA, 494 bp, Zea mays
  unsure (1)..(494): unsure at all n locations
  Clone ID: MRT4577_140570C.1
aaccggggagccacaagagcggccgcccacgacaaacacccccccatcaaatccccacccgaagcagccccacccngggcngggcaagcccaaaaacaccggccacccacccccaacagggacacacacnccgacaccagaaaaaacacgacgccgacaggacccaaaccaccagcaacaaacaacaccccaaggacccccgcacaggccaagacgcaccgagccaacaacaacagagcaagcacagcccaccccgcgaggcaagaancaaacagagaaaccacacccgaagcacaggcccgcccaaggacagcggacaaacccgcaaaaacaaaaagcccaccaccaaaaacaacccccaccaaaccccgcgcaggaaaacccaggcacgccagaaaaaagggcaccagcaaagcccccaacaccccaaaaaccccccaagcgaccccaacgccccaagcaccgggaacccagacaaaccacccacaccccaa

SEQ ID NO: 44480 - DNA, 795 bp, Zea mays
  Clone ID: MRT4577_140571C.1
gattaacggacattttttctctatggtatgaatataactttgtatacattggtaccttacacccactgcatccctagctatgcccgcaaacccaaatccccgtgtgcccgggtcccgtcccaacggtcatttccgtccaacccaaacccaagtcctcaccccaagattttcaaaattcccgagccacagcggcacagcgcagagaagcgacgaatctcctacgaatccccaatcctccagtcgatctgatcccccaaacccacagctctcatcgtcgccgacggcgggcacaccatgcggagcgacgatgcaggcggcggcgggtcccacgagctgttcgactccgtgcgccgctccatctccttccgcacgggcgccgccgcccttgacgagcccgccgcctccctctcctcctcctctgcctccgcgggcggtgctgggggcttcagggagcggatcagcaaccgcctccgcaggtcccgggggatggggggttgctcggcatggcggccaagggcccctcgcccacgcgccgcctcctgccgcagccgcccccgcccttggccggggtcttggcctccgacggatgtggtagggtaggggggcaaggaactggcggaggcgaagagaacccgccgatccggtggcggaaaggcgacctcatcgggagtggggcgttcgggcaggtgtacctcggcatggacctcgactccggcgagctcctcgctgtcaagcaggtttctgatggaagcagcaacgcgacaagagagaaggcccaggcacatgtaacggagc

SEQ ID NO: 44481 - DNA, 401 bp, Zea mays
  Clone ID: MRT4577_140572C.1
cggaacgaccgacgcgacccacacgtccgcagtgtgttgcgatctaaatcaaactcatccgcccgacgcttggtgctggcggaggacaggaccaagaagaatgtccaccgtctcggttcgcttctacgaccgcagacagtaacgatgcgggtgctcaacgggtgccgctcaacgatagcgaactgcagatttcgactataacttacacgcggacataaagcccgtccggaccgacagtgacatggtactggacacctgagtcgacgctgtggcgctggacacatcgttgaaactgaaactgcctcgttgcaacatccatactaatctaccaccctcgcgttcctctccctaaatgcccgccccgttgcactcctacggtaatctaggtaatctggtcgccg

SEQ ID NO: 44482 - DNA, 402 bp, Zea mays
  Clone ID: MRT4577_140573C.1
tgagctcacgttgtagagagctgcccttgagtctgtctagcaatggcgcgaacctcgtttgctaatattgcatatggtttccctcagatgagatctgatcacctgcgtatctactcttgaaccaaatactgagtgcatggctttcttatgggcgatttggactatcagcttccgcttagtttctcactggtctcaggtagtacattaagacatagtggtgcgctagaaaggcccaggagcaccctttacttttcgggctatgctctatgtctatttgactcctcgataccatgggaaagacttacgggaagcgatcctcgaaatgctcatcaggagatcatgcgctacactgttttggttcaggaactgaaacgatgggggtcatatttcatctgcgggaaa

SEQ ID NO: 44483 - DNA, 581 bp, Zea mays
  Clone ID: MRT4577_140574C.1
ccggccgggaccaatctctgtccttatttcaaaccctaggctatctcaagcgcgccaccgatgtcgaaggcatcacctgactgaaggacactgtcctcctccccccggacctcatcttctagatcgaactgcggaacctggcgttcaccatctcaagtaaggagattttatacatctttggctagtactgatggattcggcttatccgactgagcaacgccaaggacacgctcggcaccgtttactctgtctatcacgaactctaccacagacacattcaccccaaactgctctccggcttatcctgccttgaacagataccttatctggctctactaccaggccgacatcatatccaagatgatgtatatcacagaccatggcttctgatgtcaccactgtgcagtggactcacgaggattgctgcttgatcgcgggaccgtcctgctccaattgagcgcatagtgtattgccgctgcatgctgctgtgtgaataagagtgatcagaatgaacctgtagcgtgcggtgtgatgagttacttccagtgtggataataactctggagacattcgggctccat

SEQ ID NO: 44484 - DNA, 374 bp, Zea mays
  Clone ID: MRT4577_140575C.1
ctggctgtctacgagagagtctttggaccaggcaagatcaaggatctctttgaaggcgaagagaagccagaagatcagcaacagcaccaagttgaacaaggaggagaacctggagccgagccaggaacgcagcagccaatgcaaccaggcagatcggatacagtcaacctggcacaagatgtcatgaaccagaataccaaccaattagacaccgaaagggaaatggagagacatgaggatgagaaggaagacaaggagaagaagaagaagggattcttctcgcggttcaagcgaagtaatagttagttttagatgtacctcaagcgagtgaataaggattgacgagttttggaagatgatcatcacagcatttt

SEQ ID NO: 44485 - DNA, 245 bp, Zea mays
  Clone ID: MRT4577_140576C.1
tgaggatactgatgatattggtgctagttttggctaaaacgacgctttccagagctgtctggatctgacgtcacaaatagatgacggggattcagggaacgaactatgttctactggatcttgatatcagagggatgctgagcataatttcgggtactgatctagtgctgaaacagatttggatgaacgtgacagtagggactgcttactgtggtcagtatggtcctttacacgacggagtgaat

SEQ ID NO: 44486 - DNA, 373 bp, Zea mays
  Clone ID: MRT4577_140577C.1
cggccgcccttttttttttttttttttttttttttttttttttgtgtttttttttttttttttttttttttttttttaaaaccaccatgtaattgtttgggaagaaaaaccttgattgtttttactcgcacatgggaaaaacaattcgacccaaaaaaaaaatttaaaatccaccaaatgcaaaaacttgacaaaactttccgaaaacatggccaccatggatcgggggcagtttaggccacccagattgcttgttttgaaaaaagaaaattaagcaaaagttcttgcttacccgagggcgaaaacaaaaaggttccaccccacccaaaaaaaaacaaccacggggactttctatacgaggaccaagtaagca

SEQ ID NO: 44487 - DNA, 153 bp, Zea mays
  Clone ID: MRT4577_140578C.1
cctacttcatccgtggtgctcgcgaacgcccatggtggaggtccgcgtcgcgcggcgagtccaactgaggagccgaccgcaggggtgtgggtctctggcgcagtgtagaggcaggttacggaacccaactggcgtgaaggtcggcgggcagct

SEQ ID NO: 44488 - DNA, 514 bp, Zea mays
  unsure (1)..(514): unsure at all n locations
  Clone ID: MRT4577_140579C.1
cattgggacctcgaggcggccgcatcgcggacgccagccccggggagcccgtggtggagtgcaccgggcagggcgtctggttcgtggaggccgctgcgagctgcgcgctcgccgacgtcaactacctcgagcgccctctgctcatccccaaggaggagctcctcccgcgacctccccccgaggagaagctcgaggacctcgtcctcatggcacaggtgaccaagttcgcctgcggcgggttcgcggtcgggatctgcttcagccacctggtgttcgacgggcagggcgcggcgcagttcctcaaggcccccgccgtcgttcacggcgttcagcttcgtgacccaggtggtcgagatctcgccggagagcatcgcgcgcatcaaggacgacttcaaggacgcgacggggcagacctgctccaccttcgacgctgtcacggcgtggnnggtntcaagtgncgngngntgnngatggngctccccgacgntgccgaggnccggctcggnttcgccgc

SEQ ID NO: 44489 - DNA, 1788 bp, Zea mays
  Clone ID: MRT4577_14057C.1
cccggccgggccgggctaaatttctgtcatatgattttttttattagaattatttgtgtgctatagcctagaagtagaccagcacacctcgcacccccgcctctcatcagcatcacccatcggccatctactccagtctcccactcacctatctcgcagcgcccgagcaatcgccacgcccacgccccaatggaagacagcgccaccaatggccatggggttgtgacggctgtcccggcctcgtggaacttcgagccaaacgagaccctcctgggtcttccggcgctctcggttcgcggcgtgctgaccagagtcatggccgggatgttgcccgacggtgggcgggcggtggtccggttgggcagcggcgacccgacagcgttcccgtgcttccggacggcgccagaggccgtggacgccgtcgccagcgcggtccagtccgggcagtacaactcctattccactagcgtcggccttgagcccgcacggaggtccattgctcagtacttatcctgtgatttgccatataaactgtcacctgatgatgtctacctcacaagtggttgcactcaagcaattgagatactctgctctgcgttagctcgtcctggtgcaaacatcctgcttccaagacctggatttatgttctatgaggcgcgtgctatcttcaatggcatggaagcccggtacttcaatcttctacctgggaacggctgggaggttgacattgatggcgtccaagctcttgccgacaagaatactgttgccatggtcattgtgaacccaggaaacccatgtggcaatgtgtactcctatgagcacctggccaaggtcgctgagaccgcgcgaaagcttggcatattcgtcatagcagatgaggtttacgcacacttgacatttggagagaggaaatttgtgccgatgggtgtgtttggggctgtggctccagtgttaacactggggtccatatcaaagagatggatggtgcctggatggcggcttggatggattgttaccaatgatccgaatggtgtatttcagaggactaaggtagtgcacagcatcaagagctaccttgatatctcctctgatcctgcaacatttgtccagggagcaataccaaaactcgtggagaacacaaaggaggaattcttcgaaaaaactatcgaaattctaaaacgatgtgtagatatatgctgtgaaaagctgaagggcatcaatgcaatcacgtgcccaagcaaaccagagggatccatgtttgtaatggtgaaactggatctgtcctgcctggagggcatcaaagatgacatggacttctgctgccggctggcaaaggaagaattagtggttgttctgccaggatgtgctgtcggatacaaggattggcttcgcatcacctttgcgattgatccatcttctctggaagaggggcttgacaggctcaagtccttctgcttgcgatacagaaagccaacaaagtgataagataaagtcaccagttctatgcaacagagacaaaaattgttatgaacttctgcacagatatatgatattgtatcatcttcactcgaagatgatatatttgatgctctttgtctatagtaaataaatgatgtctcttctctgtcatctacttatctactgtttgtaggcgcaacacaaattttaggggatatgaagtgtagaagactctgcctcttgcacgaaaccatcatgcaagtttggcataataactttcgaagtgaaatcaccacattgattctgctccaaaaaaaaaaaaaagcggcc

SEQ ID NO: 44490 - DNA, 418 bp, Zea mays
  Clone ID: MRT4577_140580C.1
cttcagtatgtgaaaacccagctcttcaaccatataggcttcaacaagcaatcgcagcaagcaacatacctttatcgcccttgttgtgtcaacaatcgccagccctatctttggtgcagtcattggtacaaaccatcagggcacaacagctgcagcaactcgtgctacttggttgatcacagcggacgcgtgggtgcgagctgcgcgctcgccgacgtcaactacctcgagcgccctctgctcatccccaaggaggagctccttccgcgccctccccccgaggagaagctcgaggacctcgtcctcatggcacaggtgaccaagttcgcctgcggcgggttcgcggtcgggatctgcttcagccacctggtgttcgacgggcagggtgcggggcagttcctcaaggcggccggcgaga

SEQ ID NO: 44491 - DNA, 868 bp, Zea mays
  Clone ID: MRT4577_140581C.1
aaccatattattgagaccaacaagcaacatagaaagtggaatacattagcaacaatagaggaacaatggcggccaagatattttccatccttatgctccttgctctttctgcatgtgttctggacgcgaccatttttcctcaatactcacaagctcctatagctgcccttcttcccccataccttccatcaatgaccgcttcagtatgtgaaaacccaacacttcaaccctacaggctccaacaagcaatcgcaacaagcaacttacctttatcacccctgttgtttcaacaatcgccagccctatctttggtgcagtcattggtacaaaccatcagggcacaacagttgcaacaactcgtgctaccattgatcaaccaagtagctctggcaaacctttctccctactctcaacaacaacaatttcttccattcaaccaactgtctacactgaaccttgctgcttatttgcagcaacaactattaccattcagccagctagctactgcctactctcagcaacaacaatttcttccatttaaccaattggccgcactgaaccccgctgcttatttgcagcagcaaatactactaccatttggccagctagctacaacaaaccgtgcttcctttttgacacaacaacaattgcttccgttctaccagcagttttcggctaaccccgcaactctcttacaactgcaacagttgctgccctttgtccaacttgctttgacaaacccagcagccttctaccaacaacacatcattggtggtgccatcttttagattgcttatgagttatagttcaataatgaagttttttggctgatatttgtggcctcctagaaataagaagttacatttcc

SEQ ID NO: 44492 - DNA, 530 bp, Zea mays
  Clone ID: MRT4577_140582C.1
ctgaagaaataaaatcagttgaattgaaaactaaatttaagttgtatgttcacaatgatcatagaatctagtaactttgacaaatcaaaacttccaaaatctacgaaacttaacaatacacataatagcatttcaaaagatatataaataaatattccaggtagtataaggtaatcaggttgcaatgcaagtcaaaagaaatccgatacaataaagtaactctgatagttcgctattggaaaactgggacttcgtgatacagagttaaaaagctcatggttgctggaaaaagccctctaatcagataaaccagccttgctcttcaagtgtgccttgaaatccatgatatcaccttcccaccttgtcaccgcctgattctcacacacccaaatctcttgagcaacctggttgatcagcctgaaatcatggctcaccaagaccaaaccaccatcccactcattcagtgcctccgccagggagtcaatggtctcaatgtccaaatgatttgtcggctcatcgagcagtagcag

SEQ ID NO: 44493 - DNA, 383 bp, Zea mays
  Clone ID: MRT4577_140583C.1
cttttttttttgtttttttttttttttttttttttttttttttttttttttacaggaaagggaactttttatttctgggtggccacatacatcatccaaaaaactttattattgaattacaactaataagcaatttaaaagagggccccaccaatgatgtgttgttggtaagaggcccctgggtctgtcaaaccaagttggacaaagggcaacaattgttgtaattgtaaaagggttgcggggttagccccaaactgctggtaaaaaggcagcaactgttgttttgtcaaaaaggaaacacggtttgctgcacctaactggctaaatggtaacagtatttgctggtgcaaataaccagcggggttcagggcggccaattggtt

SEQ ID NO: 44494 - DNA, 2835 bp, Zea mays
  unsure (1)..(2835): unsure at all n locations
  Clone ID: MRT4577_140584C.1
agcagtggtaacaacgcagaggacttttttttttttttttttttttttttttttggaaaattgaaaactaaatttaagttgtatgttcacaatgatcatagaatctagtaatggacaaatcaaaacttccaaaatcagaaacttatttttttttttttttttttttttttttttttttttttttttcgtcaatttttttttttttttttttcgcatttcaaaagatatataaataaatattccaggtagtataaggtaatcaggttgcaatgcaagtcaaaagaaatccgatacaataaagtaactctgatagttcgctattggaaaactgggacttcgtgatacagagttaaaaagctcatggttgctggaaaaagccctctaatcagataaaccagccttgctcttcaagtgtgccttgaaatccatgatatcaccttcccaccttgtcaccgcctgattctcacacacccaaatctcttgagcaacctggttgatcagcctgaaatcatggctcaccaagaccaaaccaccatcccactcattcagtgcctccgccagggagtcaatggtctcaatgtccaaatgatttgtcggctcatcgagcagtagcagttgcggctgcctatatgccaaccatgcaaagatgacacggctcctttgcccatcagaaagattcctcattggcatcacctgcgcctttcctgataggccaaacctgccaacagcagctcgcatcttctcttcttcggtcccagggtattccttcatcatgtaagccagagccggcatgtccagatccagcttgtccgcaagatgctgatggtactgtgcaatgcgcaggtgattgtggcgccgaaccatgccatctaatggagcaaggtcaccagtcataagcttcagaagagtgctcttccctgcaccattgggaccaaccaatgcgattctagagtcaagatcaacaccaaagtcaagactcttgtatatgagattatctggtgtatacccaaacttgacttcaacaaactgcagcacaggtggaggaagtttgcctacatctgtaaacctgaacactagaactctgtccctaacaaccttctcggtgagaccacctcgctccatctttgcaagagttttctctttgctctgagcctgacgagcaagctttgcagaaccatgaccgaagcgagcaatgtactccttcattgaagcaatctgttcctgctcccatttgtactgcttcatttgattctcttcaagatcggagcgagtttgaacatactgatcgtagttaccggtgtataacttgagcttcttgttttgcatatggataatgttagtacacactccatttagaaaatcttgggagtgtgatatgacaacaagtatgcggtcaaatttcttcagtgtctcttccaaccagacacaagcctcaagatctagatggtttgtgggctcatcaagcaaaaggattgttggattcataaacagtgctcttgctaaagcaatcctcatacgccaacctccagagaaatctttagttttctttgcttgcatttgtttgtcaaaacccagaccaaataaaatttcagcagctcgcttttctgcagttccagcatccattgcatctagacgctcataaacacgctccaatgcttcaccaccaccatcatcctgtgcagccaaaatttcagcttccttttccaacttcactctttcttcgtcacaactaacaatggcttgcagtgcagacatgtcagaagcttcaatctcatggcttagatggtatatgtccatgtgttcagggataggaagttctctgcagcctattgctgtgagaagagtagattttccacagccattcaacccaagcaaaccgtatcgccttccgtagttcagctccaaatcagaatccacaataaggtcgtgtccatggaatgttaaagaaagagactctatgtggatatcccgggaaagggggtgagatgcgaggaccccggtgcaggtgcggtctgatagcttaagcgccacgacgccgttcgccaccttatcggcggccgcggccgcagatgaagacgacgaggacgccaccgaggccttgcctcccctctttgcggcggcagcggccttcttctgggcggccttcttcttgctggcctccgacaccatggcgtcgatcggggacgggggcgctggagtgcttggggacgcggtggcggctgcgggcaaacgggaggtgaagggtaggagaaggggaagtgctcaactcacgtttttttttttttttttttttttttttttttttttttttttttttttccgccggttggatgagaaaacaacctcccatagtgcttgcatcttgaaacccatggtagaactgtgtagcctgcgggctatacacctcaaaaatcattgaagccgacaccagtaaaccanaatacaagaattctgtccctaacattcttctctgtgagaccacctcgctcncatctttgcaagagttttctctttgatttcagcctgacgagcaagctttgcagaaccatgaccaacgcaagcaatgtactgcttcattgaaggcatctgttcctgctcccatttgtaacacttcatttgattcgctgcaagctcaaagcgatttagaacctgggaactcttgtggtgagagacggccatggaattggacgtaaagcagcaccgccacagccaaactcaacataatatgaggtggtggccaaggctgctgatgtggcactacatcccagctgaaaccactttgtatgaggttgaagcaaatcatcaaacacttgttgggcgagttggttttttttt

SEQ ID NO: 44495 - DNA, 471 bp, Zea mays
  Clone ID: MRT4577_140585C.1
tcatacgggcgggggggcgggggcaagctttttttttttttttttttttttttttggaaatgtaacttcttatttttagggaggccacatacctcagccaaaaaacttcattattgaattacaactaataagcaatctaaaaaaggcaccgccaatgatgtgtgggggggggaaggctgctgggtttgacaaagcaagttggacaaagggcagcaattgttgcagttgtaagaggggtgcggggttagccacaaactgctggtaaaacggaagcaattgttgttgtgtcaaaaaggaagcggggcttgttgtatctagctggccaaatgggagtagtatttgctgctggaaataagcaaaggggttcagtgcggccaattgggtatatggaagaaattgttgctgcttagcgtaggcagaacctagctggcttaatgggagtacatgttgttgctgcgaataatcttcaaa

SEQ ID NO: 44496 - DNA, 567 bp, Zea mays
  Clone ID: MRT4577_140586C.1
gagcggccgcccgggcaggtgcttttttttttttttttttttttttttttttttttcttttttttttttttttttttttttttttttttttttttttttttttttttttggattaaaagctgggtccccccaatcttaggaaaagtatttttcgaaccccctgggggaccaatatcccattaaaatcgggaaagggaactctttattttgggggggccccatacatcatccaaaaaactttttttttgaattccaactaataatcaatctaaaagggggcccccccaatgatgtgttgttggaaggaggctgctgggtttgtcaaaccaagttggacaaagggcaacaattgttgtatttgaaaaagggttggggggttacccccaaactgtttgaaaaaaggcaaaaactgttgctgtgtcaaaaaggaagcacaacttggtgcaactagctcgctaaagggcaaaagtatttgctgctgcaaataaacaggggggttcagggcggccaattggttaaatggaaaaagtttttgttgctgaaagtaggcaaaagctacctggctaa

SEQ ID NO: 44497 - DNA, 457 bp, Zea mays
  Clone ID: MRT4577_140587C.1
ggccgacagtgtctacagtcaatgatcagtggcggtcgatatattttgcatccctaagcgtcctcgctcttcatgtatgcgttggtaacacaagcattttcacttaatactggccaactactatggctgcacttacatcaccgtacctttcatcaacgaccgctccaacctgggaaaacccagccgtataaccctacaggctccaacaagcaatacgaacaagcaacttacctttatcacccctgttcttgcaacaatcgccatccctacctttgttgcagccattggtacaaaccatcagggcacaacagctgcagcaactcgtgctaccagtgatcagccaagtagctctggcaaacctttctccctactctcagcaacaacaatttcttccattcaaccaactgtctacactgaaccctgctgcttatttgcagcaacaacaactactaccatt

SEQ ID NO: 44498 - DNA, 512 bp, Zea mays
  Clone ID: MRT4577_140588C.1
tcgagcggccgcccgggcaggtgctttttttttttttttttttttttttttttcttttttttttttttttttttttttttttttttttttttttttttttttttttggatgaaaagctgggtcctcccaatcttaggaaaaggaattttcgaacaccctgggggaccaatatcacattagaagcgggaaaagtaacttcttattttgggggggccacatacataatccaaaaaactttattatggaattccaactaataatcaatctaaaagagggccccaccaatgatgtgttgttggtaggaggctgctgggtttgtcaaagcaagttggacaaagggcaacaattgttgtagttgaaaaagggttggggggttagccccaaactgcttgtaaaaaggcagcaactgttgctgtgtcaaaaaggaaacacaacttgctgcagctagctcgctaaagggcaggagtatttgctgctgcaaataagcaggggggttcagggcggccaattgg

SEQ ID NO: 44499 - DNA, 318 bp, Zea mays
  unsure (1)..(318): unsure at all n locations
  Clone ID: MRT4577_140589C.1
cgggntacaaccatattattgggtaccaacaagcaacatagtaaagtggaatacagtagcaacaatggagcaacaatggcggccaagatattttccatccttatgctccttgctctttctgcatgtgttgctaacgcgaccatttttcctcaatactcacaagctcctatagctgccccttcttcccccataccttgcatcaatgaaccgccttcagtgtggggaaacccagtccttcaaccctacaggcttcaacaagcaatcgcaaccagcaacctacctttattacccccgtgcttttaacaatcgccaccccta

SEQ ID NO: 44500 - DNA, 573 bp, Zea mays
  Clone ID: MRT4577_14058C.1
aatcccagccgctcgttcgtccctccgagcttcccacttgctagggccgactatcgtagtccgcacaactctaaacatcgccgacatcctgccatttgcattgcgcgcgagtccggacactgattttgcatctggtaaagcgccgcgtccccgcactaactaaatatgtcgtgcgccatcacctgactgagatcaagggggcgatgctgatccaccagcgccggcccaaagaactgcagctgctgcagacgcggacggtgaccactccgcgtgccatcgccggagagcccgatgagcctgggcgaccaccttaggtatgccgaggagtcatacaggtcactcctctgtgtcaggatcacaaggacactgggtgctctctgtgctccaccagcaccgtcataatgaggataagaatcgacccccagaggctcaagaagatcgggcgccaccgtgctctgactccctactgtggcctccgtggcgcgggtagtagaccactaccactgacaggcgtggaaaaactgttgctgtatgcaagaacagccagtctacatatctatcgacagatctcag

SEQ ID NO: 44501 - DNA, 321 bp, Zea mays
  Clone ID: MRT4577_140590C.1
atatatgcatagctctcgcgactgctctaatggacgacgccctaaaacggtgggacatgaatgtcacagttatgcacaaggtcatgctcacaagaaagttcgcattagcagaagaactgagtaaacatacgctccatatcacgaaggataacagtggagacaataccgacagaacatgattcagggaagtaactatccaaggtgtgaccacaggtgtacagaccaccagcatcatggctgcgcagcacccagacatgtagaacaaatgacttcgcacgatgcaccacagtaccgggtaatcgatactcatgaacacacatg

SEQ ID NO: 44502 - DNA, 289 bp, Zea mays
  Clone ID: MRT4577_140591C.1
gtctgatgtggaccaaccggggcacggaggacacaggcaaagcacttgctcaaggccgtggctaagctgacactgttttacgccgaccgcatcgaccgctatatctaccagacacacgagctcatagactacgcatagctccgacctcagagcctaccttatgacccacaactatgcatgttatcgacgatctacatgctaagcctacagaacacaacacttagattgaccataaagttgaatacacatggccaatacaaaccgtaaaagctctggaggatgatatcat

SEQ ID NO: 44503 - DNA, 140 bp, Zea mays
  Clone ID: MRT4577_140592C.1
gtccgcaacgctatatcggcgctcacatgggtcctagtcagtgtaggcggtctacacgaatcagcagggtctcacgctgatgtgcggaagcactccggagatgtccttgggtgtaagtctgttcgcgcgctttgactgtc

SEQ ID NO: 44504 - DNA, 585 bp, Zea mays
  Clone ID: MRT4577_140593C.1
ggtaccggcccccttcgcggtttttttttttttttttttttttttttttttttttttttttttttttttttttttttttttttcaaaaacagccaaatggtttggccaaaaacatgggcccccgatggcgggacaaaaagcgataaagcccttcgcctatttcaaactttacaaaaccgggaaaacagagcagcattcgggccctttcccccttgaggcggggcgcgacctggatgccctgggccataaggggaaccctttggggggggagggcccaaaggttggggccctaaaaaaaacccaccaaatccccctggggggcctcttgcagggggggaacgggggaggacggaacccaagggtcggttttgaagttttgcgcaatctccccccccagccgtgggaggggcagtttccggagaagcagctccgggctttttgggaactgggggatctcgcgaaaagcaacgggcccggggcgaaacctgggcggttttttcaccccgcggggggccggacccgatttgcgcaatcaaaggatttaaaatggaaaatcggcctcgggccaaattcctgcagccgggg

SEQ ID NO: 44505 - DNA, 348 bp, Zea mays
  Clone ID: MRT4577_140594C.1
cggacgcgtgggcggacgcgtggggtcgcggcgtacccggcgctcatcgccgactacctcggccaggccgtgcccaccggcggcgcggcgcgcacgggcgcggtggccggcctgacggtgctgctgtcgctggtgaacttcaccgggctgagcgtcgtcgggtggggcgccgtggcgctggggctcgtgtccctcgcgccgtccgtgctcatgacggggatggcggtgccccaggtgcgcccgcggcggtggacggtgacggtggagggcggcatcatggactggcggcttttcatgaacacggtatgttggaacctcaactactggtacagcgccagcaccatggtc

SEQ ID NO: 44506 - DNA, 694 bp, Zea mays
  unsure (1)..(694): unsure at all n locations
  Clone ID: MRT4577_140595C.1
catctgttcagttataatagagcttccatgaggcagcaactacctgcatcatgaaaatcacttatgaccatctatgttatggttgtcctctaagtcatcttattaagcctagcaagtgcttaaaagatggtcatttaaagatttttggaagtgccttctttttacagtatttctcttgattaatattttggtttgcttagatttgactgcaaaagagcagcactaggaggattgaacagtttttccatcttgttttttaacagcgcagccgacattccatacccccaaagtttttattagccagttccatttgacttcatttatattgtattcttggtctcttagttacattgtttttttttcaatcttcatgtagaggtttttatactgtgtattcttggtctcttaattacattattttgttccaatctttatgtagaggaagttggttgaaatgatgtgcagtgtttttgttgcttcatggactggagtgatcaagtaccatggaccacgcccaagcacacgacctcatcaggtatttgttgcaaaccatacatcaatgatagatttcattattctggagcaaatgacagcatttgctgtcatcatgcagaagcatcctggatgggttgggatttattcagaagactatcttnggaagtggtgggttgcatctggtttaaccgtaatgatc

SEQ ID NO: 44507 - DNA, 2047 bp, Zea mays
  Clone ID: MRT4577_140596C.1
gatacccttcaccctcctcgacgtcgcatctccctggcacgagctcccactgcactgctgctccgctgccgctaccctttccctctcccttctcgtcctcggtcctccccaacccatggccacggccaccaccacccactgccccttctcccaccacgctatttatcgcggctgcacgactcctgcccatcaggcgccatagagacgcgtgggaccgaagccgccgatcaagcgctgctcggggcggagcagcggccggcggtggtgagtgctggcagacaggccggcaggtcaggcagagtgaccagctggtgagtcgaagcttgagcggggagctggactttggcgggttccggcgggctccggagcggagatggtgctggatctcaatgtagcgtcgccggcggactcgggcacgtcgagctcgtccgtcctcaactccgcggacggcggcttccggttcggcctgctcgggagccccgtcgacgacgacgactgctccggtgagatggcgcctggcgcgtccacggggttcatgacgcggcagctcttcccgtccccgaccccgccggccgagccggagccggagccggtggcggcgccggtgccggtgtggcagccgcagcgcgccgaggatctcggcatggcccagaggccggtggcgccagcgaagaagaccaggcgcgggcctaggtcgcggagctcgcagtacaggggcgtcaccttctacaggaggacgggccgctgggaatcgcacatctgggattgcgggaagcaagtctacctaggtggttttgacactgcgcacgcagccgcgagggcatacgatcgagctgcgatcaagttccgcggcctcgacgctgacatcaacttcagtctgagcgactacgaggatgatttgaagcagatgaggaattggaccaaggaggagttcgtgcacatactccggcgccagagcacggggttcgcgaggggaagctccaagtaccgtggcgtgacgctgcacaagtgcggccgctgggaagctaggatggggcaacttcttggcaagaagtacatctatcttgggctctttgacagcgaagttgaggcggcaagggcttatgacagggctgcccttcgcttcaatgggagggaagctgttactaactttgagcctagctcctacaatgcaggagataataacctgcgtgacaccgaaaccgaggcaattgatgatggtgatgccattgatttggatttgcggatttcacagcctaatgtgcaagaccccaaaagggacaataccttagctggcctccagccaacatgtgattcccctgaatcttcaaatacgatggcttctcagccaatgagctcatcatccccttggcccgggtatcaccaaaacccagcagtgtcatttcaccatcagcgcttgtactcgtcagcttgtcatggcttctttccgaaccaccaggtccaggaaaggccggtggagcgaaggcctgagctgggcgcccagccattcccctcatgggcatggcaagcgcagggctcccctcacgtgccgttgcaccactctgcagcatcatcaggattctctaccgccgccggggccaacggcggcatgcccctgccgtctcacccgccggcgcagttcccgactactacaaacccgttcttcttcccctagaccgcttttgacatgacagcttgctgttccggctcagctctcggcgtctgggatggcagctggtcttgcgtgtggcgtctagcagctctggtgatggaagaaagtgattgtgttttgtgtgtgtgtgtgtgagagagagagagagccataataagaagcgacatggctggtctccctctggtatgtgcctgttaggatatgggatatctccatgcatggattgtttccgagacagtagtagtattttgttgtagtcgaccatgcgtgtacatcagtataactggatctttgaagagctgagattttatgactcaacaagcattgacataatggcatgcactccaggaccactaagcaaaaaaaaaaaaaaaa

SEQ ID NO: 44508 - DNA, 167 bp, Zea mays
  Clone ID: MRT4577_140597C.1
cttaaacaaaacggtttgcaaaagtgatgttaaaacttgaaaattggagagtaaaggtgcttatattgtgttctttgaagtcatggtagaattcacatcatatcattcttatcttgctcacagtattttcttttaaggacttttgtctgatcaaagatttttgagta

SEQ ID NO: 44509 - DNA, 362 bp, Zea mays
  unsure (1)..(362): unsure at all n locations
  Clone ID: MRT4577_140598C.1
agtggatccgcgcgcgggctgcaggaattcgggcacgaggccgtgtcrgtacctctggtgccactgcccggcagtcgcgccggngattcdttcgacratgttccgtccttcgccattctgccagaacagccrtcttrccggccrcgtrtckctttccagccaaggattgacttttgtgttatttgggaagaagcttggggagggbgcattctggggtcwgtgtgtaaggcttcacttggcagaaccccggaascggygaagaasaaggggattttggycgtgaagaaggaacagaktattgkwskaktggagattggatgaatgaangtgtckaggaggggwtsygtgattactagtcggga

SEQ ID NO: 44510 - DNA, 230 bp, Zea mays
  unsure (1)..(230): unsure at all n locations
  Clone ID: MRT4577_140599C.1
cccaactggngccaaggtgacgaaggctgctgccaaagaaagaaatgatntatnctgtctggtgctgtncntgcttgttggttanctcgtggaaancttaaaatatctcgtcttgttnacatccttgcagttgtcncgtgaaacacgtaanctntgatggcaatgtttgcctgnncatgaantattattactttcgttgaaaccgtgatnctattnagacttaatttttt

SEQ ID NO: 44511 - DNA, 391 bp, Zea mays
  Clone ID: MRT4577_14059C.1
ggtttattcccttttttttttttttttttttttggtgttttttttgggtttttttccggtttttttcccggggaaacgcccgcaaaaaaatttctcacaaccggaaaaaatatcgaaaactgacaggcaggcgtaaggggcccaagtttttaaacttccacaaatggccaaagcgcatttggctcaatagaaaacccatcaatcatccctcccggggtcggtctaaacagggacttggggaaaactaaatttcagatcagcccctccgattcacgccgcttccggaaggcaaattcacacgggttctcgtttacatgggcgggaacccctggacgggtcttccaaacgggagaaacagggccaccaggggggcaaacccctttttggtaac

SEQ ID NO: 44512 - DNA, 610 bp, Zea mays
  Clone ID: MRT4577_1405C.1
aaacgcggcacgcccccaccctacctccgtgctcgcttcctcggtcggcgagccccgtccccggtgccggatggggcggagatcctcggctccgtttgtttggtgacattcgtttgtttggttccaggttttggtggacatctgatttcctttggatgaaatggtccgtatgaagtgcagatttcactttctttaattgtggacaccttgtggttcgaaaaggccaccatttcctttgctcattgatccacggtctcagtcgaggtttgtttttcttatacagttgtaccaagggtttagagtttggggtatgctgggtaagtatatatatttccattagcattctcttcatcctattattacgtacttctactaaatattcctatttgataatattcatctcctgttagaaaccataaagcaatagcaaaaaggactctagaacagatactttacacaaggtatgtatgttttattgtctgaatagaacaaaactatatccaatcatacttttagaacttcaaaggagcatattctgatgtccaataacaaacatgaaacatgcctttaagttcagcagcgcacatgaattcaggggaattaaacaccc

SEQ ID NO: 44513 - DNA, 374 bp, Zea mays
  Clone ID: MRT4577_140600C.1
gtgctgatggtcgtgctggtcatgttcatcctgaccgccacggcgcagatcgccggcatcaaggtcgacctgcccaaggccagttcgtccatcgccctgtcgcagcccaagaccaaggccatttccgtcaacgacgccggccaggtgttcctggacgcctacccggtgaccctgcccgagctggaagaccggctgcgcacggagaaggcactgaatcccgactttccggtgatcgtgcgcggcgactccgccgtgcagtaccagaaggtggtggaagtgctggacctgctgcgccggctggaactggcccaggtcgggctggtcaccggcaagccgaaataaggggccgaggcgactgtcatgccgcaccacgc

SEQ ID NO: 44514 - DNA, 310 bp, Zea mays
  unsure (1)..(310): unsure at all n locations
  Clone ID: MRT4577_140601C.1
cgaagcaagaaaaggattgcccgtcgactcatttccccggatgacaaaaaaacggggggggaaagcaaagcttctcagagatcaaaaaaccaataccgccaaccttattaccccagtaccaaagggggggaataaagccttacaccgtaggttgtaaccccccccccgccggatggataaaacccgccggaacctttccccgttgggaccccctcggggccgttcccgggttagcgggggcccccanccccgacgaccccgccccntttgagcgttttttcctcgtcaccctgcgggggggggcttcccc

SEQ ID NO: 44515 - DNA, 426 bp, Zea mays
  Clone ID: MRT4577_140602C.1
cccccccccccccccccccccccccatcaaatgggaaagcggtcctgaccccggtacaaatccagaatccgagtaccgctgagttgtctatgaatggagggaggccgggagttgaaatccaactcccggggagttcccacaatgaaaccgaactacactggaagatcccttttaactaacctatgattatctggaacacgattgggctttttcgtatgctaggtataaaaacgactccctcaaatgggaaggacctcccttataatgacgcggggtcctccgaagcccaagtgcttagtatcggtccgcgaatgatacaccggaaaaacccgtcgcaactattcattttggaattgaggcccgtcggtcgttaaaccttaaaaggctcttacgttttgtcgccgaaaaaccggatgatgctttagg

SEQ ID NO: 44516 - DNA, 801 bp, Zea mays
  unsure (1)..(801): unsure at all n locations
  Clone ID: MRT4577_140603C.1
ttcgcggccgcgtcgacgttgatgggaagcggcgacccgcgctcttcgtactcgagagggcctgcctcgaggtcggcaaagtcggcaagactatgcaaattttgaactctgatgatcatgcgaattatttgaggaagcagaatcgcaatcctgcagattataggcctgatatcattcatcaggctgtttatgtgagaactgaaaagggcgtattgtttgaaatcaaacctcatgtccgcatgccaagaacctttaaacgtttctgtggtttaatgtcacaattgttgcaaaaactgagcattacggcagttggaaagcgtgagaagcttctcaacgttgttaaaaatcctgtcactcgttatctacctgttggtgcacgtaagattggcctttcatttagtgctgagaagtcagtcaacttgtttgactatgttgccaaatccaatgacgacgaacctcttgtgtttgtggttggtgccatggcccatggaaagatcgacaaggaatatacagatgattacatacaaatttgcaactaccctctcagtgctgcctgctgtttaaatcggatatgcagtgccctggagcagaagtggaacatccaatgaggaacttttgacaagcatgggaatcttgttttattatatacatcttacatgtacttccctctgcttatgtacaatgtttgaaagttaaaaccaaatgtttcagtgtggcattatgacgtgttttagacatcaattcatggctttaaactggtttgttcagagtcattttagcnnnnnctgagtgnnnnncatg

SEQ ID NO: 44517 - DNA, 1196 bp, Zea mays
  Clone ID: MRT4577_140604C.1
attgggtacctcgaggccggccgggagttgaaccctagccggcggatctccgcgggcggcagtcaggagtggaggcgtggtcgcacgggcgaggtcgcaataggagaggctcagagagatggggcggccttacgcggtgaaggggcggaagaagaagcgcaagctcgaggaggcggcggcggcctcggacgctgccccgcccgtcgaagaagcggaggagctgccaccgccagaggtgagaagcggcgaggaaaagagcagcgaggaggatgaggcagcagcgggggaggaggagcacgcggcggcggacgggctcccaatcctacccaggacggttgatgggaagcggcgacccggcgccatcttcgtactcgagagggcctgcctcgaggtcggcaaagtcggcaagactatgcaaattttgaactctgatgatcatgcgaattatttgaggaagcagaatcgcaatcctgcagattataggcctgatatcattcatcaggctctactagcaatatttgatagccctcttactaaggctggaaggttacaggctgtttatgtgagaactgaaaagggcgtattgtttgaaatcaaacctcatgtccgcatgccaagaacctttaaacgtttctgtggtttaatgtcacaattgttgcaaaaactgagcattacggcagttggaaagcgtgagaagcttctcaacgttgttaaaaatcctgtcactcgttatctacctgttggtgcacgtaagattggcctttcatttagtgctgagaagtcagtcaacttgtttgactatgttgccaaatccaatgacgacgaacctcttgtgtttgtggttggtgccatggcccatggaaagatcgacaaggaatatacagatgattacatacaaatttgcaactaccctctcagtgctgcctgctgtttaaatcggatatgcagtgccctggagcagaagtggaacatccaatgaggaacttttgacaagcatgggaatcttgttttattatatacatcttacatgtacttccctctgcttatgtacaatgtttgaaagttaaaaccaaatgtttcattgtggcattatgacgtgttttagacatcaattcatggctttaaactggtttgttcagagtcattttagcaaaaactgagtgttctgcatgaagaagccaaacttcggttaactc

SEQ ID NO: 44518 - DNA, 500 bp, Zea mays
  Clone ID: MRT4577_140605C.1
gggtgttttttttttttttttttttttaataaaaactcttaataatgttttcgataaaacctgagagacaaaatcttaatccttatcagtactacagaccacacaacccacatgacaccaaccgacgcacgtcctctacactccgcagaggcgcagacatgacacacacagacagaaaggtagagagcgagggacgcagaattattacctagacccgttccattggcacccctgatgtccaacatacctaggagcttttagcttctcatcatatggctggcccatggaagaacgggtctacgcaataattcctttctgatcaactcgaactcgaacacacacggacacaaggagcacccacgtacgtaatggacacgacggacggcagttgctagccatgcaagggcatggcccgccgggattacacggcgcgccgcgccgcgctgcgcctgccggcgacgctagctctcgcccgtcagcctcgcttgccgcccttgccc

SEQ ID NO: 44519 - DNA, 823 bp, Zea mays
  Clone ID: MRT4577_140606C.1
atccacccaatccaatccccaccccgtccgtccatccgagggaagccgaaccctaacccccaaatccccaatctcgatccatcggccgaaccctaaccctcaccccccaaatccacaatcccggacggcgacgatggccgccggcaacccccgcttccccgacttcgccatcctcgacgccatcgcctacatcagcgatctccgtgacgcaaccgccgcgtggaccttgacgacggcgggcctcacccttcaggtctccttggtggtggccgctccgccgcgcctctcctacttctgcgtctgctgcgtcggccgcgacaagaccaccttcacggacgcgccagatgtcgtctgctccgtgggggaccacgccctcatccgggttggcttcaccaccggcgactcgacggagcacttcatctaccgggccagggggcccgatggacggccgtcgcttgatctgctcccggacttcgatgattatactgacgcagagaatctgctgctgcccctcggtttcgtctcccaccgcaagcacttggtcatagcggccctgagcgacggaccgacggacctgcagtactatctccacacccgcagcaccgagccgcactccagatggtccaagaagctgctgcgggtggagttcccccgtggagcagccaggaaatcggctatgaacgatcccgtaaaggtgattgcacttggaggtgggctgctaggttgggtcaatctcatggagggcatcctgatttgtgacgtgctcgatcccggggtgacagcgttgcgcttcgtcccgatgcccaagctgctgcccagcaac

SEQ ID NO: 44520 - DNA, 291 bp, Zea mays
  Clone ID: MRT4577_140607C.1
attcggctcgaggacgtgtttgccagccgtttttttcacactccacaggaccacacacacggggagctgaactgcaccaatgggcgccgacctggcccagcacacaactgccgatcccgtagaggaggacgatgctgttgcaggaccgagagtggcggctgaccagctggccaccgtctaaaccccgaacgatgcgaccgctgcatcggcgacagagaccgatgatgccgacggtaaggagccagagacggacatggccgaaaccgagggcaaggaggtagaggtcgacga

SEQ ID NO: 44521 - DNA, 234 bp, Zea mays
  Clone ID: MRT4577_140608C.1
ctaaggttttttttttttttttttaaataatccatagtatttatacaaaaactgacattatttattttatcaaaatttacaaaatattctaaattcaaactataaaaatcggtaacacaaaaccggccaccactgattaccggctagccagataaatcgaacggctccgtgacccttggcggcgggcacaagcagccccaggcctctttcaagcgacgctctgccagtctacct

SEQ ID NO: 44522 - DNA, 599 bp, Zea mays
  unsure (1)..(599): unsure at all n locations
  Clone ID: MRT4577_140609C.1
gggtcgaggcgaggccgtggctgacggggctcctcccccncggcggcggctggtgcccaggcggacgggcggcccccagctcggggccgcgagaggcgccagggcagcaccggggaatggacgaggggaagatggacgagaatgaatggggctaccacggtgaaggcaacaagagcctggtggtggcccacgcgcagcgttgtgtggtgctgcgtttcctgaagttccctccaagcaggaagaagacgtcagaagagatctttgagcacctacagaacatagtggacttcagcaagaacgtcatgagagagtttttgggggagagctacgtccattgtggggaagtggtgcagctgccgttagatttcgtgaagcagctctgtgtgaagatccagtccgagagaccagaatctcgctgtgacaaggacctggacactctgagtggttatgccctgtgccttcccaacctagcccgacttcagacctactgttttgcagagcaccggccgattctgtgtgtggagatcaagccaaaatgtgggtttattcctttctcaagtgatgttatgcacgaggtgaagcacaaagtgtgccgttac

SEQ ID NO: 44523 - DNA, 468 bp, Zea mays
  Clone ID: MRT4577_14060C.1
ccatacacagagctcgaccccccctcccggtggttctctcgtccagcccgaacggcccgcatccccgtcagtcatggcagcggcagcaggcggaggcgcggtgcgtgcgctgtcccagaaggagcaggacatacagatgatgctcgccgccgacgtccaccttggcaccaagaactgcgatttccagatggagcgctatgcctttaagcgccgcaccgacggcatctacatcatcaaccttggcaagacatgggagaaactgcagcttgcagcgagggttatcgttgccatcgagaacccgcaggacatcatcgtccagtccgcccgcccctatggccagcgtgctgtcctcaagttcgctcaatacactggcgctcatgccatcgctgggaggcacacccctggtaccttcactaatcaactccagacgttcttcactgtgccttgactggtgatgcttaccgaccc

SEQ ID NO: 44524 - DNA, 140 bp, Zea mays
  Clone ID: MRT4577_140610C.1
cagacgcttgcgcggacgcgtgggcgccgactcaaccggagcaccacactggtgacatggcccactcgcagactacgcaacggacagcagcttcgtcgtgatcgaacctgaaggcgtcagaggggcctcgatggtgatgt

SEQ ID NO: 44525 - DNA, 276 bp, Zea mays
  Clone ID: MRT4577_140611C.1
gaagcaaactcatttcccattgctaattgaatattcctacaacagcatatggatgcaacaagggaaaaatggttgacacacaaaatttgactggccaactaactgtcctgcacatgtcgtcttacaaaaagccctacccctaccaggggtccttgctttcttatcaaaacaaccgttcgccaacgcttgccattccctttatcaacccctctcgcacgtacaaagcgtgcgaacttttgctggcccaattttccaactgcgccctcatcgtcccct

SEQ ID NO: 44526 - DNA, 1172 bp, Zea mays
  Clone ID: MRT4577_140612C.1
ggagaaggagtgggtcgcccacgtggaccccggagtgctcatcaccttcctctcgctgccgcggggcggcaatgggctgaagcgcatccgattcagccgtgaaacccacgcgtccgggcaagcacaaagatggtggactgaaaattacgagaaggtcatggagctttacaacgttcagaagtctaacagtcaagttgatcctctgccaagcattccaaggtctgacagtgagatctccaaagacgataccccagctacagcaccgcttaacaaggggcaattgctacgtacttcacccagaccactaaaaggcagtgaagccataggctattcatcttcggattgtcctcagcaccaatccagtcatcttcgcaacgtttaccgcaaagaccgctaccttgggcaccagttctgtgatccagttgaactggcatcgacgcctgagttatcaagcatcagtggtgcgaagacagagacgtctattggtgcatcagtgaggacaagctcatctcctgaagaggtcgatggatcgggcgaactttcagcctctgtcagcaacgcaagtgacgaagagagggaatgggtagaagaggacgagcctggcgtgtatattactattcgagctttgcctggtagcatcagagaactacgccgcgtcagattcagccgggagagattcagtgagatgcatgccaggttatggtgggaagaaaaccaagcgagaatatatgagcagtatctctgagagaagacgtgttagctacattttaccatttgatgcttctacaattatagaaacatctctacatcaggcactaacatcgtgtcatcaggtttgctccttgcaggcgcaacaatgaccctgggcagttaggctgttcgcattgcatgtgtgattgcttcgaggcttttcctttccttttctttttgtgtttaacatttgctctgtttgtgtgatattcacattttttccctttttttgctgcgttgtcgttagtcagtctggatagacggtttatttcagaaaaaaaatgagaaactgtacattttatcaaccataagttgttgtttcggaaaacaaagctggactaatgtcttcatgatacgcatgaaatttttaaagttctccgcacggaaagtgattttcgtgcatcaggaacagaagctttgag

SEQ ID NO: 44527 - DNA, 186 bp, Zea mays
  Clone ID: MRT4577_140613C.1
ctgaaatctggactgggccgtgtggctgacgggctgcttcgtgcgcgcatgtgggacgcgaggagctctggcggtgacccctgacgatgacgtgttctacctggtggcgttcctgcggtcggcgctgccgggcgcgccggttagcctggtcgcgctggcgctgcagaggcaccgggtgctcgactt

SEQ ID NO: 44528 - DNA, 424 bp, Zea mays
  Clone ID: MRT4577_140614C.1
accctgatccaacctcgacttccccaccgtcggccggcgccgccacaccccacggccagcccgccgccatccatcctcgcctgcggcgatgtcttccctggtccagagcagctcgctcgagcgcctccaccacgtcgagaagcggatagtgcgggtgctggagctggcggggacggttggtcatggaggagctggggaactcgcagggtccccgcggcgaggccgtcgtcgcccactgccgcgagttcatgctctacatgaaggaaattcaaactacattgcgtgaggaaataaaaagtgcttgtgaataccggccatttgagatgtgtgactacagtgcaaggattgctaacgagatttgttgcaaaaagctggagtatgtgattgagaagatggatgccatgcaactgaacattgagcacag

SEQ ID NO: 44529 - DNA, 494 bp, Zea mays
  Clone ID: MRT4577_140615C.1
ccggccggggcccgatttcaatattcggatgtctcaccggggccactcctctcttctctccctttccaaggttcgccgcatctactccgccccccgtctcgcagtgcctccccaccggcctacacgtgcccggaatgtgaagtgccgttctggatctggatttatactgaacattacattacctgcatgtgtcttgattcataataatgacctcgcatgagtgcatgaaacacattcttcgtagaatttgcaaataaagactcatctatatcgagacgaccgatggactgaactggatgagcgacaccgtattctcctgacgatgctccttgttcttgacttactgtggaatgtctatctggactttggagtaaccttgcaattatcagatgcttgatgtgtattgacactagaaatgaggattgagtgccaggcatgatcagagctgcggcatgtgaagatgaaattgcgatgactgtggagactcattgatg

SEQ ID NO: 44530 - DNA, 251 bp, Zea mays
  Clone ID: MRT4577_140616C.1
aaaaacaacggcttcgatgaacattaaccaaacagcaccgacccgaaggaagggaagcacaggggcatataggggaagcatggccaaccacctcactatgggggatggcaacgatgggagggcgacgacatacatacactacaatacaatacgatgatcctagatgggtcaggggtacatacgaccaacaacaaatccaaggaaacaatggggcccaaacaagcaggaaaggggtcggtagcccatcgggg

SEQ ID NO: 44531 - DNA, 330 bp, Zea mays
  Clone ID: MRT4577_140617C.1
gtgggaatccccaaccaggcaaaaaacttccaaaacttttttaaagccctcaagcccgggaaataaggcataaccgtcacaacacccccaaatttcaagaaaggaactgggtttttcgcaacaaaaaaaaaacctggaggttcagccccacccctttttcaaaaaggaaacgcggaattcaaaaacaaaaatgcaatttggccgggggggggggaaaaaaggccaaccccaaaaccctcgaccaaaattttgggctaaacgggggggagggggtgggctaacaaaaaattataaaacgggggtccatttttcctgggctaaaacggaaaa

SEQ ID NO: 44532 - DNA, 405 bp, Zea mays
  Clone ID: MRT4577_140618C.1
aagtcagaatcagaacgagcttttacgctgttgttccacacgagatttctggactggctgcgctcatcttacgacacctgcggtatctgtcaacagatgggccgccccagccatactgtccacctgacaatgtatttcgcccggatcggaccgacgaggacgtgcctagtagcccatcggagggtcggtgcccatcttccgacccacgggataagttacatcaccgtaaaggtagcggtatgtcacttactgcccggaggctcccactcatcctacacctctgaagttattgcacatagtgcgactagagctacgctacacacggtattgtcttccagttgattccatccagcccgatcccttggctgtggcttcgctggatagtatacatggtcagtgggaatc

SEQ ID NO: 44533 - DNA, 107 bp, Zea mays
  Clone ID: MRT4577_140619C.1
caggcaagcattctcttacatgagatctccctgtacacacaggatcgcctgaggctacaggaaatggataatgcaggacagctagtgtttctggctacagaagggta

SEQ ID NO: 44534 - DNA, 293 bp, Zea mays
  Clone ID: MRT4577_14061C.1
ctcaaaatgaataaagcctttttacttgtgggtgcaatcgattttattttacttctcctttctttcaagtgtcgtgagtcgtcttgattgtatattggaaataactgtgtaacaaatcgtattataaatatttcaattaattttactctgaatttgttattaaaagacttttgaacatgaaatgattagtattacttgaatgcatccagaggatatttaaaccaatatgaatatccagaaggccatttggtgtcccctctcccaggtgtcaccttgtagcatatgcattatgt

SEQ ID NO: 44535 - DNA, 349 bp, Zea mays
  Clone ID: MRT4577_140620C.1
tctcatcctttggatccttttctttcagttgctccctttacttttttttcttcttccactgtctttccgaaaacagcccccagaaatgacacacccggaaagttttttccttcccccagcggccaacttgagggggttgatgccaaaaaacacccggcgatttgttaacagcgcaggggggcgcattttttacactgccctttgcttttattaaggaccccatactgtgctcgggggaccctttaggggggggggggaaaatggtgatgaaacaaaaaaagtgcgggggctctctaccgctaaaaaccgggcgaagtcccctttttcgggggccaactttttccccttt

SEQ ID NO: 44536 - DNA, 768 bp, Zea mays
  Clone ID: MRT4577_140621C.1
tcattgtatcttcctttcttccctgcttctggctccgccgccgccgcatctcttctgaagctgaacccgcgacagctaaccgccgttgtttgcaggggagacaggagcgagcgagagagagagctcgcgacaaggttttgcccgcaccatatcgtcctctccccgcaagctccaaaagccaggtccagggactaaatagagcaaaggaagcctttcatcatcgtcgtcggtcatacactaatcgaacgggagaatcggagggagggagatacatcacgtttttgtgctcctccgagtccgtccttctccaagatcccccattttccttctcgtttccaacctcctcctccttcctgaccgaccgatggcgatggtgtgacgccgccgcccgtccccgacaccgctgcgacctcagcatttccacaccgtctcggtctgggtctgggtctggtcttcgtctccgcctgcgccttcattttgatccttaagctgagcttcccttccccgagcgccacctccgcccgtcctaccatggcgctggcttcaatgtgatacgcggaggtgcggtcggtcggtcgtgactcgtgaggaataggaagagggtaggagaggagaagaagagccagcgccggcgggaggggagatggcgggcggcgaggggggagattgcggtcgctggcgctcacgcccacggggtccgtcgccaccgtgctcaccttcctcgtcgcgggctcgctcctcatcgagcgctccatcccacggctcagc

SEQ ID NO: 44537 - DNA, 378 bp, Zea mays
  Clone ID: MRT4577_140622C.1
tttttttttgttttcattttttttggggttttttttgttttttttgtttttttttatatctttactatgaccattaaatattttttggaagacaaaacaaaaacgctctatacacgaaacaaacaaggcgggacacctttgtggtgaccccaaaaaaacggggggaaaaggccccaaaaaatcccccccttttccaggtggcacgtaacccttccccgcaggcgcaaaggccccaaaaaagagggtacaaaccggggcccatttttggccatttaaaccaaagccccgaaagcgaacctttgccccaaaaaaaaacaaagaggggggggaatcccacacacggggtttaaagcccctggaaaaaaggggggaaggggg

SEQ ID NO: 44538 - DNA, 325 bp, Zea mays
  Clone ID: MRT4577_140623C.1
attcggctcgaggtgacggtggctctttatccgctcatcctgttggttccgtgaggtcgaaagcgtgaagcgaattacaagaggctggacaagctgcggtacgacgtggtggcctggcctcgcccggagacgggcctcgagaagctccgtatggtcaccaccgcccgcccgttcgttataaacaaagacgcgtgctgcggcagctacaagcgggcgcagtctacgccgtcgaccccgacgacgcctgtgacgccgtcgtcgtcgacgactccgcacggcgcctgcaacatgtggcgcagcgtattccacccggggagcatacctg

SEQ ID NO: 44539 - DNA, 425 bp, Zea mays
  Clone ID: MRT4577_140624C.1
gggaccaaaccaaatccaggcccccttacccccccgggggaccccggggcgggcccctcccctccaacccaaattcatgggcaatccaccttcaaaccaaaagggcttcgggtctttttttaaaaccaccccccccggaatttcaggggcccccccccaaaaaaaccccccgaaaagcaatggcaagatttccccccgggcccccgcccatttcccaaggtaagccttttttccccccccccgaacccggggggacccgggaaacccccccccggaaatctgaagcttatgggggaaggcgagggccccccagccgggggggggccccccccaccgaaaccgctaaatttcggcccccggggtttatcccaaaaggggaacaaaacccccccttgggggtgccccaggggggggggtaccctccc

SEQ ID NO: 44540 - DNA, 445 bp, Zea mays
  Clone ID: MRT4577_140625C.1
ttgggtacctcgaggccggccgggaaccttcgttcaatgtggcgcggcggatgcatgttcgcgtccgccaagatctgcgtaaagtgtctccgacgagatcacggcctcctatggcgagtcgacgatgcctccgcgcttcccgccagccggcgctcccagatcctcgtccacgcatcgcttgcacctgatccacatcgtaccacatatgtgcctggtcatgtgctagctcggagcttccatcatagaagagcccccggctgctaaagagcctcaagcacggcgtagcctaggtctacggcgaagatggcgcggactccgatgtatgccggcgcggtcaggtgaagatgcacaagcgccagtacattaggcgtctgggcactctagtcgtgtactgcacggaaggctccagggttgacaaggcctaccggaatgtccccattgggag

SEQ ID NO: 44541 - DNA, 662 bp, Zea mays
  Clone ID: MRT4577_140626C.1
aattcggcacgaggacaaattcacaagacgagagacagaagaggaggtagtagagagagaagggccgagtaagtaggtgggtagtacgggagcgtaccgaatgatgatgagtccttggactctacaacagccaagcgctatctgaagcgagaagagaagcaaccagcccgtaggacaagacgtgtcgggaggaggaagaacaagtagccagggagcagcagccatcgccattcctgcctggttttgctcctgctgttatgaggagctggactagatgaggggaatgctctttgctggtagcgcacgagaagggcacgcggggacactgctgcaactgcaacaccaacgacaggggctcgccgccggcaaactctcaggcgccggcgacctctgggagcccacctcggtgcttgaccgccgacacagccccagcccgagcccgccgacctcggttcccacgctgtcgtcgcccctgggcgccgcgaccgccggtgtggcggccctcgccggtgctaacgccaagaacgtctccccgccgccggtggcggcggcggcggatgggccatggggaggaggggcggaggaggccgtggcgggggcaaggaggagtggcagctcacaccgcttgacatgggccttggcgccggcgaggggtgggacgc

SEQ ID NO: 44542 - DNA, 355 bp, Zea mays
  unsure (1)..(355): unsure at all n locations
  Clone ID: MRT4577_140627C.1
agaaatgtcctttcttatttctgggaagccccaaacctccggcaaaaaactttnttnttggacttttactcattagaaatcttaaagagggcccccccaatgatgggttgttggggggacgctgctgggtttgtcaaagcaagttggttgaatggccgcaattgttgccgttgtcagagggtgcccgcgtttggcgccgcgtgctggttgaacggccccaactgtggttgtttcaagaaggtggccgggctctcccccgcttgctggctgcntggtcggnggtggtgctgctgtttattcgccggggagttcaatgctgcccgttggttggttggtataaattgctgggggttgg

SEQ ID NO: 44543 - DNA, 388 bp, Zea mays
  Clone ID: MRT4577_140628C.1
ctggtaaggaccagctcgagcctggatgtgccattctgatgcacatcaaggctctggcagtggttgttgtgtatggagacgaagtcgatcctactgttcctgtgcataaaggtgaaaaggatcttctgcggttgcagggtgacattggtggctgggatgctcaaatctcaagatatctacgatgccgttgcacttctcttaacacatgctaagctatatgaggacattgcgatcaggcctccaaaaggagctatactatgtgggggacccggaacaggtaaaactctactagcaaaggctggtgcctattatactgcatcaacgtttttgcgtcttgttgggagtgctttgatctctaaagagcctaggtggttgcccctaacttgta

SEQ ID NO: 44544 - DNA, 1032 bp, Zea mays
  Clone ID: MRT4577_140629C.1
ggccgggcctacactacaaactttacatttcccaatcttatgctccgtactctagcaagaatggcacccaagaactggacaaaggagagctttacgctcaacactggcgcaaagattcctgctgttggcctcggaacctggcagtcaaagcctggtgaggtccgtgaagctgtcaaggctgctctccagggcggctaccgtcacattgacactgcacttgcatatggcaacgagaaggaagtcggccagggtatcaaggactctggtgttccccgtgaggagatctgggtcaccaccaagctcgacaacccatggcacaagcgcgtcgaagaaggcatcaacagctcgctgagcagccttggcctcgactacgtcgatctctacctcatgcactggccctcgtcgaccgacccagatgacctgaagaagcactaccccgactgggacttcaaggacacctgggctgagatgcagaagctgcctgaatctggccgcgtgaagaacatcggtgtctccaacttcgctatcaagaatctcgagaagctcttcgccgactcccggttcaagatcacgcctgctgttaaccagatcgagctccaccccaacaacccctcgcccaagctcctcgactactgcaaggagaagggcatccactgcaccgcctactcatgcctcggctccaccgactctcctctgtacaagaacgagaagctcaagaagcttgccgagagcaaaggaaagtctgtccagcaggtcctgctgatgtggggtctccagcgcggcaccagcgtcatccccaagtctgtcacagcatctcgcatcatgggcaactttgagcttgatggctgggagttgaccgatgaggagatgaaggagattagctcgctgcctgagcgcttcaaggtttgcggagacgcctggctgcccgtcaaggtgttctttggcgacgacgagtaggtctgttgaattttgccagagggtttagagtacaatgataccatgaatacatagagaattgagaatgagaataag

SEQ ID NO: 44545 - DNA, 461 bp, Zea mays
  Clone ID: MRT4577_14062C.1
ttttttttttttttttacatatatgtcatccttctttctatatcaaaaaacaaataaggatattgttgtctttatgaataatctaaatttgtataatctggactaccaaacagctacatgtaaattataatctatctagattatgatttagattatataatttagattataattcagattatattatctataagctgaaacaaacaggcccttgagtgctcgtttgaatgatgatgcttttttccccgataataagcaaggagcgtgtgtgctcatttagttaggacggctgtaatgatggctggcctgttggattactgattggtgcctccttgaacttggcattcaggtcaccttcttatctgattctgaaaggccaaaccgtaccattggcactgccagttcacacagccttctcgtgaacaccgagctaacaatctaccgatctagctagcctctac

SEQ ID NO: 44546 - DNA, 759 bp, Zea mays
  unsure (1)..(759): unsure at all n locations
  Clone ID: MRT4577_140630C.1
accgtcccacgcgttccaccccgagtgcatcgacccctggctgcagtcgcgggccacgtgcctgctctgccgcgccaaggtaccggtgctggtgccgccggtggcgctagcgccgtgctagccttcgcggctgccggaggccgtggcggtaccggtgttggacgacgagttggaggaggacagcgacaaggaggacgataggaaggaggaggccatcgagctggagatgctgcgcatggcgcggcgggccgccacacgctctttgcggcggcggccggcggcaacgcgaaggaggagggcgaccacgagaggttcacgttgcgactgccggagcaagtgtgggatcaggtgctctggtctcgccgcctgtgccacgccactagcctcgtcaacctctcggacatgtgctccgagtccgaggaggggagctcccgaggtggacggcgtgtagcaggagcaggaagcgtcggcaacggcgggagcagccacagcgggcgccgatggtagtcgttcctggccaggacggtctcttgggcgcgaggcggcgacggctcggtgcagaaagggtgggatgggtctacaaggcggggaagggatgactgcgagtccagcgagaagggcgcggcctcggcgctacctgcgggccagtcgtgattgagatgtactgttggncggcggcgccaccgcgcccggaatgccgtgtttacgagttgtgtgctttcccttttccgttacgtatttgtttattggtaataanag

SEQ ID NO: 44547 - DNA, 264 bp, Zea mays
  Clone ID: MRT4577_140631C.1
ctaacgcctgctgcacgccagtctcaacagacgaaacgggccacatggtttgaacgcaatcggccggagcgatcagctcggtggcctcattgctactgcttgcaacaaccgcgacaacctcataggctgccatcacctgcacgcatgcgaactccgccatctcgccatgcctcttctacccccgtggcacgagatccggaccctgcacatcctgctgtacccgcgtcaccaacctaaatagcacctgcagcaccgacgacgaca

SEQ ID NO: 44548 - DNA, 316 bp, Zea mays
  Clone ID: MRT4577_140632C.1
tcttcccagacacgggagctgtagaggggacctctgctgcagatgctaggggggctactaggcccaggcagtcttgggacttgggtctgtcctgctgtgcgtccatagtgggtgctttagaaacgggaggcccacccgaagcctctgttgcaagtgaggacaaagtgtgggaaggtcgtgagggtctgcagtccgagatggccttgtcctcaacgtgcagtgcagtgttgatgtggggctagaggctgggatctgggggagccaccctgagggcaatgtctgcctggtgctgtacctgcttgtttcacagcggtga

SEQ ID NO: 44549 - DNA, 206 bp, Zea mays
  Clone ID: MRT4577_140633C.1
gatcttggccattggagcaccgatgaacatctccgactccaactgcctaattgaaaggtatctctatactgttatggcaccaatcttttgtccatgatgcacatactgaacgccatatcttctactgggctgtgatagctgttcctcgtagagacaccatcgcattaatctgactaattgtactagatacaatcatagctgagctg

SEQ ID NO: 44550 - DNA, 965 bp, Zea mays
  Clone ID: MRT4577_140634C.1
ctgctgcaatagcatggaatcttctgttcccttcccagttcccttagcttgaaaaatctgaaaataccatgagatttgaggatttcttgatgttcttgaatttctctctcaattctgttatcttggggcaatctccaataggcttcaaaatgactgcatagttggttcactgcctccagctgtgcagatgcttctttatactgccgttttgatgccataacctgaagttgctcaacagccgaaacaagcatagtaagacggtgaagagcggttattgtagttgttatgtgcctcttagcacaatccaactttttgatgtcgcgacagatttcttgaaccatagtttcactttgctcagcctttgtttttatttcatgtatcttatgcattaattcctgaacagcatttgttgcagcagcaagttcttccttggccttggttcccgagttgctctgctgtcggacagcagcaaggatgctggcgtccactctgcgaatctcgctctgtatcttttgcatcagcggctccacgcccgacaacgacgcctcagtggggaacatctggttgatgtattcgagagcgctggacttgtccatttctccggcgagatctccgccccgcgcgcccgcgctcggaggatctggcgaggtctagaaggatctggaaggggagggtggtgcggaggagctgatctggcggcgaacgggcgccgggcttcccctcgcgcacgcgaggggaggtggtggcgagagaggtggaatcgccggcgggtactactccccgtcgttggcagctcggtggttcaacgggtgggcgcggagtccaatagcccgcttcctattatgagagttgtaaaagttgaagtgttcacttgttgtgattacctgccgctgcttgagcacattgtatagttattattagaacttttgctagtaaggttccatttatatttgaatatagagtat

SEQ ID NO: 44551 - DNA, 198 bp, Zea mays
  Clone ID: MRT4577_140635C.1
gagcaggagacggaggaaggggagcgggaggcggtggcggttacccgcgcctgcacctggcttcaagcctccgatccgcccaaggtcagttgcggtgcggcatcctgccttccatttcggccattactctcagcttcgctcgagctcctatcctcgccctgcaatcgcggcggatcccgcgttccccacttcgtgtgg

SEQ ID NO: 44552 - DNA, 1069 bp, Zea mays
  unsure (1)..(1069): unsure at all n locations
  Clone ID: MRT4577_140636C.1
cccacgcgtccggtcaggttcacgggcgactgacggacgaggagaagatgaacatctgcagggggctcagctacgagaagctatcgccggaatgctgcaagcacatgttgcggaacggcgagttcccgaccacggcggcggtgcaagcgctggcatcgcagcacacggtgttgaagagcgtcgtgctgcgcgaaccgggccaactgaagtccgtgtcgccatcccctaccgcttccacgggaaagcgccgcgacggctatgacgacgacaatggcggcggcgagaacgacgggcaggtgatcctgtacgcgagacggctggacctgtcggtggagaaccagaacctgcggtcgctccttgacgggatgcactggcgggtggtggagctggagaaggtgtgcagccggatgaagacgcggatgagcaagatgaagcaggccaggagaggcggcggcggccgcaccgccaggtcgctccctaggatttgttcttgatcgtgagtcgccctgcccagggcgcttagcggctatcgcaacgatgagaagatgagacgatgtacatactgtagttgctggaactcaatcaaaagagctgcacggctgtggcgcggcccgacgagcgctcgacgagggcccgagtgcaggcgctggcgtcgcagagcatggtgctgaagagcatcgtgctgcgcgagcccgtgtcgncgtcccctccccccgtccacgggtaagcacgcgacggcggcatcgacgcgagaacgacgagggtcaggtggtcctgtacgcgggacggctggacctgtcgctggagaaccagaacctgcggtcgctcctggacgggatgcactggcgggtgatggagctggagaaggtgtgcagccggatgaagacgcagatgagcaagatgaagcagcccaggcgaggcggtggcggccgcgccggcaggtcgtcgctccccaggatgtgctcttgatccaccacctcgcctcctcgcgctactgccgtgctaggaggaatcagtgaagcgcggcgcggcgcggtgcaggcggcagagcatcgtcctcctccctgca

SEQ ID NO: 44553 - DNA, 233 bp, Zea mays
  Clone ID: MRT4577_140637C.1
tgtactgctgatgccgcgacgtagctcgaagtcggctcgagctgtcagacaggtaactgtacagagtacactacacataacagtgattcctggtctaagacattacagctagatgccttattgtgtctcagactctttgacgaacggatcgctgatgctacgtaaagccgcgggcgaggatcagtttagacgcagcagactgaagcttatcgcatctgtaccaaagggatctt

SEQ ID NO: 44554 - DNA, 192 bp, Zea mays
  Clone ID: MRT4577_140638C.1
attcggctcgagccggtctacaacccggacttttgagccagcgcgggcgctctagctagtccggatctcgctagagccaatctcggcgcgggaatatggatcgactaactgagatggctcctgcgttgcatgttcatctgctgctggtcccacccaacatactagcggcgaacataaagtgcaaaggcggct

SEQ ID NO: 44555 - DNA, 560 bp, Zea mays
  Clone ID: MRT4577_140639C.1
ggggggggggttcccacccaaaaacgggggggagggaagtttggaaaaaagccccccccaaaaaacccgaaagggcccatgggaaaacgggggaaagcccccccaagggcaaggggccctttttattgggggggttccaaacccggaaagggcaaagttaccaacaggcaaccccgggggaacgggaaacattgggaccccaaaaattttttggggggcggcccgccaaaacgggaacgaaaagggaaaaaaacccgggggggggcgagtttttttttgggggggctgggatttggctttgcaaaaaaaagctttggattttttgggcccaaaattggggtttttttttggggggggccccgggtcccattcccccaaaaaattggggaaaaggtaacccttttcctaaggccggggggggggcttccaaaaaaatggggtggcattcttccttttttttccttggggggccccagaaccccggtgggaaccccccttaaaagactttgcctttgggaaagaagcacccaaaaaaaacgggccttttttaaagttttccc

SEQ ID NO: 44556 - DNA, 819 bp, Zea mays
  Clone ID: MRT4577_14063C.1
ccccgcgtccgcgagtggtatctttgcaaatcagttgtctagcaacatactatggacgactagtcatattagacattattagatgtgagcctatatattactaataaaagaagagagttttatccaaaagcatcccatcacagaagacaaatataatgtttttaatttttagttgttttcattgtcgttagtaaagctggattgcatgcacaagtcttgcgaaaaatctcactggaaatccgctagtgaaaataatctaaaatgatagatcagtctaaaatgattcttccatgataaatgtccaatttgacatcaactactatcatgtagtcacaacattctgcattgtaagcatggctaacaattacattaattattcaagactggaagtcatgtaaacaaacttgccaacaacataaggaattttgtgttgttctggggaaagaaactaaatcatagctcatgattttttacacacagtcttcctaagtgttgtgatataagaaccttgaaataagggaactagagaagaaatatttttataaagaaaaattttattcgttggtcaccataacactatatattcagtggtcatcatccaaggtatggtttgggctttgcctagattaatctcacaaagaagcctccatattgattctcaatagaagtgcttgagacaaatgataagttctagaaactcacacaaaaattagagggagacatgtccatttacgctatagtgttatttccatgtaactaagatttctgctaaaatacagttgccaatctgtaagtctcattgtgatgaagtgatattac

SEQ ID NO: 44557 - DNA, 391 bp, Zea mays
  Clone ID: MRT4577_140640C.1
gttgttgcggtggttagcacagcgtaaagactcaagcgacacctgggcaaagccagccagtgggcatgcgtgcaacacaagaggcttatcacatcccaaacacgcgacacgccacaccggccgcacacgaagatacaagactgttcatccacgaaatcgtctggccacgtacaatcaaggagatagatcgtgggaggagagacgatgcaccgttcgtcgagctactacctgcagcagtcgtcgtcatcgtcgtcgtgcgtgtcatcgtcggtagcggcgaccggcggggcggcatcgccgggtccgagctcgacggcgggcgtgatggatgtggaccatctgccgacttatgacccgcggtcggacttggccaaaaaggatgccctggatg

SEQ ID NO: 44558 - DNA, 356 bp, Zea mays
  Clone ID: MRT4577_140641C.1
cggacgcgtgcgacgacccacgcggggggcaatgttaaaggcaatctgctctgtctccccccagaaacaccgtgctggggctgttcgcacagagacacggcgtaccacaacgggtactgggtccaacccacggattgcacaaactgcaccgacgacacgtagatcgcgctcgaagagatcgtcggaccgggcatgcctatacgcacgtataagacggaggaggaaggggccaagcgcgcaaacgccaccgacgcgggtcttacggcaggtgtatccaccaaggagccaaatcccgcgcacagagcgagtggtcagcgggaagctggaatcacctgcggtaacaccgaggggggaga

SEQ ID NO: 44559 - DNA, 579 bp, Zea mays
  unsure (1)..(579): unsure at all n locations
  Clone ID: MRT4577_140642C.1
ggccggccggcgactgaactctggagaccgagcttagaattctgggcgcattcaccagacgaacgctcttgcatgaggcatccttggcctgaacctggttgtccaccaacctcgcagactacgtggtagaccctgtaaatgagaggggttgctgcttcgcttcctgatgcgagcgaggaacatgacggcactctacttgccaacgatgatatgtccacgtgcgactattagcgagagctggctactggccacagcagctctgctcatgaagagagatatgagctacctggcggacactcacttaccattggagcggagagattcaggcgccactgaggacctcttgcagccggcgttgatagacctggatgctggtggaatgcgtgagacgccttacaatcacctcatgaggtgtgacgagcgtatctggaacgatctctatggatgcattgcgctcagcggtggatctactatgacgcgcgttatagctggacgccggatcgaggcagagcacttcgctaggccctcgctcaaggaggatcaaggactggtgcagcagctgagnaggaagtacctagg

SEQ ID NO: 44560 - DNA, 252 bp, Zea mays
  Clone ID: MRT4577_140643C.1
gggacggcgcagctagcgctacggataacgcacacccagcatcatggcgacgcgcggagagcagccggcggaagtcgtgtccgtcgagatgcccgcacccgacgggtgaaccaagaagtttactcccttgagacgggggagatctgagattgactttgtgtcaccaactggcgaggagattaagaacaagaggcaattaagtcagtacctaaaagcacaccctggaggctctgctgattcagagtctgaatg

SEQ ID NO: 44561 - DNA, 521 bp, Zea mays
  Clone ID: MRT4577_140644C.1
gggtgggggggtgttttttttttttattgaaggctaccacctatgaatttttcatgaataaatagcatccacaaaagtccaaataagtaggagcctctcactaaatatccatgggtatacaaccagtattttcagcggaaaatgggcatggatgaccattttcaacactattgaaggctaacacatacaattttttcatgatgtagtatactccaccaaaaataaaaaactaatttctagaagtaaagatgtatgtgataagtaataaagtctctcaccaaagattcatgggtatacgtcctgtatttttttgctaaaaatggccatatacaatcattttcgacaataatgaaggcttaacacctatgaatttttcatgaagaaatatctccacaaaaaatcccaagaaactaatttttggcatggaaatacgtatggggtaatgttggtcacctatcaaggctcttgtaaagatccacaataggacaacacaattaagttgatagcaccttctccccttg

SEQ ID NO: 44562 - DNA, 659 bp, Zea mays
  unsure (1)..(659): unsure at all n locations
  Clone ID: MRT4577_140645C.1
cattgggtacctcgagggaggcggggggacgctgctgcctgctgctcacaccacacgcttgagagcttgttacgaggcaatggcgccgacggtggaggtgttgacgtcagaggtggtcgtcccggctgaagagactccggcgggcagcatctggctgtccaacctggacatcgccgcgcgccgcgggtacacgcccactgtctacttcttccggcccaacggtgatccggggttcttcgcggcggatgtcgtgaagggcagcctcgccagggcgctggtcgcgttctacccgctcgcggggcggctcgggctcgacggcaccgggcgcgtccaggttgactgcaccggcgagggcgcggtgttcgtgaccgcgcggtcggactacgcgctcgacgacctgatgcgcgagttcgtgccgtgccgcgagatgcgggacctgcttgtgcccccgacgcccgcgccgaacccgccgtgcgcgctgctgttcgtgcaggtcacgtacctgcgctgcgggcggcgtcgtgctggccctgtccatgcccactcggcgtgcgacgcgcggggcgctgcgcactttcttggagacgtgggctagcatcgcgcggcggngacgacgccaccaccgagaacgctcccgtgccaccgtgcttcgactacgg

SEQ ID NO: 44563 - DNA, 431 bp, Zea mays
  unsure (1)..(431): unsure at all n locations
  Clone ID: MRT4577_140646C.1
tgggtacctcgaggccggccgggactgaatgccggttaatccggatctgagtgaaacaaactcactttgtgggngagatcgggccccgcccttcgggtcctaagattcctcagggctataaagaaaagcatcaagcagcctcttccatcctgcatcgcgattcacgcggccggctcaacaaaccccgtaaagcgctcgtcccaacgccgtaataccgcctcggactcgccagggccgtcctacttcgacgggattcgtccatgccggggggtatttagacggggccacccggagagaaagagaggatagagagatctgctcgccgccatatttgntgcagctcgcgctctggatttgttccgccacacttactgagaagaggatttgaagagagaagaagtggagngggccagcgtggtcgcgattgctcc

SEQ ID NO: 44564 - DNA, 275 bp, Zea mays
  Clone ID: MRT4577_140647C.1
gtccatccaacatccatgggggggtgataacaaggaattacatgatacatccagaccttcagggtattctataagacataagaatcttactacacaactgcaaacctacactttaccacagtagatttttgaaccaccaagaccataatggcttacaaaaacacaggagtatacaaaaccatgaagcatgatcattaaactagcgaagaacccagccctagcgctcacaatcctgagaggctattaaggttgcttgcactcggatctatcgtcta

SEQ ID NO: 44565 - DNA, 114 bp, Zea mays
  Clone ID: MRT4577_140648C.1
aatacgaagactccgccgtctcctagctgttctcggacggctcttgagagtccgggcccattatttttaagaaacccctcccacccgtgcgctcgtggccagcctacgacgaga

SEQ ID NO: 44566 - DNA, 511 bp, Zea mays
  Clone ID: MRT4577_140649C.1
attactgacacataagtcgatgcataatgcaaaaatgaatctcaaggggttatctgtcttcctcatctccagaacctttcttttccctctgtcctgcctctcaataaactccgtggagctccagcgggtaaggggacttgctcctgcagccccgagtcggatctgcccctgctgatccgaagggccaccttctctaccttattgcaagagaagatcccaaaatccttctacccaacctttagttagatagctccatccacttgatgagcaggcattggagcagactccttcaaacaccacttcttctaggtgttctagttgtcggtgcttgcgaggactcggccggagaaagcgtgagttgttcggtcgacgtagaggctgctcacggctccggtctgggtaacaaacttctcgagatactctggccacagcgaggtggaaggatgattgctgtggtcaccagacaatggagtggcacttgatgaactgaacaaagctgactggaggctag

SEQ ID NO: 44567 - DNA, 377 bp, Zea mays
  Clone ID: MRT4577_14064C.1
aacctaaatttattttattatatctaattaactatataaccataaaactgggggggtataatattaaaacatggggggaaaaaagagaactgatttgaataaaaggtctacggggacacataaacccgacaaaaaaagagccaataaagctaaaccaaccactaggaaacacccaacatagtttaaaaaattccgaaggaaaaaattaattctgggaagcacttttttcccgggggggaaaaaaacaacaagttcgaaaaaacaaaccttgactggagtatttaatataaaaaggggctgtaaatgtgggggaaaaaggcgacaaaccgggggccgaaatcccaacacgttggcgaccaagaaaaaagctttaacaa

SEQ ID NO: 44568 - DNA, 1715 bp, Zea mays
  Clone ID: MRT4577_140650C.1
ggtacccccgactcgaggcgggaaccgaaacggaaccaattattttcccgtcccgcgttctcccccaccgtcccgcgtccgccgtgcctccccaccggcggccaccgctaccggcccacctatctccggcacccggcgctcctcaccctcccttctccacgcgatggcgattcgccgcggcggtagccagtcctacggcttcccgatctactgcgccgcctggctcccgctcgcccacatcctgaagcccgaccgtcccgccgccgaggcggacgcggatgccccctcaccctcccctcccccgcctccgatggttttgctcgggggcggcggtgggaagggacggaacggcgtgccgaacaagctcgtgatggcggccctcgccgccggcgaagaggccgcgccggccctctcccccgatacggtgattgaggtgaggacccaagaggaggtgccgtacagaatggccgtacacccgcgcggcgacggcgtgttctgcgctttccccaacggctgcaagttgtatcgatgggaatcacaggaaggagaggggctacagaacttgtctttggagccggaccaggaagctttagcggagctgaaagatgtcggtttgcagttggccgtatccttcagtggagaaggttcaatacttgctattggtggtgaagatgggtatttaagagttttcaactggcctaccatggggtctgttctcacagaaatcgatactaaaacatcgattaaggatcttactatcagttccgacgagaagtttcttgctgtgaataggagcagtggcccatgtagagtgtgggatttgcagtcatctgaagttgtagccagtctgccaagagaaacaggggaaatatttggattctgcagattctctaataaggctgacaacagtcatgtcctatttataactgtgatggaaggcgattatggaaaaatagtgtcttggaatactacctcatggacgagaaccggatcaaagaaaataactcgtgaggcaatttcagcttttgctgtgtcacccaacggtgctcttcttgcaattggaacaatagaaggaagcgtcatcatagtcggctcaaaagacatgcggacacttgtaacagttaaaaaggctcatcttggtattgttactacgctgaccttctctcaggattcaagaacattgctgtcaacttccttcgactcttctgcaagggtgacatctgttgggtctccaaagagtaatggaacaagcatatggcccatgctactagttgttattcttgcaattttggtgtactactgtacgcagcacaaagaagacattttggcaatgttgcagcgttgagatagatttctgttcagcccctgactggtctactctgctggacgtattattagtgttgcttcagtgattgaagaaattttggacttgggccaacttcattattctctcaaggacaaacaatacagcaaaaggcactgagccctgttatgttttgtagtaaaaagggtaatgtacttactcatgttgtcgaagtttttgtaagttgatggccgcaagtgatagacatatgtggcaatgtttcttcatgctgcacttgtgaattgcaagatgttcgccccaagagtccaatatagagagttcagaaacaaatttttttggtgtgcgaaacaatttattatgtatgcgtaataaagctgtacaaagaatatct

SEQ ID NO: 44569 - DNA, 364 bp, Zea mays
  Clone ID: MRT4577_140651C.1
gggtaaacggcaaccaccggatcataaccatttagcaaactggccaaaagaacagtaacatttggaagttccaaacagctagcgttagctatacttgcaaaatgatcttcccgggctcctacatttaatggtcacatagcacatggtgaggcacatcaccatattcctaagtctaaacggggagggtgccttttatttacaaacaaaaaaaaaaaagccaacaaggcaacggggcggcagttcgttctaaagacgggcccacggatgaccacttccacatgggtgggggtctagagaagaaaaaacagggagccttttttttttcattttttgggaaaagggggggttaaaacccaaaaccttt

SEQ ID NO: 44570 - DNA, 338 bp, Zea mays
  Clone ID: MRT4577_140652C.1
cccccaagggcccgggttttctcccccaaggagggcgaattttttttccttctgttagcgctgaaggttaccctccaaccccatgggacaaggtttttccctggagtttaaacaaacttctgacactgggacataatggggggtccgggttcaccaggggctttccccaaacgggtcattttgacaatttcaccagtttccacgacacgcccacccaattatgccagacaggaggtcacaaaaattacaagatgcttttaattccgccagactttttttgttcccagtttgaatttttgggccccccaaaatcatcaagggagcttgttatttgaagg

SEQ ID NO: 44571 - DNA, 379 bp, Zea mays
  Clone ID: MRT4577_140653C.1
ctcagggtaaatcccccctcacaatgacttacatgatccacagcaaattacaatgtcccaccttttaatcaacaaaacctcacacaaattatgaataggcccacattatccaacagcatattgaagttgaaggttgcatcaaagtttgactttgaaactaaaatagcaaagggcaatccgaagcggaaaacggactcacaaatcagtttttgacaagcctccagcggtttagggccctggcaacgggcggcttaagcccaatggtaatgggaaccctcacggggaatagtgccttgttgcaaacaacagcaagcgcaaacccccccccatttgaccccacaagctccattgtcctgttggggggttgccgtttttgttc

SEQ ID NO: 44572 - DNA, 198 bp, Zea mays
  Clone ID: MRT4577_140654C.1
gaaaagaaaaatttaccaaccatatcattcagacagcaatgcggcagacatttcacccaagtgtgcgggataccctaacattccacatacattcaagtccccctatatatcgaaaccatcactctagcaaattcccaaacagaatataaaaggtacccaatctattccttgtttgcatttttaatattgcaacaaaaa

SEQ ID NO: 44573 - DNA, 1685 bp, Zea mays
  Clone ID: MRT4577_140655C.1
atcctcccctccacgcgagagggccgcgtttcaccctagttgaaagggcatgtggctcgcgagaagagagattcagatataccggaccgtggttacctattaattagttgtgcatcccaaaagggcattcgtttttatttgtgtcgatatagtactccatccgtttcttttctattagtcgctggatagtgcaaaattgccctatccacattggcctcgaggcgccggccggcgcgggcgaccttgcagtgtacacacagttacacagaggaggtttcctccctggctccctgtgaatctgcgaatctgcgatactgactctgccttcttcgttcagccagcgccgaaagagagggagagccaagccgccttccgccgcgacgcacgatggatcgcgcgcagttgctcctcgtcggactcccggccttgctcttcttctccgacctcactcacatcttcgcgccgccgcctccccacctccgccacccccatcaccaccctcctcaccaccaacatccgcatccgccgcatcatccccactcgcctcatccccatccgcacccgccgcatcatccccacccgcacccgccgcaccaccaccagcaccccgacccctccacggcaatcatacaggagccacgtgtggatgaggctggattcggcagcacagtggagctgcaattctgtgcctcctgctcgtacaagggaactgcagtgaccatgaagcgcatgctggaaacctcatttcctggcattcatgttgtcttgcataattatcctcctccattccccaagcgtgtactcagcaaagttatcccaattgttcaagttggagccgttgcaacaataatggctggtgaccagattttccccagaattggaatggttgctcctccatggtactactcgcttcgtgccaatagattcggaaccatggcaacaatctggctatttggcaactttgctcagtcctttctacaaagctctggtgcctttgaagtttactgcaatggagatttggtattctcaaaacttgctgagcagaggttccctagcgagttcgagttgcgggaccttgttggcaccagattgcctgggtctccatttgggaggaatccggggaaaaccctggctttatgatgaccccggaaatcagagctcagaatgccccaatttattatgttgcttttaaggtattagtagatagtaactatttggctctcctccatcgaggctgcagcttgtctgtaaacccaactttccagcttgtataatggatcaacggatcccctgatatgtgacggtggccgaagtactacgaactctaatgacattggaacggtaaagatattgtgatggcctgttagtttatgggaggtgtactgtttggcattgatctcgatgtaaacaaacaatgttagccttgccccatggggaagattaagcgagcaggatgttaaagatacaaaaaaaaaaaaaaagggcggccctcgagcctaataaaaagaaacggagggagtacgtatctgtaaatactagtttagtctgctttgctcgcccggtaaatggaaggcattgtaaagtttagaaattacaaagttttgtacctaggagtacaaggtttataatgtgatcattgcatgaagtttttaagttcccaaaaaaaaaaaaaaaaaaaaaaaaaa

SEQ ID NO: 44574 - DNA, 460 bp, Zea mays
  Clone ID: MRT4577_140656C.1
tttattcgtgggcggacgcgtgggcttgcaaatgaccttgtcaaagttgggataccaacctttggcccttcatcagaggctgcagctttagaaggatcaaaggacttcatgaagaagctgcgtgataagtataatatccctacagctaagttttatggctgaactatattaaagaactatctgtaaaagagggcaaacccagtgccaaagactcccatattagtggagtctggggaaaggataaaccgaggcgagtcttccttccgcagatgcagagaggctacctcgaaaccgtgacctggtgactgtgagacatctctaattactacacaagtttcacacaattacggatgctgtggaagctaaaaaatatgtaaaaaatgaaggagcacctattgttgttaaagctgatggactggctgctggaaagggtgtggttgttgcaatgactttggatgag

SEQ ID NO: 44575 - DNA, 814 bp, Zea mays
  Clone ID: MRT4577_140657C.1
gggtacctcgaggccggcccggccgggatcagtactctacacaagcagaagccggactaggcccatcaccaagacccactgaaccctcgccgtttcgtcgcacccaccaacacgagagatgagctccggcggcgcggacaagcccggcagtggcggcggcgcggtgaagacgccgtcggacttcctcaagtccatcaggggccgccccgtagtcgtaaagctcaactccggcgtcgactacagaggtatattggcttgtctggatggttatatgaacatcgcaatggagcagaccgaggagtacgtgaatggccagttgaagaacaagtatggcgacgccttcataaggggcaacaacgttctgtacatcagcacgacgaagcggacccttgccgatggcgcgtagccggattggagtccctctgtcctcctcccgtgtgtgtgccgtgcaacttcgaagccgttagcttcggttgcgctctgactctgatgcatcccttcaaatctctgtacccccctgtctggaagggagttgggggggagagggaaagtgtatcgcacggtttcgtgggctttgtcagatgctattttgatgtaactgacatttattcagcttcccatgttatgttatatgtggtgttgctttggggatatggataagatatcgtgttctcagcactgcgttatgtcctttcgtcgtcaatggtcggtatcaattcgtcaatttttttgtgataaatttgcggcctttttagctgtggggaaatcgacctttatatttatttcttgctcatcgataatgaccgcacgctta

SEQ ID NO: 44576 - DNA, 144 bp, Zea mays
  Clone ID: MRT4577_140658C.1
tgacgtgtatatcattatctcttttacgccatcctgtctcaactggcggctgatgtatcaacccttgttgcatcccctgaccttttagggtgcccatcaatggcggttattgttgcacattgatgcgttaatgttaatgccagt

SEQ ID NO: 44577 - DNA, 702 bp, Zea mays
  unsure (1)..(702): unsure at all n locations
  Clone ID: MRT4577_140659C.1
ggtaccgggncctcctctcggtttttttttttttttttttttttttttttttttttttttttttttaatcctctcttttgggcaaaatctatcattatcaccttgggggttgacaaaaccatttagggaggaactttgacaaccattttttacagagaccaaaaaccaaaatccaaaacgatcacggaacaaaaaaaaaaaaggcatataacccttcctgcgagccgcaaggatttgcaccaagtccttttaaataacggatgcccctgccaaacatgtcgctgtagtgcttgaacgactcctgccgctgaagccgaatttccatgttgaacttggggatgaacgcctccacgcgggggttaagctcgtcctgccccaaagacggttcccgccgcaccggcgcaagaagggccttgcttcttccggggcccccaccggggttgaaagtctgggccttccgaatcgcccccgccggggcgaccggcggtggatcgacctccccgttgcggccgccgggggacggacgggggcccgggcgggcgtcccaagtgtcggacttcttgaggggccgagctagcggggggccccggccctccgtgatggccttccacgtgctctccagggttttctccttccgggggcgggctacccggaaagccctgctaccttctgggcttgctttggccgccttcctgctgaacc

SEQ ID NO: 44578 - DNA, 241 bp, Zea mays
  Clone ID: MRT4577_14065C.1
tttttgtgagcggactgcttggctttattgtgtgtcatattatgcatcggtgttactatatatactacaccataccgtacacgattttcccaccttcaacccctctatgaccttcccatcaggatatatactagaatgtgccgcgtcagcccatggatgatgctgactaccatggaaatcgaactgaataaagtcctcagcatccatctggaatataaagaacgaaaagaatgaattatgt

SEQ ID NO: 44579 - DNA, 269 bp, Zea mays
  Clone ID: MRT4577_140660C.1
gctcattcgacgtgctgacacacctgctctctggccacacattccactgtgcctgcgcgcttacttaatttgagggcaccttatcatgcctctttttctgtttaagatgggtctactgaggaatccatccattattgaagaaggtagtatatctcaagaaattcaggggcatctggagcgtactcttcattcccacacctgtcattatatacaccaagctcctgtatactttattgggagtagttcttaacaactttaaattgtacata

SEQ ID NO: 44580 - DNA, 282 bp, Zea mays
  Clone ID: MRT4577_140661C.1
tttttaaggtatctctcgttattattataattaaggtcaaattcaaatgggtaaaaatgaggacactcctatcactgtatataaaatacacgtttgagtacaatacgcaataataagactcaacactatgacctcccatatgaatatgataaaccaacgttttattctgcaacggtgctcaccacctcactgacggaccgaggtttagatcttgagggactcgataaacctcgttccacgagaaaactgtccatggatcccagctacgaagtccgtcatgct

SEQ ID NO: 44581 - DNA, 1831 bp, Zea mays
  Clone ID: MRT4577_140662C.1
ggccgcttttttttttttttttttcttcaacacagaatcttatttatattactattaccatcacaatctcggcacaacagatgtgaaactgtagctgctatacccggatcaaaacatgaacaaggaaaaagtctgattctaatctatccccgtcacaacagcaacagcagaatctacaggatatctgaaacaggaagctgctgcgagtttttttacttactattaccatcaccatctcggcacaacagatgtgaaacagtaacgtctatacccggataaggagactctacagcatctctagaatgagaatacatacactagtacatcgtgtgtaaccctgctaaatgctaacattatccaagagggtgatggtaatctagcacttcctgatataatatatatacactaccaagttcgatattttaaatacgataaagtgctagtttggcaaccccatttttcaaggatttttattttaccaacggaaattagttcatttcccaagggaaaatggagttggcaaactagccctaaaatgtaataaatctgccgaactagtgctgtctgccagcgaagctctatgtactccctcttccatggataaaacggaaatacaacatattctcaacagccttcaaatgtcctcggaatgagccacaaaggaagatgaaactcagcaatctacatggtggatgatgctaccaatttatatacttggcaccattttgctatataccctactctgcaactttgttatttcgattcgcttggaatgaatggatatccttgcggaagttctctagttcctctgggttaaaccagccatcatcaaacagctgggtaaatttttcttccaattttttgttttcaagaacttctgtcagttttttgttcagtagaaaacagcggatgaaataaagaacataaattccacattcatccccattttgctgtggcactttgggaaactcgaggcagattttgtttatgaactgcttgctttcttcccgctcctcagtcttgtaatgtcaataatgaattttctgattgctgatcgcaaccttgtcggatctgtcgtattgagtgagtccagcaccatcatccgtggtcctttcttaatatccgaacagtttgcatcaccaaagtggcataagacaaggaggctccagtgtccaaaacaaacaataggaacaaaaacatattgtcttgaaaatattctcttagcttttatccatttaaggacattaggtttattactcccatggtaatacatgttaaaccataaagaatccaagtatgcataagcactcttcttatcttcatcaatgtgcttccaaagatcttccatgtataattcaaaaatatcagtatttagcttgtcttgatttgtcttgttcctcctgctagttgcatggcgtgaggctctgccctgggggaggttatcataaaatgaaggcaatacatttttggatctcctcccagatgtcttcaatgttgttgttaatacatttttcaatctcccagatgtcttcaatgttgttgttctacttgtttgagaacccttgctttggcactcgtcttcggcgtcgctgtcgaggtcgatgagcgcctgccccttgtcgcggcggcggcggggcataattgtccgcttccgcccgctcgccgtcggggaaatgccgatcgccttctctagggtttggcccggcggatttgggggagtagaggacgggcgggaaggcaagtagtggagtgcaggagggagaagcgggttttgctttttgctgtttgtttttcccggccggcctcgagggacccaatcgcccataggagt

SEQ ID NO: 44582 - DNA, 1639 bp, Zea mays
  Clone ID: MRT4577_140663C.1
aatctagcacttcctgatataatatatatacactaccaagttcgatattttaaatacgataaagtgctagtttggcaaccccatttttcaaggatttttattttaccaacggaaattagttcatttcccaagggaaaatggagttggcaaactagccctaaaatgtaataaatctgccgaactagtgctgtctgccagcgaagctctatgtactccctcttccatggataaaacggaaatacaacatattctcaacagccttcaaatgtcctcggaatgagccacaaaggaagatgaaactcagcaatctacatggtggatgatgctaccaatttatatacttggcaccattttgctatataccctactctgcaactttgttatttcgattccttcagaagtgtcaaaaacgggatgagatttacaatcacaaattagcaagcaggaaatgaatgcagaaggtgacacatacgcttggaatgaatggatatccttgcggaagttctctagttcctctgggttaaaccagccatcatcaaacagctgggtaaatttttcttccaattttttgttttcaagaacttctgtcagttttttgttcagtagaaaacagcggatgaaataaagaacataaattccacattcatccccattttgctgtggcactttgggaaactcgaggcagattttgtttatgaactgcttgctttcttcccgctcctcagtcttgtaaatgtcaataatgaattttctgattgctgatcgcaaccttgtcggatctgtcgtattgagtgagtccagcaccatcatccgtggtcctttcttaatatccgaacagtttgcatcaccaaagtggcataagacaaggaggctccagtgtccactgccattaaaaaaggtgaaaatttgatacatacctgacaactaattaagtgaatacacaaggtaataatgagagtaactcacaaacaaacaataggaacaaaaacatattgtcttgaaaatattctcttagcttttatccatttaaggacattaggtttattactcccatggtaatacatgttaaaccataaagaatccaagtacgcataagcactcttccgatcttcatcaatgtgcttccaaagatctctgtgcaagaagttattgcagcaataaggatacaaatttcttcggaagaccaactaacaggaaaagtaaaaacaaacagcaccacatactccatgtataattcaaaaatatcagtatttagcttgtcttgatttgtcttgttcctcctgctagttgcatggcgtgaggctctgccctgggggaggttatcataaaatgaaggcaatacatttttggatctcctcccagatgtcttcaatgttgttgttaatacatttttcaatctcccagatgtcttcaatgttgttgttctacttgtctgagaacccttgctttggcactcgtcttcggcgtcgctgtcgaggtcgatgagcgcctgccccttgtcgcggcggcggcggggcataattgtccgcttccgcccgctcgccgtcggggaaatgccgatcgccttctctagggtttggcccggcggatttgggggagtagaggacgggcgggaaggcaagtagggagtcccggccgg

SEQ ID NO: 44583 - DNA, 343 bp, Zea mays
  Clone ID: MRT4577_140664C.1
gcggaagaccagctcaagtacgcctgcgccgacgcttttttctttttcgaggacggccggaggctctacgagggcggctactagggtctagggttacggcatgctgtctggtttagcaatgccatgcgtgtcaggccggcgtatcagtattagcagacgtcgatggtcttcagtttgcgttgcagttgtgtcctctaattactctgcctaataagttgtactagctagtatcacgcgcgtgatctcttttgtgtgcgccaccactcgtcatgcatatggcatttcgacttcaaaatttgaatgctatcttgaagccccaaaaaaaaaaaaaaaaacaaaaagg

SEQ ID NO: 44584 - DNA, 229 bp, Zea mays
  Clone ID: MRT4577_140665C.1
acccatcagacattcagtggaagctccccgatctccatcactacaaccagccactcgagctctgaatctttgaagctcagccagctcgccgcgaccgtcgagcctcaagtttcgccatgtcgagcggcggccggaagcagcagcagcaggcggagaagccggcggcggcggaggacatggagatcaagaaggtcttctcccgcttcgacacggacggcgacggccggat

SEQ ID NO: 44585 - DNA, 1053 bp, Zea mays
  unsure (1)..(1053): unsure at all n locations
  Clone ID: MRT4577_140666C.1
gtgccgggatgatactgctggggggtgatagtactggtcacacgactattgcggcggcccatgtcctgccggcgtcgtatctgaactcccaagacgccgccgccgtcagacagtacatcaacacgtccagcaagccgactgcctccatcgtcttcaacggcacggcgctgggcaccgctccagctcccgtcgtcgcctacttctcatccagggggcctagcactgcgagccctggcatcttgaagccagacgtcattgggcccggcgtcaacgtcgttgcggcatggccgttcaaggtcgggccaacaacaaacaccgccggccgtgaccgtgacgacgacgaccaacatggagcagcagcagctactttcaactccgtatctggaacatccatgtctgcacctcacctcagcggcatcgcagctgtcatcaagagcgcacaccctgactggtcgccggcggtgatcaagtcggcgatcatgacgacggcctatgtcgtgtatggtaacaacaaaaaccagccgatcttagacgagcagctcagtccggcgagccatttcagcgttggggccggacatgtcaacccttcgcaggctgtgagcccaggcctggtgtacgacaccgacgtggagcagtacgttctgtatctctgtggcctaggctacacagactctcaggtggaaacaatcacgcaccagaaggatgcttgcggcaagggacgacggaagatcgctgaagccgagctgaactacccttggtggcgacaagggcgagcgtaggagagcttgtcgtgaaccggacagntnactaacgttggagatgcggtgtcgtcttatgccgttgagattgacttgcccaaggaagtcgaggccactgtgtcaccagcgaagctggagttcaccgngctcaaggagaagaagacgtttactgtgaggttaagctgggatgcgagcaaaaccaagcatgctcagggatgctttaggtgggtctctagcaagcatgtggtgaggagccccattgtaatattctagtgtaagatcgtcgtcaagatag

SEQ ID NO: 44586 - DNA, 398 bp, Zea mays
  Clone ID: MRT4577_140667C.1
agtgctacggttccggccagggggccacgccggggccgggcgagcgccggcagccgagctggacgaggcgccgcgggagggctgctgggcgcagttgcctctcgatcttctgcgtatgattaataccatgggagtgatatacagatggttctaccaatcatggttggaggttacacagacttcttttgttctatgctccatacaaggaattgtggattcatcttccgagggtcgtagactccgatcaatccaaattgatatgtgttttcttggtcaatcatggttggattcatcttccgaggatctagactccactaagactgtcctttgacaagctggacggtgttgacgttgcatggagtcagtcaaggatcaacgactctgtcatggtttgctca

SEQ ID NO: 44587 - DNA, 436 bp, Zea mays
  Clone ID: MRT4577_140668C.1
aagctcggaattcggctcgaggaaaactttcgttcggcagcggcggagcccgagatccctgcaccgctgcccgcccgcccgcccgccggaatggagttcgcctttagagaatgaatccttctcgccttcctaccccacgctcatcatggtttcaagccctaacgctgcgacctaccactgattattgctgcctggaatcgagtttttagtagttttaaccgatgccctacgattacatttggtatccgaatcacccggctgcagccagcgatatcgattggcaacgtggggcagctcgccgtagaccttctgatatccttgacgagggcgaggcgggtggcctacctcaacgtggtggggcaacgacgcctttggtcctgacgccgtcggggacctcgcactcgcttcactaaggaatgattggttcatttgcaaa

SEQ ID NO: 44588 - DNA, 498 bp, Zea mays
  Clone ID: MRT4577_140669C.1
ttgctagattatataatctagagagattataattcgaaataaactgagccttggctgttacattattcaagtacgagatactccaatccgtttaatcgagcatatgttttgcagggccagcgggggcaggttttacgcctcatcttatttttgtaaaagccggagaggtacagttaatcctggattctttttcatatacgtgcatgccacttgtcagtaaatcattcagtttatttttttgttaaatgaagtaaggtttagcattactagtgaagacaccatctttctgaattctgattcagctgtcatcaatggaactcttagagcctgtttagttccgatgtctaacttgtcatactttgtctaacttttctatctaacgttagttctttaattcgaacgactaactaacacatttaggcacgaaccaaacaacacctaatctgtattagctattaattgtaatgcattagtggcgcctctgccggtctgaatttt

SEQ ID NO: 44589 - DNA, 222 bp, Zea mays
  unsure (1)..(222): unsure at all n locations
  Clone ID: MRT4577_14066C.1
cgtgaacccgacgtcgacgcatcagtaggagacgcgccaatnnggcacgaaaggaggcgactatgagggccaagaggaagaagaagcgcatgaggaggctgaagaggaagcgccaaaagatgaggcagagatccaagaaggctgatggggaaagtggatggaggtgtcagcatagttgagttacgtaactttgatagcgtgagatcaaggagagatgtcaca

SEQ ID NO: 44590 - DNA, 221 bp, Zea mays
  Clone ID: MRT4577_140670C.1
ctcacttctccaggaaagtgttcgtcctcatggcgccgccgcagccgaagtcgggcctcttcgtgggcatcaacaagggccatgtcgtcaccaagcgcgagctgcctctgcggccgtcccatcgcaagcggaaagcaacgaagatggtgtccatcgtcatggtgctgatcagagacgttgctggcattgctccttatgagaagcgtatcacggagcttctg

SEQ ID NO: 44591 - DNA, 342 bp, Zea mays
  Clone ID: MRT4577_140671C.1
aataaccctatttacgggaatttataaacaggggggcaagcatttcggaggggaaaaacagagaaaccacccggggggggcggaggccgccaccaggctctaacactccacaaaagaaaacgcaaacccacccaaacaagacgcgacacacccaaacggaggagagggccaagccgcccaaccaacgaaggggaaacgcccaagctgactaccctccacgcacacactgggttgtggacacaaaacacaacaacccccccggcgggtcgaacggagaaacaccccaccagaccctcacagaagcagaacaactttcctatgagacacccttctacaaggagg

SEQ ID NO: 44592 - DNA, 318 bp, Zea mays
  Clone ID: MRT4577_140672C.1
agaattattttaatttaaaaatgctaaaatatctgatgcttgttcgacaagtatctgtgcaccacaggttttagggcactggataccatggattttagtttacctagtgtgttgctgactattttcatttaattgtcgtccagaatgccctagtcctgtcagtattcttctatcagtaaagctgctgatgtgatatattgttacactagattactagattaggtttttttcctttgaaaagctaaatccatttcccttcctttgattactaaatgtatggtgtggattttcacttttagtatcaaagacatcagcgta

SEQ ID NO: 44593 - DNA, 406 bp, Zea mays
  Clone ID: MRT4577_140673C.1
ccgcgtcgacccagcgtccgcccacgcgtccggtttcgagatgctatcagtctcctctattgattatgcactctaacagagatctaaatgttttcactaaacgcaatactgcggatatctactgtttgatgttgattagttgccctggattgagttatattttgggtttggattgcctcattttccaggttgccctgtattgactggggaccaccattatccttagcaacatgtcctgcaagcacactctatgccctttgttcgaagttcttattaaaagcaactgttatatattctttcatggccggactcaaactatattgcctgatgtacagaggtgtatctttcttttttcacagaagtggggcttacctgacctggggagatggtgtgctgtaatggacag

SEQ ID NO: 44594 - DNA, 394 bp, Zea mays
  unsure (1)..(394): unsure at all n locations
  Clone ID: MRT4577_140674C.1
cgactcacgcgnccgctcgtgtgtggancctaaaatctttgctactcatagcagccaggcattttctttttgttggtcggcttctttagcttcctccagctngccccnctgacctggccctctcatgcgttacaggaccccgcttgttccttggtcctcaatcggtgcaggtgtctccttgcgctgcntcccctggggggggctgtccgactttttttgattgacgtcgcggtggtgcgcctcgtcggggcgctcctcgtcatccacctccttgcgcgtcncttcccctgggagctgcccgtgggcgttggccntggccggcgcggggacgttctcgatcttgtcggtcttggggcccctgtggtcccccggctttgtgtggttgggctgtttc

SEQ ID NO: 44595 - DNA, 624 bp, Zea mays
  Clone ID: MRT4577_140675C.1
aaaaaggggggcctttttatccctaaagggccaaacgggccctttttttaaagggaaaacaaccggggctttaaaattccccccggccctttccaaattttaaaaaaaagggaaacaatgggggccccaggtgggaaacccttttttttccgccccgaaaaacgggaaaatttccggaaaataaacccccctttttcccccccaaaaaaaaaaaggcccccccttgttgtccccaaaattttttgggccttttaataacccccttcctttgggccaatttttacccccgaaaaatttttttttttaaacgggggggacgggaaaaattccttatttggaaattgggcccccggtttgggattcaactttttttggggggggggggggcggtaaaagggtccccaaaaaccccccaaaaaatcccttataattccggcccccccccttgggccctttaagggggggggggccccaggttttttcttaaaagggtcctgatttggccccaaaatttctttgggaatgcccccaagggttgcctcaacttccttattttaaaaagcagaattttttcccctcccaaaaaggtgaaaaaacccctgtttgatttgtggaacccccccc

SEQ ID NO: 44596 - DNA, 263 bp, Zea mays
  Clone ID: MRT4577_140676C.1
cgttgacttccagctcccaattgctcctccgcaacctctattcaagatgattgccgcctccgctacccgtgccagattggccaacgcttttgtcactcgccttgctttctctactactcgcgcacaacttgccagtccctaccactacgctgagggtcctcgctccaacattcccttcaaccccaagaccaagtacttcttcttccgttactgggcattcatgatcaccggttttggtgctccattcgccattgccgtctggc

SEQ ID NO: 44597 - DNA, 806 bp, Zea mays
  unsure (1)..(806): unsure at all n locations
  Clone ID: MRT4577_140677C.1
ccggccgggtttctcagaacaaagatgccccatgggcaaattgctgatggcaccaaattctttggggccctgacttttggtttaataacgatcatgttcaatgggttcgctgagctacaattgaccataaagaagctaccagttttctacaaacatagggatttcttattcttccctgcatggacctttggagtggcaaacatactcttaaaagttcctatctcgctcgtggaatcagtagtatgggttgttctcacatactatgtgatgggctttgcacctgctgcaggaaggttctttcgtcagtttatagctttctttgccacacaccaaatggcaatggctttatttcggtttcttggtgctgttttgaaaacaatggttgtggccaatacttttgggatgtttgtgctgctcattattttcatttttggaggatttgtcatccgtagaaatgacattaaaccttggtggatctggggttattgggcatcacctatgatgtatagccaaaatgcaatatctatcaacgaattccttgctagtaggtgggctattccaaacaatgacacgactattgatgcaccaacagtaggcaaagcaattcttaaatccaaaggcttgtttactgaagaatgnggattttggctttccattggagcccttataggattcattattttgttcaacagtctctacctttgggcccttacatatttaagtcctagtagtggctccaatgccctagtttcagaaggtgaagatgatgtaaatngaatagcattgaaagaaagaagcagagatgc

SEQ ID NO: 44598 - DNA, 360 bp, Zea mays
  Clone ID: MRT4577_140678C.1
gcccaggctgcaagagtggcacgctccaccggtacttgctctttgccgtcgcttcctgctcggtcaacctcttgttcttatgactccctctgcttccttatgatcaatcgtgtgtgctccggtccacccttgtgcagatgtccgatccaatactagcgattgcgacatacaatatatcgtggacgtcacattctggcctttgctagtgcaaatacaccacaaggtagaatacgctcatgagataatgttgttatggctgatccactggaagctaagcgcctagatgctaaacaaatgcatgaaatcaagcccaaagaaaagctgaataggcgccgtcatgcagatgcgatcaacggggca

SEQ ID NO: 44599 - DNA, 483 bp, Zea mays
  Clone ID: MRT4577_140679C.1
aacagggcctggaatggggcgaaaaaagggattttcccaaaagttttacagtcaccaaagggggggggggcacgcttttttaaatggcggaaccagaaggggacaaaggtgtaggaaaatcctgaaatcctggttactggttaaaggaagttgctaattggtagaagcctggggtaacttccaacccaattagccagggatttggtccaatttgaaaccaggggggaaagagccgttattatttttgaagggaaaatattttaaaaattgagcattttaaattactggggaaccaggggcaccttcaccttttggaactggccaattaaagttctggtttggatttttgaaggcgaaagccttgaaaagaaaacaattttgtggatttatatgaaagtttggggaaactttttaatcaaaaatatattcgaaaacccggggtgggaaatagggggattttggggctgatacagggcaaaattt

SEQ ID NO: 44600 - DNA, 330 bp, Zea mays
  Clone ID: MRT4577_14067C.1
gcacgccgcccgttgcgcagggagcaccgaggcaggccggctcctctcgtcggcggtggggcctaagccaatgtcaccggccctcggggctcgaacgccctaacgcggatcagatcactctgccagcagacgcgcccggtgctagcttgcattctgacttagacgcgtgcagtcataatccggctcacgatatcttaacgccactggcttttcaaccaagcgcgataaccaactgtgtgaatcaacggctcctctcgtactaagctgaattactatgtgcaagcggtcatcacatgggacctaccaacctgtctgacgacaagtgtaaac

SEQ ID NO: 44601 - DNA, 330 bp, Zea mays
  Clone ID: MRT4577_140680C.1
catccggctttcgaacaccagatcctcgctgggctctcaaaggcactgcatgccactcgccgtgcgggtgacagcctccgtcccctgctcccctacatgatcagggcttgccggccctacgctgtccactggttcgcgcgcgaaaccctatccaccacgtacgcgactggcacatgcaccagctacgccggtgagcacctcaacaagctactcaccatcatctaccaccgcacgcacatcgagccactcctctagtgccccaacgagcagaactgctcgcccctgacaatctcctgatcttagctgcacgcagctgctcctgacaaacaa

SEQ ID NO: 44602 - DNA, 323 bp, Zea mays
  unsure (1)..(323): unsure at all n locations
  Clone ID: MRT4577_140681C.1
cgggncggcccaggccttccgggaacacctacaaggtatttgccactgatctttggactgaccccactccatggccattcaaggagacggcctataagctttagggtgggggggaaacatggaccctttgggaaagtgccatactatggtactgcaccgggtgtagtccatcagcctaattttgctgcaacatttacattcatagcaggggaaggggcaaaaggtctaatgaagtcccaaccaggttgtaatttcagggtccaccctttaatgcaccatgtccccttccgaattttaagatcgaagggttttttggataaaat

SEQ ID NO: 44603 - DNA, 595 bp, Zea mays
  Clone ID: MRT4577_140682C.1
aaaaaaaaaacccggatcttgcctttttttgaaggggggggcccttggtcaaggggggggagagggcgggacaaaaccctttcccgggaaagcccaaccaaaaaaaagggggcccgtaccccaccccccccccccaaagggttttggccacccccccatggttaaaaggaaaaaaccccccccccaaaaagaaaaaaccccccccctggggcccccccccaaaggaaaggaggcccccaaaaagggggggaagggccccccccccgggggggccccccccccaagggcccggtttgggggaaaaccttatccatcccgcccccccttgggggggggggacctccaaaaacctttgggggaatcaaacctttgtccaaaaaatctagggggggggggccttaaggcggggaaggggaaagcccagggcaatcaaaagcccacctttactgggagaaaacaacaattggtcgaaaaaaaaaagggttaaaaggttttgggggccccccccttggcccaggcccccaaaactccaaaaaaaaactaaccggtttttaggggggccaccggttgggaaaaccccgggggaattttttcc

SEQ ID NO: 44604 - DNA, 740 bp, Zea mays
  unsure (1)..(740): unsure at all n locations
  Clone ID: MRT4577_140683C.1
cccgggcagggccggcggtgtcggcagcaacaagtacccgtcgccgcgctggtccgactgccactgcgccaactgcaacccggcggacacgggccgcctcttcgtgcacgtcgaggcgccaccagctggcgacggcggcgtggcgacggaggaggacgtgctgttcatccacggcttcatctcgtcgtcggggttctggacccagacggtgctcccgcacgtgagcccccaggcgcggtcccggcggcggctgttcgccgtggacctcctggggttcggccgcagccccaagccggcggactcgctgtacacgctgcgggagcacgtggagatgatcgagcggtccgtgatcgagcgccacggggtcaagtccttccacatcgtggcgcactcgctgggctccatcctcgcgctcgcgctcgccgtcaggtaccccgccgcggtcaagtccctcacgctcgtcgcgccgccgtacttcccggtgccgcgcggggaggtcggcacgcagtacgtgctgcggacggtggcgccgcggcgggtgtggccggccatcgcgttcggcgcctccgtggcctgctggtacgagcacctcagccgcaccgtcagcatcgtgctctgcaagcaccaccgcctctgggagctcgccttccgcgtcttcaccctctacagggtacggacgtacctgatggacggcttcttctgccacacgcacatcgngtcgtggcacaccctccacaaca

SEQ ID NO: 44605 - DNA, 367 bp, Zea mays
  Clone ID: MRT4577_140684C.1
agatacatggcgatgtgccatttgcaatacacatgctgggaaaggatatggttagttggtctctgccaagtgccaactctacctgatgaacgataacgattctttcatttgttcaagttcttagtttgctcagttcatagttcagatctattagtctaacggtattttctaataagcttcttgtgtctctaagggtgtgtttggttgaggagtgaagaatggaacggctccattctagtttttggatctttggtttccaacaaaagaggagcggagcggctcctgtagtctccatatggaaattaacataaatagttggagtgctcccgctccaccaaaatggttgggatgcgagcgctctccttcc

SEQ ID NO: 44606 - DNA, 510 bp, Zea mays
  Clone ID: MRT4577_140685C.1
gggtaatcgtttccctttgtaaggtgtgctaactgcggggcatttcagcccatgttgtgactactcccgatatttgatgtacaaagccctgtattcagtccttaccgaccgagtttctatgatgcagactaagtgcctcctccccactcgctggcttcatctttattgggatagaagaaggccacaacagcaatgatgatgtacaccgcacagagcagagcaccttcaagataattgcttcttccatcaaggacaagaaagttgacaataaacgccgaaacgaacaggcagacagtctcaaatagtgtaaagtaaagagacatgtctttgtccataatccatccgaggataaccatgacgggtgtaaggagtagagcaatttgaatggaactgcctacagcaacaccgatcgcgagatccatatggtttttgtatgcgaccttgatggcggtgacatgttcagcggcgttgccgacaatagggagaatgatgctcgagccgaattccgag

SEQ ID NO: 44607 - DNA, 207 bp, Zea mays
  unsure (1)..(207): unsure at all n locations
  Clone ID: MRT4577_140686C.1
attgattcatgccttgttcgggtattgtcattacatatggnnnccgtgagattgaaaaaaattaagaagaagtctgacttgtttgggatttaaacttactcaatccatatatatggattgagaactaactgaacaagacctcatcttgctcagtgaatcgcttattgaatgttgccaccgtgtaacatatgtcattttgttcatgca

SEQ ID NO: 44608 - DNA, 378 bp, Zea mays
  Clone ID: MRT4577_140687C.1
ctaatgtgcattcgccccatgtatacacaaataacgtttaccaaaaatcttgattacagatgtgttcctggtgagtataccgtacggttttgcttaggaaatggatgtgttcctaatgggtctgtcgtacggttttaccgtggtccattgaataatagtatctcacagcaaaaaaaaaaaaaaaaaaaaaaaaaaaaaaaaaaaaaaaaaaaaaaaaaaaaaaaaaaaaaaaaaaaaaaaaaaaaaaaaaaaaaaaaaaaaaataaaaaaaaaaaaaaaaaaaaaaaaaaaaaaaaagggggggcccttttaaagggtccaagttttttttcccggggtttcaacccttaaacctttttatagggggccctaaaatta

SEQ ID NO: 44609 - DNA, 310 bp, Zea mays
  Clone ID: MRT4577_140688C.1
cccacgcgtccgcccacgcgtgcggccaatcccttattgcgacctgcgttccgccaaaaccctacggccatggacggcggacgcagcggtgtagggcgaggaggagttgaggcaagtgtcatggtgggcggaggagttgagccgatcagcggcgctagagactgcagacacttggagactcgcagatagacgctgaagcttgagcacaagctgtactactgcaatctgaacgataactccaggcggaggtacctcaagatatgcgcatagactctctacacgcgctctacaatcattgctctcggcaact

SEQ ID NO: 44610 - DNA, 376 bp, Zea mays
  Clone ID: MRT4577_140689C.1
cctcgaagccggccgggaccgatataaaacaatcgcggagaggcaatcaccacgtacgtatacacacgggcacgtaactagctagctagctagcagtcgtagaatgacgatgaggggtctctctgttgcggtcgctctggtcgtggtggtggccgcggcctgccttgccgcaccgcggggcgcagaacagcctgaaagagtggagcatacagatcgagaaggccaacagcgccaagaagctggtggtgattgacttcactgcaacatggtgaccaccgcgacgcgccatgactccaatttttgctgatatggacaagaagtccccaaatgtcgcctaccagaaagtagatgaggatgaaacgaacacacccgctcg

SEQ ID NO: 44611 - DNA, 196 bp, Zea mays
  unsure (1)..(196): unsure at all n locations
  Clone ID: MRT4577_14068C.1
aaacctcccgggtaacaaacccgacaaaacancaaacagcggggggggaatgttacaggagcacccccgattttactccaagcccatggacaactcagatttgtgggatacacaaggcaataacacggcacgacaagataaacgggctcaggcaaatacccttcacatgttagagcgcaacccacgcctaacacca

SEQ ID NO: 44612 - DNA, 2396 bp, Zea mays
  Clone ID: MRT4577_140690C.1
tttttttttttttttttgaagaaaaaaaattgtgattacaatgatgcggtccattcctatgtttccttttttgtgtgtgtgtgtacgagttgtggaatgttcgtgaattcatgagttgatggataaacttagaagagaaggtagatagtacttgtttcagaagccctgcaaaacatgcagccggaggtagcacaaccgtggaggtgtgcagacctgcatatgatgcttcagctttactgccagttcagaccggacctcccagttcagaagagaagcaaagaggaaaccattacattgcacggcacttcagatagaaaggtagccctccctccctagcaactcatacttcaaacaacaacacaggagatcacatgctatagacccttattcatgctttggcatcatatgtcgcagcttggcaactctttcggctcacgagaccgagacacaacacaacacagactaaattatttggccaagtggccggtggctacaaaccgccagccgttggtttacatccatcaagcggacaatacattgtgctcttgacttggcataaaccatacttgatctctcccacccacggtatctctgcgacaacacagtcttgtgacaaacaatagggcaatcatcataagtcgcacaccagaatggaatttagctcagcatcagccgctccactgatcgtgatgccttggtgtctaacgctcatcaagtaggacagtgaatcatgggttactacctcgcctggaatcagaactgggataccaggtggatacgggcatattagctcaccacagatttcaccaaggctgtcctcgattttcactctcctcttctctgtaaagaaggcctctcttggactcagatgcacagagatattctctaatgggccatgcacacgattctccttcacgggtttcaggctatttgcaaagaaatgtttttctgatagatgctttgcagactgcacaagcttctcagcgtcctgcactctggttcctaagttgactgcaaatgtcacggcccttgtgccaacaagctcagatacgatttgatggccttcatataaaatgtcatcggcttcgtatcccgataattgcagatctgaggcactgagtgtgatgcgcaacggatcaatggcagggaaatcagaagcaaagcatggtaagtctagaacagatatcccagggattctcgccagcaggtcttttgtttccgatgctatagctaatggctcatcaaatatatttctgttctggctcagctgatctctcgcggcatctaaagatgacagtagaaggtaactcgggctcgagctctggaggagctgaaggcactggcttactttatctacatcgacaagatctccagacatgtgaagcattgaagactgtgtaagggagcacaggaccttgtgtgtggattgcacagctaggtcagcaccttgctcaattgcagtgcttggcaaactgtcatggaacctgaaatgtgcaccatgcgcttcatcaactataaccggaatgcctcgtggatgacaaacactgacaataccttgcacattgctgcatacaccatggtaggtgggtgaagtaacaagaacagcgcctaccctctttccatcctcctccagctcttttactgcttcatccagctgcagcggggtgataccaccagcaatgtcccacccagaattatattctggtattatgtatttaggcaccacaccagacaagaccagcgcagagatcactgaaatgtggcagttccgtggcacaatgaggtagtcgccgggagaacaggtagccatcactgaggcctggattccacaggtcgttccgttgacaaggaaccaagttttagatgacccaaacagttgagctgctcgcctctgggcatctagaatcacaccttttggggagaagagatcatcgagctcgggtagctcgggcaagtcatgcagaaatgcccctgagccaatgagtttcgacaaggaagatggagcagcttttcctctgttgtgtcctgggaagtgaaagcaggaaacatcttgtctggcagttaattgcagtgcacagaccagaggggcagtacaatcttgaacaagccccgaggatccagatgatgaaggtccggttccagatattgctggtgtgctcgatgcagtgccacactgaacaacagcacttcgtccagtccggcgggggcaacacgcgaaggtgacgggagggcagctgccggcaacgcagcgagccatgactggtcactggtgactgctgcgccctgcttccctctgcgagagacggcgggggggacggaggggaaggggacccgatcgtggtgctgggcacctggggataactgcgcgatacgccgagtcggacggagggggtacc

SEQ ID NO: 44613 - DNA, 327 bp, Zea mays
  unsure (1)..(327): unsure at all n locations
  Clone ID: MRT4577_140691C.1
ctgacgcgtggngcgcgtggggacctgcccatggagctcgccctgcccaccgccttcaccgtcgtcgtctacctcatggcggcgctcaacccgtcccccgtaccgttcggtctcacgctcgccgtcgtcctggcctacgtcctcgtcgccggcggcctcggcctcgccgtcggcgcactcatgatggacgccaagctcgcgtccacgctggtcaccgtcatcatgctcgcatacctcctcaccggcggcttctacgtgcacagcgtgccgcggttcatggtctggacccagtacacctccttcacctactactgctaccgcctgctc

SEQ ID NO: 44614 - DNA, 366 bp, Zea mays
  Clone ID: MRT4577_140692C.1
gctgtcgtgaacatataatactggcctcttaactgcgacgatgcaataagggtgatgctgatgatcagaataatgcactaacaccaacttatcatgttgaaaacaaagaattccatgtttggactatgaccttgacaaagataatatgttattctgggctagtttcaagatgtacttcgaattgcatataaacagcttgcgtaatgcaaatttgaatacactatgggaggatgatgtgcatctacactatatcacaaggagatatgctgaacttacagcttctctatttcatctaaatagtgatcatgggcacggtcagcttgatctaaatctggagcgattgcagatggccatagaatgatttgc

SEQ ID NO: 44615 - DNA, 353 bp, Zea mays
  unsure (1)..(353): unsure at all n locations
  Clone ID: MRT4577_140693C.1
aaatccttctctccctcgcgcacggnaccaaggcagaccacctccacctctggctggcactcncacacccaccttctcccgccaccccctctcttcctcactccctactctgcctcgcgcaaagcgcaccgataccacaagcgttaggacccaacaacttaccccagatccacaacagtctcctatctcctcaactaactcatgactacctactcaacttccccatccacatctcgctaagagaacacaaactggtgagcgatccataattcctcttgaacttaactgtgatcttgaccataactattcctctttttactaacgttcaagcaatacaatcacttacatgtttt

SEQ ID NO: 44616 - DNA, 283 bp, Zea mays
  Clone ID: MRT4577_140695C.1
ctcctctgtggcttttcctgctattgtcccctaatgataggtaattccctgctgctgacctggagattcagtaggatcttttgagtggaggtgggtagagagagcaaggagggcaggagacttagcaggcactgagcaagcaggcccccacctgcccttagtgatgtttggagtcgtttgagcctcttctattgaattgccttgggatttccttctccctttacctgcacaccctgtgccctacaatttgtgcttctgagttgaggagccttcacctctgttg

SEQ ID NO: 44617 - DNA, 285 bp, Zea mays
  Clone ID: MRT4577_140697C.1
cccccccccccccccaagggggccgggggcccttttactttccaaaatgctcgcacacccacaccaaatttacgatgaatttacaggaccctcctccgcatcatgtatgtacagaacaaacacccttgaccctttggttacaaaataataatctaccgaggaccaaagcgcaaaaaaagctagcccgaactcacagtaagaactccctacaaaactcggacaaagaccaatcccactccgacttgggaagcggcggcttgtgaaagtccttgaaaaggcccctta

SEQ ID NO: 44618 - DNA, 143 bp, Zea mays
  Clone ID: MRT4577_140698C.1
cggccacagcacctcgcaagcactcgcatcattccgcagcccacgccgggcgattcgcccgctacggctgccttgctcctccaatccgcgatcggggtacgtgatccaagcgcgatctcgcgggtcggcgcggaattgggaga

SEQ ID NO: 44619 - DNA, 693 bp, Zea mays
  Clone ID: MRT4577_140699C.1
ttttttttttttttttccacagaacagtctctggtgactaggtagttagcaaatagatacctatctaggtaggtatacaccggccctcaggtggctggctgtctttttacatggatagcatcttgtttccggccttcacccacaacgacataataaacccgatgctggttacccaaactaaactgcgtacccgtgatattcggggaatatcctgcaaccacaggtaagcgatgttgtacaggagacggctcccaacaaagccgagaccgagaatgttgattgttggcgctggtacgtcagcgaaattcgcggccaagatacctgcggcatagcaaccgatagtttcgaggccgttttctgtggcagcttttgcacggaggaggaattgtttatgagatttatcaagcgtctggcaactggctattctgtccctgtgagagcgagggttacagttgtcgtaggtccctttggcaccggcggtgatggtgtaggcgtgagggaacgtgatgatgaagaatgcagctgggactgtgaagaaggaatagttccttgtgagatcgagaccgagaaaagactccattgttggtggtttgatagggagggagtcgtactgtgatgcagagagagttcagttgaatgggttgatgaatggatggaggagactcctgtttttaaatcacaaacaacaacaac

SEQ ID NO: 44620 - DNA, 379 bp, Zea mays
  unsure (1)..(379): unsure at all n locations
  Clone ID: MRT4577_14069C.1
ctccagcgccgcagcgcgctcgcccgcggcccgcgcctcctgctcctgccctcctctgtcctctccaggctccagctcgcccgtcaggccgccaccgccaggcgctcgcccgccagcgcgctcgctcgccaggccgccaccgccaggcgcagccgcccacagcggccacagcgcgctcgccccgtcgcccgccaccgtcaggcgccagtcgcggagcgccggaggcccggagccggaggccgtcgaagcgctcgcccggagccgtatgccgtaacgcgctcgtccgcattggtgttttcgagctaacttacgagctccgtgaccgcattgttnagctggtttactagtttacgcacggacggttggcgtcgtctcacgc

SEQ ID NO: 44621 - DNA, 701 bp, Zea mays
  unsure (1)..(701): unsure at all n locations
  Clone ID: MRT4577_1406C.1
tagggcggccgcccagcgttcttttttttttnnnttttttttttttttttttttttttttttttttttttttttttttttttttttttgttttttaaaagaaaactcccctttggtttaagaaaaaaaaagggaactgtttttggtggaaaccgcccaaataaacttcccgatacaaccggggccctaacaaaactttttttttgcctttttacaaagattcgggggcgattgttacaaaaggggcccctcaacgtgtttttttttttcctggcccccccgggttttgggcaagtttctccccaaccccgggggctggcaaattaattacccttgacatatcacctttaataatccaccttgggccccaaagatcactcaaaacgctctgaaggctcgaaggcataattggtttcgttatcggaacctctaagggtttcgtttttggcattttaaaggggtttcttggcgggctttgtttcctttgggcagggggcatttaccttgggaaaccggggggggttttaaaaccaaccggcgggggacgaatttggcccctccggttttaaaggggccgggggggggcccccgaaacccggcggggggggggggtttttcgggccgggggcccttccttggggtggaacgatttcaggggtggggggcccgtaaaaaaaaaaaaatattttttccgagggcccc

SEQ ID NO: 44622 - DNA, 355 bp, Zea mays
  Clone ID: MRT4577_140700C.1
gccacgcatcactggccagttctaacgctcgatcgcattcgcacgtacgctatatctagctagactttttggccgtgcgcgcgcacacgggtttttgtcgggatcacaggcaggcaggtaccccggcggtcggcaagctctatggctcaggggcggatgagctgcgtgttcctggcatgcctggtggctgtggcgtcggtgtcggcatccaccgcgtatcctttcgagttcaaggccggccgtacgggcgagtggcgcgtgcccgtcgctgtcggtagcagcaacggcagcttgcacatcgcgtgggcgcagcgcatccgcttccgggtgggcgacgccctccgtttcacgttcc

SEQ ID NO: 44623 - DNA, 288 bp, Zea mays
  unsure (1)..(288): unsure at all n locations
  Clone ID: MRT4577_140701C.1
ccaattttaaaaaccacaaaaaacgcaaaagcgcaaattgtaaacgtggtgcggcccccaaccacacaacnaacacaacnacacacgccaaacaccctacccccaccgcgaaagcacacaaactctatacattattcgtaagaaacaatcaacagcacacccaaattccctatcgaagcatgcacaagatacaataacgacagccgtaaaacccaatccagaagacagaccatcagcaaccaaactgttggaacacccattcgtaaacaagccaataaaatcaccacc

SEQ ID NO: 44624 - DNA, 754 bp, Zea mays
  unsure (1)..(754): unsure at all n locations
  Clone ID: MRT4577_140702C.1
tccagtatgtcaacgcggagggtaccaccaggtgcttacattatgtttttaatagagtaatatagatatagatataaagcaattgatgtttatgatatgtagtaatcatcactagattatacaatacaatgcccgtgcgtagttatatttttttccgaaaccgcaagaaaacatatgatcgtcgtaacatacaaaataaatgaaaaaacaatgtgagccttaactacagaagaaacattaggaaacaataattagcttcttcagtgtgataccgcagttctcgaaaagcaaatacatggttgggaccacagtggagtgcttgcagttgttccccctcattttcagccgacatctgatgccatcaagcaaaaactcaactgcccacgcaggagttctcatgggtaccatatgttgatcactggcacaaaagacactgggacgatcttcatagcttaagcacttnggtggtttcgcccaaacccattatgatgcaagcagcgtggccagcatagccgaggcacggtacatgcttctccggattcagttgttgaagtgaatttgcagtgttgggtctcactgtcgttcgagcacaatggacatcggacctctctctcctactctcgcatggtctgggttctgcgttcctgccccggattattgtgattctgatttgcttgtagatgtactccctcagccctaaaaactacaaatctcgtttttctctgtcgagatatataaaaaagttacttttacc

SEQ ID NO: 44625 - DNA, 393 bp, Zea mays
  Clone ID: MRT4577_140703C.1
ccgtacgctcggtattcggctggtgcctgacgctgggcgccggtttgtcttcagaagccacgacttagacgcaagcggcgcttgttatggatgccacgtcccctattgctgaggatgccaaggcgaagactaggatgttgactgagactgtctgacttcagagtgttctgaagaactatgatccacagatggacatacccttcacgagagcggcgatagggccccctatgcctcgagccaagatgactgtgggcatgctgaggaatgcccagcctctagaagaggcggacacgatgggactggactccatggacggggaggctctctagagaccggacctgaacaaggagctagtcaagaggctcgcactgaagtaccatgctgccttgggat

SEQ ID NO: 44626 - DNA, 319 bp, Zea mays
  Clone ID: MRT4577_140704C.1
accatgccgacttgatcatcaccagtaccttccaagagatcgccggaaacaagtacaccgtcaggcggtggtatttacacatggggttgacgatgcctggcctgtaccgacttgcccactgcattgatgtcttccaccacaagctcaacatcgtgtctcctctcgcgcacctatccatctacttaccgtacacctactcgcacaatacactgacctgccttcacccggagattgaggagctcctgtacacacaatccgctaacactgagcacaacttcatacttaacgactggatcaaccccatcatattctacatggc

SEQ ID NO: 44627 - DNA, 875 bp, Zea mays
  Clone ID: MRT4577_140705C.1
attgggaccctcgaggccggccgggctggttgctgcaccgccttcttttttgcgaggtggagaggtgtttggggaggagaacacgaacgcatccaaagaccggagcggagcagggtaagggctctctcctgcaggctgcagccgtggaccgtggagggagaagatgcgcaaggggcagctcttgttgctgctgcttttgtgcgctgccggatcaacaaccgcctccgccaagaccgacccgcaagatgcggctgctctcagatccttgatgaagagatggaaaaatgtgcctgctagctggcgaaagtccaaaagtccttgcgactcgtgggatggtattttgtgtgatgaaaatggaagggtcacatcactgaatctgtttggtatgggcatgggaggcactctgagtgatgatatagggagtctgactgagctaacggtcttagatctgtcctcaaacagagatcttggcgggccactgccagctgccattgggaagttgattaagcttgaatctttagcattgattggttgcagtttcagtggtcctgttccgagcgaactaggaaacttgtcacaactcacattctttgctctgaactcaaacaaactaacgggtagcatcccgccctcattaggcaagctcttcaatgtcacctggttggaccttgccaataaccagttgaccggacctctcccaacctccagagataatggaactggattggaccagcttcttaacgcagaacacttccattttaatcaaaacatgctggaaggttcaatcccagactctctcttcagctccagcatgcacctcaagcatatcctttttgacataaacagatttactggacaaattccagcttctattg

SEQ ID NO: 44628 - DNA, 307 bp, Zea mays
  Clone ID: MRT4577_140706C.1
gagtacaaaggaacatatggcttattaaaaaacgaatctcattattctagtggaactaatcaaagctgctcataaagcttttcaggtatcacaaaaatgggattttcgcaacgagtatgcctcacgatcatgcacgacaaacatccatccgaagaaccaccagacaaccaatggactcattctgcatacattcatcatattggcttattattatggtaagcttcatacctcccagagggataaggcagcttacaaaagatacttcacgcctaaatagcaccatgaacattcggaacgcaaaaaggta

SEQ ID NO: 44629 - DNA, 442 bp, Zea mays
  unsure (1)..(442): unsure at all n locations
  Clone ID: MRT4577_140707C.1
aggatgaactacacaaaccttattagtaccagtaagttccggtccggcacatattagtaattgagattccttggtaattatatactacgtacggtgcttaataaggcttaatcaggcacaccacattggcnttttaatttgcacgtcacgacatataaactatacagtagcgcattacgtggccgtgaggccgtgacctgttaataatttcttcatattattcaggcaatcactgtggtctccacggcggccggccgggggacggcctggacgtggtcaccgggggactgccaaagctgcggggggggctgcttggtggtgccagtgctgtgcagggggcgcgagagaacgtggaagccggggggcggctgcgggcggttggcggggggggggcgggggggggttggtgggggggggtggtgggggggggctgggggggggg

SEQ ID NO: 44630 - DNA, 241 bp, Zea mays
  Clone ID: MRT4577_140708C.1
aataaaaggaaagaaaaggcctccaaaaatgggacggctggttcacccaccgccgggtgtccacactttggaagggccgcgcgaacccgaacaaaagggtctcaaatcctaaaattggggagcataagagggttacagggggtgggggcaactctggcaacggaacccgggggggcctaaagggccataaccccgggcacccgatgaaacgaagggaattaaaagtctgggcccaaggggc

SEQ ID NO: 44631 - DNA, 277 bp, Zea mays
  Clone ID: MRT4577_140709C.1
gaaaaaaaccccccatccagataaaaacaaaagccaatcccttagcacaacaaaacgcaagattaaacgggtggcaagcaacaaatttaaaggattccccccaaccaaaaggggcaaccggtatcgaatagcccctgggggggggggcgaatgcttgacccatttttcacgcccaaaaggggggcccctttttcaaatttaaacagaggtcagttcagccccaaaaacccggactttgaccaccaccaaaaccgcccccggtggtgccacccccgcc

SEQ ID NO: 44632 - DNA, 423 bp, Zea mays
  Clone ID: MRT4577_14070C.1
ggatggatccacccatccgaagaccccagctaccatgtcagattatttgcaattcttcaatttctggtgccaaattcccttgctataaatgcggcgagactttctatagcgagatggctctcgcaggctcactccacggcgagacacggtgccaaaatgagtttcaagttcaaactgggttccatgaggaaaagccatggcggccacgtgagtttgcagtcctattccaattcctggaaggggacgcagggaaaaaccaggctagtctgggaagaattgttcgggcttgtacggctcttccttatttcgtttaggcgactcgcggcctttcggatttggtacaaaacaaggctgtcaggggacaacattgccttaaaaaatttcggaaaaaggtctaaaaaagaaaaaaaggggggccctttt

SEQ ID NO: 44633 - DNA, 552 bp, Zea mays
  unsure (1)..(552): unsure at all n locations
  Clone ID: MRT4577_140710C.1
gtttttagttgggccagctttgcttcgtatatatttttttctatctaattatacatccgcttatattattctgtgtttcgttgcagaaacgaagggacaggatcaaccagaagatgaaaacgctgcagaagctcgtcccgaactcgaacaagacagacaaggcgtcgatgctggacgaggtgatcgactacctgaagcagctgcaggcgcaggtgcagctgatgagccggatgggaagcatgatgatgcccatggcgatgccgcagctccagatgtcgatgatggcccagatggcacagatggcgcagatggcgcagatggcccagatgaacatgggctccctcggccagccgggctacgcaggcctcacgccgcccatgatgcacccgccccccttcgtccccgtgtcctgggacaccaccgncaccgtcaccaccttcctcgccccgcaggccggcagcggcacggtgccagcggacgccttctacgccttcctagcttgccaagcgcagcagaacgggcagcagcaaccgggtagcatggaggcgtaca

SEQ ID NO: 44634 - DNA, 429 bp, Zea mays
  Clone ID: MRT4577_140711C.1
aaaaagctaaggtaaaaaacccacaggtttaatttttgttcaaaaatttttttccaggcaaaaaaaggttttaaaaaaaaaaaaaacctttttaaaataattttggggggcaaaacttaaagagatggggaaaggggggtcccacaccctttaaatgaccggaaaaagcttattctttttcttgaaaaaaggccccggggggggcccccccaggggggggggaaggaactttttgggaaaaaaatttgcctttacctttgtggggggggcggccccggcctttgggataaaaaaaccctttggggtctttgtgaacttttattttagggacaatcactttggggggggggatgcccactttaaggggggagccgttccctttttcgggggtaatccgttcaacggggataacccaggggggggggtaaa

SEQ ID NO: 44635 - DNA, 1495 bp, Zea mays
  Clone ID: MRT4577_140712C.1
cgttgcagaaacgaagggacaggatcaaccagaagatgaaaacgctgcagaagctcgtcccgaactcgaacaaggtgagacgatcgaacgcgactcatctgacaacggaaccgatatatatatatgtatgatctgtgagcgggaagatccgacaccgttgctgctcttgttgccgtgcccctgaacctgaagcagacagacaaggcgtcgatgctggacgaggtgatcgactacctgaagcagctgcaggcgcaggtgcagctgatgagccggatgggaagcatgatgatgcccatggcgatgccgcagctccagatgtcgatgatggcccagatggcacagatggcgcagatggcgcagatggcccagatgaacatgggctccctcggccagccgggctacgcaggcctcacgccgcccatgatgcacccgccccccttcgtccccgtgtcctgggacaccaccgcaccgcaccacctcctcgccccgcaggccggcagcggcacggtgccagcggacgccttctccgccttcctagcttgccaagcgcagcagaacgggcagcaaccgggtagcatggaggcgtacaatagaatggtggcgctgtaccagaagatgaaccaaacgcagcagagcgcgcccagcaacccgtccaagcagtgagcatgacgtacgtacagctgctttcttgtacattgtttgttcagttttgtttagatttttttggctcattttatcgcatttgttcagattctttcctctcaattgatgaggcctggaactgtgtaacagaggtgtgaaacccgtcgacgcggtacctgtagcatcatgtatttgttttggttcttgaccactctatccttgtatataaggagaccagacgttgcgcaaccgttgagcggagaccaactccagcagactctctctccgtatccgtatttagcacggccaacagtttctctctcctctccgtatccgtctccgtttctagcagactccgtatttacactccgcatgcagtctatgacagctggggcccgcgagcaggaggtggcgcatgcagtcttctgcagagaggagagagaaatcgtggaaaaagggagtgcaggtacacggtgtctgttttgcggagacagatgtggaggctgctggagagcgaaatagtgactcagagcgtgtataatgcggatgcggagtgggatggggagtgtagctggagttggtcccagaagcaccggaagtcgaacaggtgatgaaggcgatgtcacgcaagtagtagtagtgtgtacggtactaaagactttatttatttctgctggcaaatgagtgcagattagataaatcaacccaagcacgattgaagaccattatctgattgcttaacttgtcaatcattaatcctacatctcaatttttagggaaccgtttgtctgcctagaatattgtcacacccggcttttagaagaaacacaatacatatgtatgtgttcccagt

SEQ ID NO: 44636 - DNA, 331 bp, Zea mays
  Clone ID: MRT4577_140713C.1
ggcgacctcacgcgtccgcctccctttacagaatataaagatcactaacactgcagaacggcatgaagaaagtaaggaactgttttttatcacgcctcactctacatgctcatgctcaagcggaggatgccaaaaatccgcaactacgacgccctgtatccgaaattctccaaaatagagcatgtatacattttcaatgataaaatacctagccaaacatttatctttctctgtataagacctgccaaaggtcgaacaataaaaagttcaaccaaacttgttcactgtaaaagcatcgaacccagaaaactttcaaaatattcactacaat

SEQ ID NO: 44637 - DNA, 289 bp, Zea mays
  unsure (1)..(289): unsure at all n locations
  Clone ID: MRT4577_140715C.1
agccacccttctggtccctggccttctccgtcgtctccagcgtcgtggggcctgggcatgcgcgtcggcttcgccggccgngcgccgtcctgtgcggngggcctnttgctttntctgttcttgctgttgcggtgcatggttcttccccgtctttgtgtggtncnggtggggggggtggtgtgtttncctgtgtcggctgcgntncgggtgtgtncggggggctgggggtgagacgcttgtntgttggnggtgccttgtgtgtgctgggtgtgttntttgcttgtgggtg

SEQ ID NO: 44638 - DNA, 484 bp, Zea mays
  unsure (1)..(484): unsure at all n locations
  Clone ID: MRT4577_140716C.1
gagcaagacgaagaagcacgcggacgaagcaaggagccgccagagcggccgcccncccnctccccccccaaaaaaaancccccaaaaggaaagggggagggaaccgcccgnaccacccnnacaccgggggcacacccccggggccaagacccaccaaggaaaaaaannaaacccaccgagcccaggagcacccaaccaaacngaacccacaacccgccaacccaaacccaaaaaaaaacccccgcgaaacaccgccaaaaccaacaaggcgggaaggggcaccccccnccagccacaaagggggccaanaacacaggggaacaagaacaaaccagacaagggcaaagaggnccaaccccccaagaaaagcacaaaaaacaggcccggaaccgcagaaggggagcgcacccaacccgcccgggacggaccagcacgggaagaaaggaaaaccccaacaangagaccgcacagagcaagcgccccc

SEQ ID NO: 44639 - DNA, 281 bp, Zea mays
  Clone ID: MRT4577_140717C.1
acgcgttcgtggtgactttcgaaagcttttagtgcctcttgttagtgcgtaccgctttgatggcccagaagtgcccttattttaaacccccttttaaagcaagctacttgttgcaaagtttttttttttggaaaccccggccctggggatacgggggggtttcacctttttgggcccatctaaaaaagttgggacatttaaatcctgctgggggacgctttcttatttcgtccaaaggggggcgagcgctaaacccccagaaaagctagttggaaaattgg

SEQ ID NO: 44640 - DNA, 329 bp, Zea mays
  Clone ID: MRT4577_140718C.1
cccacgcgtccgagctacaacgcgctgctggacagcccgctcctggcgcgcgcgggcggtacgacgcctccgccgagacgttccggtcctcgcacgacctgttccgcgccgcgttcccgcgcggcttcgcgtgggaggtgctcaaggtctactccggcccgccgctgctcatccttcaagttccggcactggggccacaaggaggggccctacaagggccacgccgccaccggcgacaaggtcgagttcttcggcgtcgccgtgcttaaggtggacgatgagctgcgagcggaagacgtggaggtgtactacgacccgggcgagatttt

SEQ ID NO: 44641 - DNA, 224 bp, Zea mays
  unsure (1)..(224): unsure at all n locations
  Clone ID: MRT4577_140719C.1
tcgcgatgctagaactagtggccgcccttttttttttggatcaatgcatgacatcaggcagacatgctaaatatttacagtaagttatgtttcgcttgcacaaacatattaaaaatgtgagtgtcacatgaacagaatggtataccaaatcacgatgggttagttgggggcttatnatnnaaaanttnncatntnctaattcattgtgctccttnaaaaccttt

SEQ ID NO: 44642 - DNA, 250 bp, Zea mays
  unsure (1)..(250): unsure at all n locations
  Clone ID: MRT4577_14071C.1
ccgggccgaccgaggcgtgcgaatcagncagtaacagctcactttttacacttttaagccccccccgctcccagagcccaacggagcaaaacgcaaagcccaccaaccacacatcaaaccacaccatcgatggcgcccaaggcggagaaaaagcacccagtaaagaaacccccggaggaggagcccgcgacctataaagctcataaggctccggcagggaataaacctaaggcggagaaacgcctcccct

SEQ ID NO: 44643 - DNA, 563 bp, Zea mays
  unsure (1)..(563): unsure at all n locations
  Clone ID: MRT4577_140720C.1
gggggggggtgggggggttttttttttttgagcaccaaacaagaaaatctgaattaggggcttgggaatggggtgattcctttgaactatgcctctttatgtgtctggggggtggccacaggggttcaacatgagcaagctatacaacatgggggagcgggggganctaacaatatttctctactctagtggtggcaagtgggggcgcggggctcnggctcctttccagtggcgaaagagttgccgcacccacagggttttgtggcgtttgggttctggaacaagaagccgccaccaatgagggggtgnctgtantccaggtccattccaaacatgaaaagaggggttttggggggacagactattgcaaaaccatcatactctacaacagaatcatgaggggtgggattctctcgattttcaaattccatggggtaagacatgcctgagcatccacccctgttcactccaatgttcaagcacaaaacttgattcccggtcagctctcatttgggttcagatggttcaagggcttttgagtcaatgaaattggtgggacaatg

SEQ ID NO: 44644 - DNA, 948 bp, Zea mays
  Clone ID: MRT4577_140721C.1
ccagcagcctcggcgccgccacctccgtgccagcctcggcgccgccgccgccgcaggcgtcgccttcgacctcaacctgcccgcgctgccggagcggtgcgcgggcgtggacgacgacgaggtgctcagcccgctcgcgttcaagaagccccgcttcatgatcccggcttagttagtgcagtgttaagctcgtgtggatcagcagctcatttgttcgtcacttgtgctccgtgtcttggattgttcatctagatcgtagtggtgattagttcggatcgtgtgtatatacggtcatacataggtgtattcttcattgtttattagctacatacatgtgatataggagtaggtagaagcaaggatcaattctttcattggtgtgtaaataatacatgtaaataaacacaataagaatttattcattttgctcttaaaaaaaaaaaaaaaaaaaaaccggtgcgcgggcgtggacgaagacgaggtgctcagcccgctcgcgttcaagaagccccgcttcatgatcccggcctagttagtgttaagctcgtgtggatcagcagctcatttgttcgtcacttgtgctccgtgtcttggattgttcatctagatcgtagtggtgattagttcggatcgtgtgtatatacagtcatacataggtatagatggccaaaaagcacgaggcccgtgagcccggcacgaagcccgctttttgggcccggtccgagcccggcacggtagaataagcgggcgggcttggacaggaaactaggcacggcgggctagcccggcacggcccgtttacctctaagcccgttaagcccgtttttttttacactaaaacgtgcttaccggcccgtttagcccgttttttggcccgtttggccatctctatacataggggtattcttaattgtttattagctacatacatgtgatataggagtaggt

SEQ ID NO: 44645 - DNA, 334 bp, Zea mays
  Clone ID: MRT4577_140722C.1
aaataaaaaaaaacaaaaaataacaaaatataaaaaaaaaaaaaaaaaaaaaaggggacggggaactacaaaaggcaggcggaaataacagctactcctccaaacagcggcgccgcctcttttagggtgcccaaatttatacccccacccgtctgaccacttaaccaccatataccagcccctaattttaatccacctgaccatccatttacacacgcctagcccggtaaaaaccgtggcctaacccagactaaccaatcttacaaacactttcattttacataattgcttttatatcgagaagcctcaatccaatgcaccttcccaccattta

SEQ ID NO: 44646 - DNA, 221 bp, Zea mays
  Clone ID: MRT4577_140723C.1
accgcggtgaacactttccgatgactgcattatatcatgtgcttactataagggatcgatttacagctctaccgcacaggtacacataatatcaggatgcgggcgatggttgacacccggtgccgctgaccggatatacagataatcactcgtagtcaatagactccacgtaataaatcaagacactttgttataaccaatagcgcgtgccgactatactg

SEQ ID NO: 44647 - DNA, 924 bp, Zea mays
  Clone ID: MRT4577_140724C.1
gccttgaaacaactctgcgtcgacgcgcccggctggagtcgttcgccctgcactgcaacgtcttcgtcaccaaccgcgacgcttcctgtgaatgggattgggatactcctgttgaagtcgacttactcggcccgccggccctccgggacgcgtatctgtcacacatcggctgcgacacccgcctcgacaccgagcataacatgctctacccttccttgtgcctcgacgtcgtgctagcccggatcctgactatttgctccgtcgtcttgctgcatgttgattcactcagctggctcgacccattcaaagacatgccgaacctagaagagttgcagctgctgatggactacgaaggttactgccttgaggccgtgtccggtttcttcaagctcatcccacttccagtccttcaacggctctttgtgcgtctccatattgatcacgagccggagggagaaggcagctcatcggcagcagtgtggagcgtcgagaacgatgacagcgaagacatggcacccagggaggagatcgtccttgaccagctgacattcgttaagtttgtgaattttagtgggacatggtgccagctgcagttgctcagcttcttcctggataagtcccctgtcctccagcagctggtgctggtcacgccggaaggggaggaagctctgggagacgaccgactaaaggtcatctatgagcgggtggccgcattggagaaggcgtcgagcgaggcaagcattaccatgtgccggcccaaggaagacgataccccgaaccatccacacacgaggtacttccacgaggagtatgaaactatgtaactatgctatataagcatgcatcgatcaggcatatgcatgattcaaactctttatcaattaggggtgaaaacgggtcagaaaaaaaaaaaaaaaagcggcc

SEQ ID NO: 44648 - DNA, 430 bp, Zea mays
  Clone ID: MRT4577_140725C.1
cgctcggaattcggctcgagctctgacacaacatcttcctcaatcggctgacgcgactgtcacgcggctgcagctggacaaccttctggactgcggacgcgatgcggaacgccgtcctgggcgtcaacggtaaggatctggtcggccgcaacatcgccgataactgggccctaacccagggcagtcggacgggccgcatgcgctggtacggctggggcctaccatggcaggagatacccactaaccaatcgcacgtgactggcacttgaccgcttactgttaacggcgagacatgcttctgtggctacaatagctacggatatgggggtgacgaatcaagagggtggaacagccgctattgatacataaactcctacgtgtactggaggaactgagcgggggggcccgcgcggccaagtaatcctgttcg

SEQ ID NO: 44649 - DNA, 1793 bp, Zea mays
  Clone ID: MRT4577_140726C.1
cggacgcgtgggcggtcccgtgggtagcaacggcctcgaccacacgggagccgccgcggaggggaaccatggaccagaaggaccggctgagctgcctccccgacgacgtcctccaatccatcctccgcaaactctcgctcaagcaggccgtccgcaccggcgcgctctcccggtggtgggagtcccagtggattcgcgctctcgccggctcccctgttgtcaacctcaccgacgacccggactttgcccgcggccagccgccggcgctgtctgcggccacggtggatcgctgcctccggctccacgccgagctcggtacgcccctcgaggtgttccgcgtggcgctggtttgcccatcagatctggacgggcaagacgtcatcgggtggatcgcggctggcctgcggaggggcgccaaggcggtcgaagtggatttggcgccgccgctgccggaggaggaggaggaggaggaggaggaggaggaggtggaggtgggcgaggaggaggaggaggacccgcacgccggtcacgaggcgccgctcttggagctccccgccgatctgttccaggccaggaactcactggagcggctggcgcacggtcggttcagcctccgcgccgttccgctccccgcggtgggtctcgccggcctccgctcgctctccctcagccacgtcgacgtcaccgacgaggcgctccggggccttgtcgccaactgcccggcgctcgagcgcctcagcctgaggcgctgctcccgcctcgccatggtgagcgtggccagcgagacgctgcgggtgctggagctcgtgggctgccaggccttgaaacaactctgcgtcgacgcgcccgcgctggagtcgttcgccctgcactgcaacgtcttcgtcaccaaccgcgacgcttcctgtgaatgggattgggatactcctgttgaagtcgacttactcggcccgccggccctccgggacgcgtatctgtcacacatcggctgcgacacccgcctcgacaccgagcataacatgctctacccttccttgtgcctcgacgtcgtgctagcccggatcctgactatttgctccgtcgtcttgctgcatgttgattcactcagctggctcgacccattcaaagacatgccgaacctagaagagttgcagctgctgatggactacgaaggttactgccttgaggccgtgtccggtttcttcaagctcatcccacttccagtccttcaacggctctttgtgcgtctgctgcttaccggagctgaactccatccgcagctccatattgatcacgagccggagggagaaggcagctcatcggcagcagtgtggagcgtcgagaacgatgacagcgaagacatggcacccagggaggagatcgtccttgaccagctgacattcgttaagtttgtgaattttagtgggacatggtgccagctgcagttgctcagcttcttcctggataagtcccctgtcctccagcagctggtgctggtcacgccggaaggggaggaagctctgggagacgaccgactaaaggtcatctatgagcgggtggccgcattggagaaggcgtcgagcgaggcaagcattaccatgtgccggcccaaggaagacgataccccgaaccatccacacacgaggtacttccacgaggagtatgaaactatgtaactatgctatataagcatgcatcgatcaggcatatgcatgattcaaactctttatcaattaggggtgaaaacgggtcaggtatactcgccgggtacaggatacagatagtgcaaatac

SEQ ID NO: 44650 - DNA, 292 bp, Zea mays
  unsure (1)..(292): unsure at all n locations
  Clone ID: MRT4577_140727C.1
tcgtcgggctacttttcgcggtgttcatttggtgaagggcgaagctgacccgtacggtggtgatccccgggtgatacgggggagcggcgacgaccctcgggtgggcaccgtgtaaccaacccggtggttcaagcccggtacggcaaggagcattctgtcgtgaccgtccgaccttcgccgcttgtgtcgtgccgactcccattctcgcttgccgcttcttcattccacttccgtgcggccctactggcgaacatcttcgtnggtggacaatcgtacccggaaggattgcgag

SEQ ID NO: 44651 - DNA, 2676 bp, Zea mays
  Clone ID: MRT4577_140728C.1
atgcatcgtaaggccctgaaagaatacctcaagacctgctctgctgccgtgaagttggagacaaaaaagcaccgcctcctgtccaggatgatgttccccatcccgctgccgacccttcgcaagcttgttagggctgcggggctaggctgcaacgccgcaaactccattggagtggcgatccggataaatgcacaatcgttcgtgatgctatctcccttgcctccccctctgttgcttgcctacaagagtccaaactttgcgagctcaactgtttcaaagcacgctcatttctgcctaaaaaccttcccagcttcctctgcctcaacgccacttgttccagggggcgttgtgaccgcctgggatagcgatgtgttcgacctcatgtccagcatctctcgatctttctccctcaccaccaccttcagctcgcacctaacagacacgcccctcaccatcaccaacgtctatgtcccatccaaccaccaagactctccaaccttccttgctgaacttgcagacctcctccccagtatctcaggtccttggatgttggtcggtgacttcaacatgttgagaggcaccgctgacaaaaaccggggccacctggacaaccacctttgctccctgttcaatagcacaattgactaccttggcgttgccgaactccagttacaggactgccttttcacctggtctaacatgtgctcggttcccacattagctcgcctggatcgagcttttgtgaacaactcccacacctcttccttcccctccacctcccacaccactctacccaggaaaacatccgaccataaaccactgctggtttccatgtctacctccatccccaaatcccaaattttcaagtttgaaaatgcctggctatatcaccccctcttcctccctgaggtcctccctgcatggcacctggagctcccctgtcccgacgcggctgcccggctcgcagagcacatgtgcatgcctcccgctgaacagcaagtcaaagcagtttgccacgagcgtctggctttggccctcaaggcaaaagccgctttctggaagcaaagaagtaaacaccgtgcaattgtcgaaggggacacgcacacagccttccaccatgcgaatgcgacgcatcagatgcgccgaaaccagattcaagccatcactgtcggaggccgtgaactatccagccatgctagcaaaagtgttgctgtcatggatttcttcagggagctcaggagttgcaaaaaccccgcgagcgtgaagatcgtctccaaaatccttaccacccggctgcaacatgaaattcacagcctcatctctttggatcaaactggtttcctcaagggcaggtcaatctctgaaaatttcgtgtacgccctagaactcatccaatgctgtcacaagaggaggtctcctaccatcgcgctgaagctggattttgcgaaagctttcgactccgtccactgggatgcactgcaatgtgtcctgcgcgctcgagggttcagtgaacgatggcagagttggattgatcaacttctcaatacatcaatgacttcggtgctgatgaatggttgtctcgggccttggtggagctgtagtaggggcctccgtcagggcgatccactgtccccgtacctattcttactggccgctaacgtcctgcaaaccctcataaagcatgatggccgtgtcaaacacccccttacgcctgcagaaccctgtgttgtgctacaatatgcggatgatactatgattgtgatggaaggggacccaaccaatgtgtgtgtcttgaagaagctcctggctatcttcagctcgacaatcggtctatgcataaatttccagaaaagcgtgctggttccaatttacatggatgagccaactgttcaacaatgtgtgtctttgctcggctgtaggtgtgaaggttttccacagacatacctagggctcactctctccctaacaaagactagactttcaaccttcgttccttacacggcaaaaacagacaaatacttagcgggttggcaagccgctctcctcaacccaatgggccgcctagtgctgatcaactcggtactggatagtcagctcgtatacatcatgagctccctacagttactaccaggtttcgtgaagaaagttgacagcaaacgccgctccttcttgtggtctgggaaggacagttgctcaggtgcaaaatgtctggtcggctgggtcagggggcgcgtctgcttagctacgctgaccggtgacctgtctggtgatcactggatgaccttgcatgccctgctccccctctacagatcgattactacgtgcttgatcaaggatggccggtcgacaacgttctggtttgatgcttggcatggggaagatgacctgtctaccaagttcccatccctcttcagtcatgccaagaaaactgaggtcagtgtgcgtgaagtcctggaaactggtcttgcagcacacctcgtgccacgcctgacccctcaagctgtagaagagcgagatgcacttcagttggttctcgacgacgtgatgctgtccgaggcgccggacatgcgctactgtcccattgttggcgttggaggcaatctacatattgggagcctttatcgtgtcatgcgcaatggcgagggggtgctcagtgtcgaggctgtctttgtttag

SEQ ID NO: 44652 - DNA, 334 bp, Zea mays
  Clone ID: MRT4577_140729C.1
cagaagcagaagccaccgatcggcttgccgcttgcgtgaggcgatcggagcattccatccggaggaggaagacaaccgtctacgcagcaagaacatggcgatgactcccaattgacataataatgtagcatatgaacattcttacttccataaaaattctctatcaaatcactgctaatagctttaaacttattattacatattgccatgattgaagatttattaactatgattgttcaaccatattcttcactgatacttcctcttaaaatttagaaaattattttgcaaacaacaatgatttaaggtaactactttttaaatatttgagaat

SEQ ID NO: 44653 - DNA, 430 bp, Zea mays
  unsure (1)..(430): unsure at all n locations
  Clone ID: MRT4577_14072C.1
ctggccgccgccancgccgccgccccagccgcgcgagcggacggcgacgacgaggaggccccgaccgaaccacggncgagaaggaggncgagaaaggaccgcggcgcccccgacgagnacgacgcccccgggagaggccacagcaagaagcnngcncccgagaacgaaagacgcggcgcaaggnngaagaaagcgaaagcgggcccgaacgcnaaggaagaccgggacgagcacaagagngagggcagcaagnaaggagaacccggggaaccaacaagccaanggcgcccgaaaggacccggggagcccaaaaaggaggaaggacaacgcacggccagaagccccaggggaaaagcacaagaccgaaggaggcacaaaggaaaagccggcaacccaaaccaacaaggggaggcgggcacccaccccagag

SEQ ID NO: 44654 - DNA, 768 bp, Zea mays
  Clone ID: MRT4577_140730C.1
aatgcaggaagagagagaaggtgcagtcagttagtcaggcagagaaacgtgcggaggtggaagccacaacgggagcgcctaccctcgcagtccgcccctcgacctcggagccgcagcccgcgaggagcgttcacaatcacaccggccaccgcggaccctagcgctttagccttatccgtccgagcgcgcgcccgatgcagacggaggcgcgcgtgggcgtcgtcgtcgacggcggcgccgccgtgggccggtgccaggagcagcgccacatcggcacggcggcgcacctcgccgccggaggcttcgcgggcgccgtcagcaagacgtgcaccgcccccctcgcgcggctcaccatcctcttccaggtagctggtatgcattcagatgttgcgactctaaggaagtgtagcatatggcatgaggcttcacgaatttttcgagaagaagggattggagccttttggaaaggaaatctagtgacaattgtacatcgcttgccttattctgccatcagcttctattcgtatgagcgctacaaaaatcttctccaaacggttcctggcctggatagagactcaaataatgttggtgttgtacgtttgcttggtggtggtttggcgggaataactgctgcatctttaacttacccgttggatggtgttcgtactcgcttggcgacgcagaaaaccactaggtattacaagggcatcttccatgcggtgtctaccatttgtagagatgaggttgtcaaaggattgtataaagggc

SEQ ID NO: 44655 - DNA, 268 bp, Zea mays
  Clone ID: MRT4577_140731C.1
aacccaaaacttttcaaaataataataataataatcccagaacggtaatcggtttcaaattaccatagatctcaccaggggattgggaatttacacattttccacactaaacgtagcaaaaagggggggagccccctcatgcgtttaactcaaccagatcggtctcggacgttttcctgatcacctcccttttgagcttgggggggggagggacaagcccccacttggggggccatgggtttgggttcagcttgattttgactgggat

SEQ ID NO: 44656 - DNA, 477 bp, Zea mays
  Clone ID: MRT4577_140732C.1
ttcggccacgagttgctgcatctttaacttacccgttggatgttgttcgtactcgcttggcgacgcagcaaaaccactaggcattacaagggcatcttccatgcggtgtctaccatttgtagagatgagggtgtctttggtttgtataatggccttggggccacgttattgggagttggccctagtatagcaatcagcttttctgtctatgaatcactaaggtcttattggcaaacggaaaggccccatgattcaactgcagttgttagcttgttttctgggagtctatctggtattgcatcatctacagccacatttccccttgatcttgtaaagcgacggatgcaacttcaaggagcagctgggacagcgtccgtccagaaatcaaccatatctggaactgtccgtgatatcttgcagagagaaggtctccgtggcttctacagaggtatcgcccctgagtacctcaaggtcgtt

SEQ ID NO: 44657 - DNA, 185 bp, Zea mays
  Clone ID: MRT4577_140733C.1
cggacgcgtgggcgaaccccgccaagaaccctagcacgggcaagccaaaacgaccgtggtggccttgcttcttatggctcgattgacttcttgcgcccatttctggaaacaagccattcccggagaacagggaaccacttgaaccccaagtggggtttccccggcccttttcggggttcccgctt

SEQ ID NO: 44658 - DNA, 284 bp, Zea mays
  Clone ID: MRT4577_140734C.1
cgcgcaagtcgcgccccacgggacatggctctggcgctggcccccatctcctccacgccggcgggggggccgcaccccccggacagcagcagcactgcggcggcttctccatcagcagtcccccgttcgaccccaacgccaagcgccgcggcacgaccaccccaatctgacaagaagaagccgaagcaagaccctaggctcccgagtcctcggggggggcggcacataatcacaggcaaggcaagtgagaccacccggtgccaccgcctccgacagcctcaaag

SEQ ID NO: 44659 - DNA, 403 bp, Zea mays
  Clone ID: MRT4577_140735C.1
ggaggtggactaggcggtggtgccggtggcgggtttggtggtggcgcaggaggaggtgttggtggaggtggtggccttggtggcggtgctggcggtggtgctggagctggcagtggtcttggaggaggtgctggtggaggaggtggactaggcggtggtgccggtggcgggtttggcggtggcgcaggaggaggtgttggtggaggtggtggccttggtggcggtgcgggaggcggtgctggcggtggtgcgggagctggcggtggtctcggaggtgcaggtggtggctttggaggaggcaagggtggtggttttggcggaggttcaggtggtggcttcggaggtggtggaggttcgggtggtggcatcggtggtggactgtagaagtggcgggagcttggtg

SEQ ID NO: 44660 - DNA, 463 bp, Zea mays
  unsure (1)..(463): unsure at all n locations
  Clone ID: MRT4577_140736C.1
ccgggctgaagaggacccaatctaacnttctcttgcattctactacatatttcttctatattttcacctatattcaattcgggggtcctacaaataacaatcggggggacataaaaaaccctttcataacccatcttaatctaattacattacatccacctttcactattttatcttaatatcaaatttttctttaccattcttcttttccaacaatatctcattctatatatctaatattaccctcccttttattatccattatatctctctcttatttttatttactactcatatttaccatttctactttctaatcttcctattaatttatttttttattattatctttttcatattttaatacttattacttttttaatcttaaaatatcttataatatatatattactttattttatatattaatatttttaatttttctttaacatttatatatttt

SEQ ID NO: 44661 - DNA, 335 bp, Zea mays
  Clone ID: MRT4577_140737C.1
agagctatgacgtcgcatgcacgcgtacgtaagctcggaattcggctcgagcatggttgagcaggagcccgaggcgccgctagctgcagttcctcggatgccagtggcctctgaggactactgatgtaggtgtacatgtattgtatccctaccgtttgtattttcactgtgtctctaaaagacgcaaaaaagaaacatgaaagagtcaacacttgcattactggcaaaaaaagaataaagggccggcctccgcctaatgagcttgtcgacccgggaattaattccttaccgttaccttcaggcataaaagatttacctatagtcagtgatattaa

SEQ ID NO: 44662 - DNA, 468 bp, Zea mays
  Clone ID: MRT4577_140738C.1
atatctcttccacaccatgtcgatctagggacgctatgcgtaatcccatgacgaagacgtctctctcctctcgtcgtccccgttccccaacctctcgtctgctgccagcctgcctgcagaaaggagtgggacatggcgcctaagcgcatcctcaaggagctgaaggacctgcagaaacacccccccacatcatgcaccgcaggtactgcctggagaggacatgtttaattggcaaggaacaattatgctaccgcactgaagtccctacgctcgcggcgttttcttagggaacattcttttcccgccagattaccccttcaaacctccaaaggtctctttcaagataaaggtcttccatcctaatatcaactgcaatggaagtatatgccttgacattctcaacaaacaatgtaaccctgcttttgacaatttctaacgtcctgtctcttatctgctccctgctgatcg

SEQ ID NO: 44663 - DNA, 547 bp, Zea mays
  Clone ID: MRT4577_140739C.1
aactccatggaaaaggtaccttaaaacatgcagcttcagacatgagagctccccccactacaacgcttaaaaatcagcttattatgaatgtttacatacatcgaatcaaatttatcatgtatgcggaaaactgtgccgtcgatgaagcaagtaaaagcggtttcgatcgcttgaccggcgattagtggtgaatcgtcagtagtagcggaatctgcgccgcttcagctcagcagtccagactccagagcgcaatgccgccgtcgtcctcccagcatccggcggcggcggcgtcgtccgccgccaccgacggcgcgaagaaggcggcgaaggggtccatgagcgccgcgtagtagtagtggtcgtcgtccatgcacttgggcgactggaagaaggcgtcgatgtcggcgagcgagccgtagtccacgccgcggtcgccgtcgccttcgacgtcgacgtcgccgtagcgggctagctcgccctcgctgctggcggtcgaccccgcctccgtggaggagacgtcgctgtcgctggagggcgggctgccgct

SEQ ID NO: 44664 - DNA, 565 bp, Zea mays
  Clone ID: MRT4577_14073C.1
ggggtgttgtgtgttttttttttttttttttttttttttttttttttttttttttttttttttttttttttttttttttttttttttttttttttttttttttttttttcaccagggcaagggtttatttaaaacgccaaaaactaaaaatggggggggggcagggccctttccccgggccaaattcctggggaactttaaaaaaaaaacttttttttttgagggtcatggggggccccaccttacccttcaaaatcaacgaaaaaggggggggatttccaaggggggtaatttttttgctttttggggcaagggggccaaaaaaaccaaatttttcccaaacaacctgggggaaacccaaaaccaggtccccaatttgaattaagggggggccctccccttgggggccaaaaaaaacttgataatttgggaaccctccaaagggtttttacaccccttccccaaaatttaagggggggaaacaacatcctcaaaaaaactatctgaaacaaaccttaaaatcctttggccagggcccaaaaaaatttaaccttttttggggggc

SEQ ID NO: 44665 - DNA, 219 bp, Zea mays
  Clone ID: MRT4577_140740C.1
gggatctacaagatggcaattgaaaaaaaactggtttaggtgccctaggccccctaaaaaatgtccaatgccaacttcccaattgaaatggttctagtttacaggtcaccccccctaggagttggcacctttgcagttacttgggggggggaacaattaggggttaaattatcaatgtgaaaaccattataattccccccaccaaggggaactgggggc

SEQ ID NO: 44666 - DNA, 228 bp, Zea mays
  Clone ID: MRT4577_140741C.1
tccgcatccgctgcctccgccgctcgagtctcgtccacccgtcgtcctcctaggtgctctactcgccagtcgccatgggcaagattaagatcggaataacggcttctgaaggatcggcaggctcgtggacagcgtcggcctccacagcgaggatgatgagctggttgtcgtgaacaaccccttcatgaccacgagactacgtgacctgcgtgtggaagaacgacgccg

SEQ ID NO: 44667 - DNA, 391 bp, Zea mays
  Clone ID: MRT4577_140742C.1
aaaacggaaatggcccccagacccgggaaaaaatatctaaaatgggaacagggccggggggaaaatcaacggcaattctttaacaaggcaggaccgggacccacattaggggcaatcaaaccgacccccattcatctaccggtcccaaaataaacgggggggggaaaaaaaacattggcccccaggtcccactttaatgggggctttaaatctacctaccgggggggggggggtggcccccctttttcccacggggaacgagacccccgggggcccccgccccttccttggggtgggaaaccctgggcctaaaaaaatcgggggggcccgaaacaatagggaaggcccccagcgcggggggcaaaaaggagccccccccttgccgccggcc

SEQ ID NO: 44668 - DNA, 435 bp, Zea mays
  Clone ID: MRT4577_140743C.1
gccgcagactaaccaaccccccaagtacaaagcgtaccagtatattttgtgggttgtggcactagtcttgctgttagttgggtttgtgatttcacttgtgatgcttttcaaagggaagaacgggaacgacggctgccactggtgccactatctaaactgcgtgccaacatcaaagtggaagtgcaacacctagacacctcaggtttctgttactctggcgaaacatgtagtattcagattcagaagaccattttttttatgcgtgtttgtctgtagatataaacaagttctttgttctttactgggttgaagttatgtaaactgctttgttgagctttgtatgtttataactcgaggttgatgcctattcaaaatcgttgtttagtaaaaaaaaaaaaaaaaaagcggcctcaaggtatgctgcagctttgaatt

SEQ ID NO: 44669 - DNA, 272 bp, Zea mays
  Clone ID: MRT4577_140744C.1
caagatagtagtgttcagccaatctttgaaatcaccagccatacactgtcaaagttctgacagctttgaatgcatgcacagagtgtggccaagatttcattttggattctatgtcaagatatatagcagcagatgtcagggatgctgtaaacatagtggacgagttataccccgactctaacatgcaaattgtgcggatgttcattctgctgtcatgataatccttctacaaatggagctcattacgagcacggatgtagtcaggaatctct

SEQ ID NO: 44670 - DNA, 1410 bp, Zea mays
  Clone ID: MRT4577_140745C.1
gggctcacttccaagcgacacccgaaggccacagcggcacagcgccagcggcaacagtcaccagaccaccactaccagtctaccacccacctgacctgagcgaccccttcgcttccactccactgaagcgggccaaaagaaggaaagaaggcgggcaagcgacaggaaggaggaggaggaggaggaggagaagccatggcgagcgacggcgacgggaagggccgggtcgcgacggcgccgggggcaggagggtacggctacggctacggctacgccggcttcgagggggaggaggaccggaagtggtggccgtggctggtgcccaccgtgatcgtcgcatgcatcgccgtcttcgtcgtcgagatgtacgagaacaactgccccaagaaccggagccagctcggcggcgactgcgtcgccggcttcctccgccggttctccttccagccgctccgcgagaacccgctgctcgggccgtcctcctccactttggagaaaatgggagctcttgactggaataaaattgttcatcaaaaccaagggtggcgccttattagctgcatctggctccatgctggcctaattcatttggttgtgaacatgctaagtttgttgtttattggaatccgtcttgagcagcaatttggatttgttcgcattggtgccatatacctactgtctggttttggtggcagtgttctgtctgcactcttcctacggaacaactacatctctgttggtgcttctggagctttatttggcctgcttggatccatgctttctgagctactcatgaactggactatatactccaacaaggcagcagctataataacactcctgtttataattgcactcaacttggctattgggatactacctcatgctgacaactttgctcacattggtggattcgcaacgggtttcctcttgggttttgttctgttggcaaggcctcaatttggctggatggaacaccacgagctgccgcagactaaccaacctcccaagtacaaagcgtaccagtatattttgtgggttgtggcactcgtcttgctgttagttgggtttgtgatttcacttgtgatgcttttcaaagggaagaacgggaacgacggctgccactggtgccattacctgaactgcgtgccaacatcaaagtggaagtgcaacacctagacacctcaggtttctgttacgctctggcgaaacatgtagtattcagagtcagaagaccatttttttatgcgtgtttgtctgtagatataaacaagttctttgttctttactgggttgaagtttcctggtatatgtaaactgctatgttgagctttgtatgtttttgttgagctttgtatgtttataactcgaggttgatgcctattcaaaatcgttgtttagaatgctcgt

SEQ ID NO: 44671 - DNA, 2213 bp, Zea mays
  Clone ID: MRT4577_140746C.1
cgcgacgggtttcctcttgggttttgttctgttggcaaggcctcaatttagctggatggaaagtcatgagttgccacacactaaccaacctcccaagtacaaaatatactggtatgctttgtgggttgtggcactcgtcttgctgttagttgggtaagtaaatccatatggctggttcagtatatttgttgtagacatgtctttatgcgtttattaaacatatattgcagaaaacgtgctacaaagattcgtgattctggactaatgctaaattttggacgagctataaagatattacttgtttttgtgaaagcttgaaatagcactaatgtcaaattcttggggcacaggtttgtgatttcactagtgatgcttttcaaagggaagaacgggaacgatggctgccattggtgccactacctgaaatgcgtgccaacatccaagtgaagtgtaacacctagacacctcagttttctgtacactcgggggcaaaaatgtaggtatccagatttacaagaccattctctatgtttgtttgtctgtagatatgaacaagttctttgttgtttactggttttaagtgtcttggttttctaaactagctactctgtcggtccatgttttacggaagaactacatgtctgttttaaattgctcaatggaaaaccagtagctttgatccatgcccaaaaagctactcaaaggctggactatggactcacacattctcgaggctggccggggctccgcaagcagatcctctccgctcgccagcctccccctcctgctgctgcctcctcgcttcaagcaacacccgaagcggcaacaaccaccaccaccaccaccaccggacctgcctgagcgaccccttggcttcccactccactgaagcagggcgagagagagtaaggaggaggaggagaagccatggcgagcgacggcgacggtaagggccgcgtcgctacggcgccgggggcagggtacgggtacgcggcgtacggcggctaccagggggcggaggagcggaagtggtggccgtggctcgtgcccaccgtcatcgtcgcctgcatcgccgtgttcgtcgtcgagatgtacgagaacaactgccccaagcacgggagccagctcggcgactgcgtcgccggcttcctccgccgcttctccttccagccgctccgcgagaacccgctgctcggcccgtcctcctccactttggagaaaatgggagctcttgactggaataaaattgtccatcaaaaccaagggtggcgccttattagctgcatctggctccatgctggcctaatccatttggttgtgaacatgctaagtttgctgtttattggaatccgccttgagcagcaatttggatttgttcgcattggtgccatatacctactgtctggttttgggggcagcgtgttgtctgcactcttcctacggaacagctacatctccgttggtgcttctggagctctatttggcctgctgggatccatgctttctgaactactcatgaactggactatatactccaacaaggcagcagctataataacactgttgtttattattgcactcaatttggctattgggatactacctcacgttgacaactttgctcacattggtggattcgcgacgggtttcctcttgggttttgttctgttggcaaggcctcaatttagctggatggaaagtcatgagttgccacacactaaccaacctcccaagtacaaagcataccagtatattttgtgggttgtggcactcgtcttgctgttagttgggtttgtgatttcactggtgatgcttttcaaagggaagaacgggaacgatggctgccattggtgccactacctgaactgcgtgccaacatccaagtggaagtgtaacacctagacacctcagttttctgtacactcgggggcaaaaatgtagtatccagatttacaagaccattctctatgtttgtttgtctgtagatatgaacaagttctttgttgtttactggttttgagtttccttgcctatgtaaactgcttcgttgagcgttctatgtttataattggagtttgatagctgttttaaattgctcaatggaaaagcagtagctttggtgcgcaaaaaaaaaaaaaaaataaaaaaattaatatattttataattttttagaatgctcgtaaaaaaaaaaaaaaaaaaaaaaaaagcggcc

SEQ ID NO: 44672 - DNA, 192 bp, Zea mays
  Clone ID: MRT4577_140747C.1
gacgcgccttgtagtggctcattaaacgcggtgggggggggggttccccccagcgggaccgatacacttgctagcgccatagcggcccgctcctttcgttatcctgccttcttttatcgccaaggttcgcgggttttccccgttaagctttaaatggggggcttcctctagggttcctattaatggtttatg

SEQ ID NO: 44673 - DNA, 1696 bp, Zea mays
  Clone ID: MRT4577_140748C.1
cccagcgtccggtgggagacacttacaataatccttgcccaatcccgtctttagccgctagggttacgcgtccacggcgacgacctctgcgcagagcgtgctgcgattggccggccttcctgggatcctccccgcgcccgacacccggaaacgcgcgcgcgcgcgagggagagacagagtgaggaaacgagggaaggagacgacgcgctcgcctattggccgccggctccgctccttcgcgcccagtgcgacggccacggcctgagcggcgctgccagcaaggcggctagtatgagcagcatggagtcgcggccgggccgaacgaacctggtggagcccatagggcacggcgccgcgctgccgtccggcggccaggcagtgcagccgtggtggacgagctccggggctgtgctcggtgcagtctcgccagccgtcgtggcggtggcgcccgggagcgggacggggattagcctgtcgaggcagcccggcaggtggtagtggtggtggcggcgcggctaaaggagccgcgagtgacgagagcagcgaggattcacggagatctggggaaccaaaagatggaagcgctagtcaagaaaagaaccatgccacatcgcagatacccgctctggcgccagagtatttggcaccatactcgcagctggaactgaaccaatcaattgcttctgcagcatatcagtacccagatccttactatgcaggcatggttgctccctatggaagtcatgctgtggctcattttcagctacctggactaactcaatctcgaatgccattacctcttgaagtatccgaggagcctgtttatgtaaatgccaagcagtaccatggtatcttaagacgacaggagtcccgtgctaaggctgaacttgagaaaaaggtggtcaaagccagaaagccataccttcacgagtcttgtcatcagcacgcgatgaggagggcaagaggaaacgggggacgcttcctgaacacaaagaaaagtgacagtggtgctcccaatggaggcgaaaacgccgagcatctccatgtccctcccgacttactacagctacgacagaacgaggcttgaagtagcggtatggctctggcatccttgaacagcagttcctgtccacgggcgtaggcattcgagaccggattcatatagctctccacagcatacgcgcagccatctctgcggtaacgcacgttctcctgaacgagctttgtagcgagataggtatgcaagtgcaatctgggcgcaggaatccatcatcaagtgcccaatgcccatggggtaggtacgctgtttcaggcaattcattcttggctttcacgttccacccttgtgtaactggtgtgttgtaaatgtgtggaaaactaagcttgtgctctgtatcgggccgttcagcggaactgcaaaacgcctgtataattaagatcgaactttggattaactcggtaatgctttgtctggttttcttttagcttttcaactataaaaaggccacacgtgattcatgtggtgagcttgcatatctttccttgtgccccgggacccggccggccgaggcagccttccaatttttgtttgggggaacgcagtaattttatattttttatattcgggagtccacacaatcgtgtaaggttcctgcgaaccagttctgactttaattgaaccgcccggattcatatg

SEQ ID NO: 44674 - DNA, 906 bp, Zea mays
  Clone ID: MRT4577_140749C.1
cctcgagggcgggggttattaaagggcacttgcatgcagtaatatggccacgtcgtccaagacgcaggaagctctggccttgatggccctcgccatgctcgtcaccaacgccgccgtcgctgcagacgatgcgtcgccgtcctgccccaggctcacccttcacaacctctgtccttacccggtctggccgctcgtcaccgctaacgccgggtacccctccgtcgccggcactgactcccggctcaacgggaacggcgagggcctggttaccatggcgctgccgcaaggcgcgtggtcgggccgtgtggtggcgcgcacggggtgcgctgacgatggcatgtcgtgcgatgacaactgctctccgcagtgcaagaccggcaacacgccgccggttacggtggcgcaggtgagcgtgggcgggtccggcgggctggcggagtacagcgtgagcctggtggacgggttcaacgtgcccatggtggtgacgccgtgcgacttcgcggcgggggcgcagtgcccgacgctggggtgcgccgtggacctcacccaggaccaggagtgctgccccgccgccggcgccggcgccagggcgcccgagggcggctgcggggcagcggggactgaagcggcactgttcaagaacaggtgcccggacacgaggacaacctccacagacgtggaggcaacgccgcagaactgcatcgcgcccggtgagctcaaggtcgtcttctgcccggcacgtgactgcccgcccagttgtaactagctaggcgtacgtcctggtcgctcgctcacttggcgcatggaggctactgtgcctgttttgcactgcaatatgcatgtagccatgtaggtgtaccaaatggtttgaggaactaataatatagaactaatatatctagtgtt

SEQ ID NO: 44675 - DNA, 388 bp, Zea mays
  Clone ID: MRT4577_14074C.1
aaatgccggttattttaaaagtacggacaaaaaggtgacccaaaaaacccaacagaaaggggcaaaaagccaacctacgaaaagcaaggggctataaaaaacaatacgaaaaaaaggctaaacaaagctaaacagaaccagaaagccccaggaacctagggaggggaaaagagaaagaaaacaagaccggggaacagaaaagggggggggaaaaaggcctgagggccggggaaaccggcctgggaaccaaagaaaaacaaagggggacccaagaaaaagaagacccccgaaaccaagggagaaacttggagcgccaacgccagaagaatggcccaaaaaaaggccgaacccccgggaaaacccggggaaaaaacacaggggccccccg

SEQ ID NO: 44676 - DNA, 510 bp, Zea mays
  Clone ID: MRT4577_140750C.1
ggcgaattggccctgatgtttcatgtccagtgtttgtgttcttccgctccttgattcgcgactagcgagcatggggtctggggtggattcagagcgtcgtggagttttttcgtgtcgccgatcaagtcaagatcgctaccctgttttgcaccgatcatatcctgctttcattgtcgatcctcgtttgtgacgtactgccactgttcatctcggtttgacttttccatcgctcgtcttcctgatgccactgaaacagcgacggccacggcctgagcggcgctgccagcaaggcggctagtatgagcagcatggagtcgcggccgggccgaacgaacctggtggagcccatagggcacggcgccgcgctgccgtccggcggccaggcagtgcagccgtggtggacgagctccggggctgtgctcggtgcagtctcgccagccgtcgtggcggtggcgcccgggagcgggacggggattagcctgttcagcagcccggcatgtggtagtgggt

SEQ ID NO: 44677 - DNA, 385 bp, Zea mays
  Clone ID: MRT4577_140751C.1
cggcagtcccatggtatcttaagacgacggcagtcccgtgctaaggctgaacttgagaaaaaggtggtcaaagccagaaagccataccttcacgagtctcgtcatcagcacgcgatgaggagggcaagaggaaacggtggacgcttcctgaacacaaagaaaagtgacagtggtgctcccaatggtaaggctgaacctgagaaagctagtacaattgttgcataatctcttcatactgcacttgatatgagtgcacgcatttctgtttctttataccctgctcccgcatgccctaggaggcgaaaacgccgagcatctccatgtccctcccgacttactacagctacgacagaacgaggcttgaagtagcggtatggctctggca

SEQ ID NO: 44678 - DNA, 297 bp, Zea mays
  Clone ID: MRT4577_140752C.1
aaagcagcacgcctgcggaccgcccggaataattcctgggccgacggtctcaagtcggcggccgcccttgggttcggcgatttttatagacacattacggtctagacccacagcaaaggaaactaagaccagagtcggaaggcgtgcgtctaacataacatccacgaggtcactcaggtgactatgcacttagtacgcgacaacgaccagtagcggagaactcatgccggagaggctaaacagggccccaactggaatgatcacattgcagaatgcgttagacaccgactagcccta

SEQ ID NO: 44679 - DNA, 661 bp, Zea mays
  unsure (1)..(661): unsure at all n locations
  Clone ID: MRT4577_140753C.1
aattcggcacgaggcgcccctaccttggaataagtaagaggtttcaagaacaagcatagaaacttagaaccaaaaaagatactgggtaggccttgaccacacacctaatacaacattaactactggcccaaaccctgaacttgacctaagactcatacagtttgctcccgcgaaataccagttatgacatttcagtttcgaagaagtgggagagctgtctgtagattgggttggatcttgtcaaagaccattgcattcctgtgcttccaaagtgcctagaataatcacgaattgagtttttataactttctgttgcagatgggtaaacccaaataagtacatgggaactctgagtgcacacaagggagggtttgttcagccatctccacgactccacctgatctggatcacattgaataggaattacacaacttttctgcagattgggtgttgcatttcatccataggcttgataaacaagaccacatcatttgcataaatgggaattcattgcttttgtagatcattagccaaaggatgaaggagcccaaactcaccagccttagagaagatgctattaagaacgtncatgattagaatgaaaacataagtggaagggggtctctatgatggatacctctcattgcttgatgtcagcttt

SEQ ID NO: 44680 - DNA, 693 bp, Zea mays
  unsure (1)..(693): unsure at all n locations
  Clone ID: MRT4577_140754C.1
ngaaaaccaccacatcccaattcacgcagcgcacaaccattccctcaccccacgttccggcccctgcgcgtggcggcgagcccgcccagttgcagtgccccgccgcctggccagactccggcgccccgatgtctcgttctcccctgcatccctcgcatacctagccactggccatggcagtccgtgcccagatctctgtgcacggcgagcgcttgttcctcgaagccaggccgagccgtccccacgttcggccgcttgctcgtaatcgctcctgcagctttctttctcatccgttcatcttcccaaaactgctccctctgcaatcagcgcgcacgtccagtgtctcaaatccagaaccgcccgtgccccaattttttctcctacgcagttcgtcgcccacccgaccgtgtccggcctcgcggtggtcgacctcgccgtgcccgctgcgatcacgcagcagcaggcaagccggaaccgccatcgcagtccgcaggcgtcgctccgcccgtcttcgccgtccacctcgccggagcccatccccgacacccacgctcgagtccacggagattgcgatctgttcctgagcttcgaggaatcgacggtcaaacttcggcgaccaagtgatctagctcttcgagttctacgagatcgaagaccctgcgcatatgattgggtgaaggttgttcgcgttgc

SEQ ID NO: 44681 - DNA, 229 bp, Zea mays
  Clone ID: MRT4577_140755C.1
cccacgcgtccgaccacgcgtccgcccacgctttcgcccacgcgttcgaccaatctagatcggcgtcattgtccttatagatctccttgcacctcgttgccacacctatccccttatatccaccaagggtacatgatacttcataattgctgcgatgctggcacatctgcacactcatgcggttcactctgacagaattcgcctctaagcacgactacattctactaca

SEQ ID NO: 44682 - DNA, 303 bp, Zea mays
  Clone ID: MRT4577_140756C.1
ggaacaatactttttttttttcatttcaattgttcattcaggtcattggtcacactgacactgccacccagggggatgcgtgacacattattactgaatcatcgtcgctaaatgactcaactagctagctcgccagtggctatactacagcacatagtttcttcagtgggggaacaccccggcagcaccgtacgggcatggagtcggctgctgcaggccgcacattgccgttagttgctgaggtattttgtcccacaacaggggggcgacctggctcttttgcagtttgttttgccggatgga

SEQ ID NO: 44683 - DNA, 687 bp, Zea mays
  unsure (1)..(687): unsure at all n locations
  Clone ID: MRT4577_140757C.1
cgtaatanncgactccactanntagggcgannattgggtaccccctcgagnngccggcccgggaaaaaaaaaaaaaaaaaaaaaaaaaaaaaaaaaaaaaaaaaaaaaaaaaaaaaaaaaaaaaaaaaaaaaaaaaaaaaaaaaaaaaaaaaaaaaaaaaaaaaaaaaaaaaaaaaccccgccccaccaccaggggggggggggccccccctttctttttcccccaaatttttttgggggggggttggttaacttcccctgaatttccttcaaaccagggaaccgcaaggaaaagggggggaattaagggaaaaattttattgaaaagttcccgggtaaaaacccccattggggggaccgccccaacgaaaatcaattggaaaacccggcccaacccaaggaacttgggccaaaagccaaagaccggcccctcccgttgggccccccccccaaagcccgaaaagaaaaatttcggaacaaaacccgcggccccaaatttggggtaaatctttggggggggggaggcaaaaaagggtcccaccttacgggtgggggtatttcccaacggggggggaatttatgggccaccaaagaaaagggggaaaaaggcaaataattagggttccttaaccaagttttccccaataaaagagggcggttccacggggaggaaaatatagccccctt

SEQ ID NO: 44684 - DNA, 830 bp, Zea mays
  Clone ID: MRT4577_140758C.1
tttttttttttttttttcctacaaattgtgaagaaatatttagatcgcgatccattaccactcctaattgggactgtaaataaatcttagtgtcaaacaggccctcagtgttttcccgtgtctttatttgacggggagggaacgatgcttactcttcagtaaaaactaagaaacggaaaacattatgcagctttagcgcgcgcactccgtctcggaaagcaaaattacaaaacaaagattacatcagatggcccctagtcgctcgcacacgggatgtactcactgtgtctgtgtgtatcgatcgaccggagcaccctaacaacttcgctcagcacagccacaggttcgcaggcgccgtccatacctaccagctcagccagcgcctcgatctttctcgcaaagccctcttggcagaaggacgcgtcgaagctatccgcctcgtctccggactcctcctctgccgcctccgaaccagacgtgcctgcgccagacacggcgtctgcgtcagcgccggtggtttccgcatgaacgctccgggccatcaccgcgcctgactggatcattggccggctcgttgcgaggtcgtcttcggcgccagatcgccgtgtccggtgatgcgcctccagggccgccatggccggggcgtcaggcggaacgccggctgccgggggtggtggaccgaggcgtcgtcggaggcccccgccggagaggtccaagacgatgtaccgcggctgcacctgcgccacggcgagctccatttctgctgctgctctgttcggctgtgtctctacagaagcttaggactgtgtgttctagcttctacaaggaaa

SEQ ID NO: 44685 - DNA, 282 bp, Zea mays
  Clone ID: MRT4577_140759C.1
tttactccttcattacccttccttaattcccgaatccacccactcatccttactagttctagattgtttccctcaaaaaaaaaaaaaaaaaaaaaactttcaagaaaaagatttttttaaaaaaaaaggagccctccataaaatccactcttccctactctacaacaccactactaacctattctctatcttcacctaacttaattttctttcactacattttcatttctccaccttcctcaatccctaaaacccccccacctatccccctttccaacaatt

SEQ ID NO: 44686 - DNA, 398 bp, Zea mays
  Clone ID: MRT4577_14075C.1
agacgccggcgcaaactcccgcccgagcccgacagagccgccgtaccccattccgccgagcgatcgaccccgacgccggcggaggtgaataccaaacgggccacgcgcaggagggagagaggagagggggacaaggacgcagtgcaggcccagccgcagacggcgggcgggccgcccggtcggcaacgccggcagggaacgcaactgaaccgagcacggcagccagccggaggggcacgcgcgctggagagaagaccgctggacagcaccacgatgcccaaggccgccattcagccagactggtgcagggaagcacgccccccgtgcgagctacgaagggctagagcccccagaggccgatgaggtgcgcacaggcacgcaccgacagctccatcacc

SEQ ID NO: 44687 - DNA, 208 bp, Zea mays
  Clone ID: MRT4577_140760C.1
gctcatctagtcccatatcatcgtggaactctccaccgattgtgagctcctcgagaggagagagctggcaccgccgtgaatctctgcctgtactagcaaactaccttcgacgtttcggcccatatcttcaccatggttcgtagcactttggggtggcggtatttgcctcgtagcgtcgaccaagtcgtctcaattgctttccggggac

SEQ ID NO: 44688 - DNA, 235 bp, Zea mays
  Clone ID: MRT4577_140761C.1
cccgggggcgacccacgcgcctgcggcaacaccagccagaggaacgccggggacggggcgacccgcgcccattttggagaggacggactggcccctcgcgcccttcgtggactcctacaggggattacacgtcgacggctgcgaggactccgccgaggcccgctactgcgccagccagggggcgcgctgctgggaccggggggggcggggggacctctacgccgcgcaggccagc

SEQ ID NO: 44689 - DNA, 239 bp, Zea mays
  Clone ID: MRT4577_140762C.1
gctggggtttcttttgtaatatgtgcatggtggtacatatttctctactcctacggtcctacccaagtcattttgaagtttgctagtaccacgaccaaggcagtgatggagcaattgggaaatatgttaaaactgtgatgcagtcaaacacatttgaccaggaagtcgatgtcaatcacctgtctctcatttaattataacttgcttatgacttagaatgaagtgatttgttttcttat

SEQ ID NO: 44690 - DNA, 485 bp, Zea mays
  Clone ID: MRT4577_140763C.1
tccattctatgatatgggcgcatggaggggaggcaataataaccatctgatgaaaataggtaacatgcgagactcaaaacaagccccgaaaaatagggtgcgaactgagatagcgccctacaccaacgctggcgatgccactcttgttcccagttagaatctacggagcgaagaaggacaagtgaccaagtagaggaagcgtagaggactacaagaacacggggtgagaccgttatgttggggacgggcggggcgccacgtgtcgccaggcgttcgctgtccgcctctattaaaccgcgggcacgaccttaggggttttgagccctggaactggaagcaatccacaggctcacatcgcgccgccgcagcaccagcaacagccgaggcttcatcaattccccacagcacgcgcacatggaggttgcggcgtcgaatgtggatcacacgcccatggaggaggatgcggcgccagcgtcgctcgtgcc

SEQ ID NO: 44691 - DNA, 323 bp, Zea mays
  Clone ID: MRT4577_140764C.1
gataaagctaacccaaaacaagattatctccgattttgaatattgatcacccgctagtgcattttttactaaaatgtggtaaataaaaaaacggaggaagtatcatgcatgagcgcacgtgtggaagtggtacatatatattgcgggggaacaagctcactgcacggaagctagatttactctctcccctcttgaacagactggggaccttgtataagctccagcgcatgcacggttcagtcgatggccgagcatgtgtccaccctcccaggacgtggcctgctggcatccaagggagcccaagaaggtcttgctgatggccc

SEQ ID NO: 44692 - DNA, 455 bp, Zea mays
  Clone ID: MRT4577_140765C.1
gccatggaggggaaggattggtgacacccatgactgcagagccgcaactgggcgggtggcaggaacatgtatgcacactcagatgatgttaccagtgctctaaccgctcatttagaggaataatcaatcgcccatgctcctcaagagggtgaatgcgcaacaaccattgatgggccgaaatcagacgcaggaccgcatgttgacgtaccacacggcaacgcaaaatactctaatgatcttgaacatcattatattgacaccaactgatgatactttctgagagggaccgagtaaaccaaaccatgcggggtattcaactccacttaggagaccgacctaacgaccgaaatcaatgaaaatattggtgctgatgctctaatcacccaggatagcaatgactgatgatgatgcataaggacagcatgatcctagatctttcgctagctgaaacacaa

SEQ ID NO: 44693 - DNA, 799 bp, Zea mays
  unsure (1)..(799): unsure at all n locations
  Clone ID: MRT4577_140766C.1
ccggccgggacctcccgagccggcagcgattcgtagcatcagctattcatccgcgcgtggtgcaatggcggaggctcccacgacgccgccgcggaaggcgaagccgccgatgtcgcgcctcatgcggctttccatcaaggtcgtggacagggtcaccgacgccacccgccgggcagacgggacgctgaatcgttttgcgctctcgctgctggacccgcgtgtcccggccatctcctccccttgccgtggcgtcgcctcccgggacgtcatcctcgacggcgccctccgcctccgcgcgcgcctattccacccggccacgacgtcaaaatccacggcccctctccccgtgatcgtctttttccacggcggcgggttcgcgtacctctccgcggcgtccccggcctacgacaccgcgtgccgccgcatcgcgcggtacgcctccgcggcagtgctctcggtcgactaccgccgcgctcccgagcaccggttcccggcgccctacgatgacggtatcgcggcgctgcgcttcctcgacgatccaaagaaccaccccaccccgctcgacgtgtcccgcagcttcgtcgcgggcgacagcgctggcggcaacatcgcccaccacgtggcccgccgctacgcgtncgacgtcgcctcgttcaggaacatccgtgtcgccggcctgatcgccatccagcccttcttcggcggcgaggagcggacaccctccgagctccgcctagacggcgccgcgcccatcgtgtncatcgaccgcaccgactggatgtggcgcgcgttcctgccg

SEQ ID NO: 44694 - DNA, 627 bp, Zea mays
  Clone ID: MRT4577_140767C.1
cccaccgatcccgtccagctttaccgattcctactctcttgttttctgttttcttggttcgtcccagagagaggagagctttgattgctggtggtctggtcggcggcggcggcggcgatggagcccctggaggtggccataacgatcatattcgacgcgctgctgctggtgttcatggtcaagctcttcttcgccatgttccagatgaagctcgtcgtcatcctcttctacctcgtcatcctcctcttcgccatggccttctccggccgggcacccagcagcttctagctcgatcgtagcagcagcaggtggcaaaaattgaagctttcttctccctccccactctttcgtttcttctcccccctcttggagttggagggtggtggatcattggagtcgtgcagcgctacgtatgtcctgtgaaaaaagactatcatctcggtttttggtggatggctagctaatttatttctctctaccaaaaatagaatatgcgcgcttgatccgaggcgcaaattgcgtatgcgtgaagagagagaaatttcatgcttctaattccatgtaattcgtgatgtacctcctgcctttttgttacgggtttcgtggatcgcagagcagtggtgcata

SEQ ID NO: 44695 - DNA, 206 bp, Zea mays
  Clone ID: MRT4577_140768C.1
ttttagcctcacctctatggcagcgagggcgatcgttatcaatgggttagggaggaccgcatgatctctgaccaccgtcgtgttgcagagagacaatggcgctctagctgactcgaacgttacctacatgcacatattatcaaccacgtatatactcatgcaaagcactagtcacggccagacgaagcactacgacgtcctggttt

SEQ ID NO: 44696 - DNA, 889 bp, Zea mays
  Clone ID: MRT4577_140769C.1
ctcgaggccggccgggccgggctcgaggccggccgggccggggaccaaagcaaggctaggcaagcagcgtcactgaagcggaaaacgcgtcgccttcaccagtctccactgcaggtgcgtcgtctgctccgcagagagaggagagctttgattgctggtggtctggtcggcggcggcggcggcgatggagcccctggaggtggccataacgatcatattcgacgcgctgctgctggtgttcatggtcaagctcttcttcgccatgttccagatgaagctcgtcgtcatcctcttctacctcgtcatcctcctcttcgccatggccttctccggccgggcgcccagcagcttctagctcgacgatcgtagcagcagaggtggcaaaaattgaagctttcttctccctcccccctctttcgtttcttctcccccctcttggtcttggagggtggatcggtggagtcttgcagcgctacgtacgtcctgtgaaaaaagactatatcatctcggtttttggtggatggctagctaatttatttctctctaggaaaaaaaaagaagaataagaagaagcgcgcatgatccgaggcgcaaattgcgtaagcgtgaagagagagaaattagtcagtctagagcttcgatctcccgcgtctcatgcttctattttccatgtatgtaattcgtgctgtacctcctgcctttttgttacgggtttcgtggatcgcagagcagtggtgcatatgaaaagagatggacacggttttcttccgaaaaaaaaaaaaaaaaagcttgttcatgggttcttttttggggtaagctgtaaaatagtgtttctcttggtttttttaagaaaaaaaaaaaaaaaaaaggcccctaggccctatagcct

SEQ ID NO: 44697 - DNA, 395 bp, Zea mays
  Clone ID: MRT4577_14076C.1
acggacccatccacgcatcgacctagcggccgtcgcggtcatgcacacattcaaagcaggcaagcaatctaggctcagcatgattcacaacgcaatgcaggagacgcccaccatcagcatcgacggccacgacatcatactcctggacctggagggctcatataccctgcacgacgtgtactactcgctgaacgtgcacgtctgccactgcatcgccctcctgtactacgacgactacccgcccggctactacaacatggtgtccaccaccctgttcatcgacaacgccaagtccgcctccgccgtcatccgctactccagcgccagccgcaccgcgccggcgaccaacatgaacaagccatcggacaggctggccatcgccatcaaccacacca

SEQ ID NO: 44698 - DNA, 966 bp, Zea mays
  Clone ID: MRT4577_140770C.1
cattgggtacctcgaggccggccggggaagcggaaacgcgtcgccttcaccagtctccactgcagagagaggatagctttgattgccggtggtctggtcggcggcggcgatggagcccctggaggtggccataacgatcatattcgacgcgctgctgctggtgttcatggtcaagctcttcttcgccatgttccagatgaagctcgtcgtcatcctcttctacctcgtcatcctcctcttcgccatggccttctccggccgggcgcccagcagcttctagctcgacgatcgtagcagcagcaggtggaaaaaaaattgaagcttttcttctccctcccccctgtttcttttcttcacccccctcttggtcttggagggtggaccggtggagtcgtgcagcgctacgtacgtcctgtgaaaaaagactatatcatctcggtttttggtggatggctagctaatttatttctctctaggaaacaaaaaagaagaataagaagaagaagcgcgcatgatccgaggcgcaaattgcgtaagcgtgaagagagagaaattagtcagtctagagcttcgatctcccgcgtctcatgcttctattttccatgtatgtaattcgtgctgtacctcctgcttttttgttacgggtttcgtggatcatagggcagtggtgcatatgaaaaaagatggacacgtctttttcttccttggaaaaacttgttcatgggtttttttttggggtaagttgtaaaaaggggtttttcttgtttttttaggaacaattgggtttatacccttaaaaaatccaaactttagatatataccaagggcctcccaaatcattgactcatgtggacccatatgtaagtgaaaaagtaataatatggatccaaaagggggttttttttaaaaaaaaaaaaaaaaaaaaaaaaaaaaaaaaaaaaaaaaaaaaaaaaaaaaaaaactcga

SEQ ID NO: 44699 - DNA, 658 bp, Zea mays
  unsure (1)..(658): unsure at all n locations
  Clone ID: MRT4577_140771C.1
cattgggaccctcgaggccggccgggaagtatcccatcactaacccnggacgacagccacaatgaagttcctcaaggtcggacgcgttgtcatcatcacccggggccgctatgccggaaagaagtgtgtgatcatttctccccttgacaacggcaccaagtcgcaccccttcccccacgccctcgttgccggtatcgagacctacccatccaaggtcacccgccgcatgtcaaagaccaagcaggccaagaagagcaaggtcaagcctttcgtcaagcaggtcaactacactcacatcatgcccacccgctacaccattgagctcgagaacctcaagggcgtcatctctgccgacacattcaaggaggtctcgcaacgggaggaggccaagaagaccgtcaagaaagcattcgaggagcgataccagtccggaaagaaccgatggttcttcactcccttacagttctaagctttccctttttggtcacggctgggcgcagatgggcatgatttggcacggaagattgtgcatgagcatgtcggtggatatcataagatgacaggaccccaaaatccggcctggcatcatggcgtgtatatcggcttgataatcaaagcatgaaaaatccggcatccggctcaattcacgaacttcatg

SEQ ID NO: 44700 - DNA, 586 bp, Zea mays
  Clone ID: MRT4577_140772C.1
aggacaaaacaaggctaggcaagcagcgtcactggagcggaaaacgcgtcgccttcacgagtctccagagagaggagagctttgattgctggtggtctggtcggcggcggcggcggcgatggagcccctggaggtggccataacgatcatattcgacgcgctgctgctggtgttcatggtcaagctcttcttcgccatgttccagatgaagctcgtcgtcatcctcttctacctcgtcatcctcctcttcgccatggccttctccggccgggcgcccagcagcttctagctcgacgatcgtagcagcaggaaaaaaaagaagaacaagaagaagcccgcatgatccgaggcgcaaattgcgtaagcgtgaagagagagaaattagtcagtctagagtttcgatctcccgcgtttcatgcttctatttccatgtaattcgtgctgtacctcttgcctttttgttacgggtttcgtggatcgcagagcagtggtgcatatgaaaagagatggacacgttttttcttccttggaaaaacttgttcatgggttcttttttggggaaaaaaaaaaaaaaaaaaggccccta

SEQ ID NO: 44701 - DNA, 437 bp, Zea mays
  Clone ID: MRT4577_140773C.1
cccacacataggcgcatagatactcgtctacctactcggctaactccgtggctcatacttttaattcttgtcgcagttccatccggcgatgcatcccgttgagggacacgcatgaggaaccacattggcatccacatgtgtccaggccggaatccagtgctgaaacctgtgctggcatcagcactgccttgagcatgacattcaggctcacggtgacatgaccattgacagaagcattgatgcaggcgacaacgctttcaacaacactgtcactgagactgacgctcccaagcatgtgcccggtgctgttgaagccagtgttgtacccaatgtgatgactgaggcgtagactgagatctaccaccatgtgttgctcattgagcagatggtcgatgcaaacgacgattctgcccacaactactacagcattgactacg

SEQ ID NO: 44702 - DNA, 533 bp, Zea mays
  Clone ID: MRT4577_140774C.1
cattgggtacctcgaggccggccgggactgaagtgcaaacgcgtcgccttcacaagtctccagagagctttgatttgtggtggtctggtcggcggcggcgatggagcccctggaggtggccataacgatcatattcgacgcgctgctgctggtgttcatggtcaagctcttcttcgccatgttccagatgaagctcgtcgtcatcctcttctacctcgtcatcctcctcttcgccatggccttctccggccgggcgcccagcagcttctagctcgacgatcgtagcagcagaagaataagaagaagaagcgcgcatgatccgaggcgcaaattgcgtaagcgtgaagagagagaaattagtcagtctagagcttcgatctcccgcgtctcatgcttctattttccatgtatgtaattcgtgctgtacctcctgcctttttgttacgggtttcgtggatcacagggcagtggtgcatatgaaaagagacggacacggttttcttccttcgaaaaaaaaaaaaaaaaaagcggcc

SEQ ID NO: 44703 - DNA, 872 bp, Zea mays
  Clone ID: MRT4577_140775C.1
ctcgaggccggccgggaaaaaaaaaaaaaaaatcaagcgacgagacgaccgaccccaagccaaaggaccaaagcaaggctaggcaagcagcgtcactgaagcggaaaacgcgtcgccttcaccagtctccactccagagaggagagctttgattgctggtggtctggtcggcggcggcggcggcaatggagcccctggaggtggccataacgatcatattcgacgcgctgctgctggtgttcatggtgaagctcttcttcgccatgttccagatgaagctcgtcgtcatcctcttctacctcgtcatcctcctcttcgccatggccttctccggccgggcgcccagcagcttctagctcgacgatcgtagcagcagaggtggcaaaaattgaagctttcttctccctccccctctttcgtttcttctcccccctcttggagggtggatcggtggagtcttgcagcgctacgtacgttctgtgaaaaaagacaatcatctcggtttttggtggatggctagctaatttatttctctctaggaaaaaaaagaataagaagaaccgcgcatgatccgaggcgcaaattgcgtaagcgtgaagagagagaaattagtcagtctagagcttcgatctcccgcgtctcatgcttctattttccatgtatgtaattcgtgctgtacctcctgcctttttgttacgggtttcgtggatcgcagagcagtggtgcatatgaaaagagatggacacggttttcttccttggaaaaactaaaaaaaaaattcttttttggggtaagctgtaaaataggggttctcttggttttttttaatagaaggggctcaacttctccgaaaaaaaaaaaaaaaagcggcc

SEQ ID NO: 44704 - DNA, 810 bp, Zea mays
  unsure (1)..(810): unsure at all n locations
  Clone ID: MRT4577_140776C.1
ctagcgccgaatcgcgatccccttcccctcgccgtcacagcggctccaacccgtgtgaccgccgatctggtgccgatgacgcagaagaagtgccgcctccgcaggaggtctcctcgcgaaggatcatcccgccgccgccgcggtgaagaaggcgcatcgttgtctggatcccatgtcgaatcagatagcagcagcacgttggacgagccggccgggcggacttccagcgcgccgccgtccggatccttggacgagccgccggtcgcctggccggctcgcgagtccaggtaccatgaaatcctcgcctcgcgccttgcggagttgcagttacagttatgcgccgccgccgccgacgacgacatctcaaatcttccttcggatgaaattgtccaagccctcactcgttctaatttctatgatgatgagatgcgggctgctctggtagaatatcaaatccaaaagttcttgagcgaaccccacgggccaggtgttggggagagaaattctgtagaggacatgggcgatgatatccctgaggaggaattcgtcaactactccgaaaagctaaaggcttgcagacgtgctggaatcgacactgagactcggctgaatcaagaggagtttcgcatgctccatgtcaagtatgtacgttatcgcatcaaagcttacctgttgctgaaaggaaagcatatcgacgagcaagacgaagctacatcggaatccaagtaccctctggagcttgccttggagaatacatgtttctctccttacctggaagnatggtgtcttttggctggtatttcgactctg

SEQ ID NO: 44705 - DNA, 576 bp, Zea mays
  Clone ID: MRT4577_140777C.1
tccctggtcgacccacgcgtccgcccactcgttgagcccgccccccgccaccggccggatcgacagcatccatctgaccgtctgcgcgcggcggctctcacaccgaacacacgcagggcgcgcataggcgaggcgagggcccccgcgagggatggtgtggtcggctgggatggcaatgcgaggcgcctccgccgcgctgctcgtgctggcgctcgtcgccaccgtggcgcgcgcggaggacccctaccacttcttcgagtggaaggtgacgtacgggacgaagaccatcatggggacgccgcagaaggtgatcctcatcaacgacatgttccccggccctaccatcaactgcacatccaacaacaacatcgtcatcaatgtcttcaacgtgctcgaccagccgctcctcttcacctggcaccatgtgcccgatccagcccaacaccaacttcacgtaccactggcagcccaaggaccagatcggcagcttcttctattaccccagcaccggcatgcatcgggcggcgggcgcctacgggctcatcagcgttcacaggcgtgacctgatcccggtcc

SEQ ID NO: 44706 - DNA, 124 bp, Zea mays
  Clone ID: MRT4577_140778C.1
atgccatgcattgtacgtaacgtacgtattctcctcgttaggatcattagcttaccctatcactcgtcacagttgcagaaatcctcgttagcacctgagaaaagctcggtccacatcagtctag

SEQ ID NO: 44707 - DNA, 2344 bp, Zea mays
  Clone ID: MRT4577_140779C.1
actcctatgggcgattgggaccctcgaggccggccgggactcgttgagcccgccccccgccaccggccggatcgacagcatccatctgaccgtctgcgcgcggcggctctcacaccgaacacacgcagggcgcgcataggcgaggcgagggcccccgcgagggatggtgtggtcggctgggatggcaatgcgaggcgcctccgccgcgctgctcgtgctggcgctcgtcgccaccgtggcgcgcgcggaggacccctaccacttcttcgagtggaaggtgacgtacgggacgaagaccatcatggggacgccgcagaaggtgatcctcatcaacgacatgttccccggccctaccatcaactgcacatccaacaacaacatcgtcatcaatgtcttcaacatgctcgaccagccgctcctcttcacctggcacgggatccagcagaggaagaactcatggcaggacggcatgctgggcaccatgtgcccaatccagcccaacaccgacttcacgtaccactggcagcccaaggaccagatcggcagcttcttctattaccccagcaccggcatgcagcgggcggcgggcgcctacgggctcatcagcgtccacagccgtgacctgatcccggtccccttcgacacgccggccgacgacttcccggtcctcgtcggcgactggtacaccaaggaccacaccgtcctggccaagaacctggacgccggcaaggggatcgggcggcccgcggggctcgtgatcaacggcaagaacgagaaggacgcgtcgaacccgcccatgtacaacgtggaggccggcaagacgtaccgcttccgcgtctgcaacgtgggcatcaaggcgtccttcaacatccgcatccagaaccacatcatgaagctggtggagatggagggctcccacaccatgcagaacgactacgactcgctggacctccacatcggccagtgcctgtcgttcctcgtcaccgccgaccagaagcccggcgactacctgctggcggtgtccacccggttcatcaaggaggtgaacagcatcacggccgtgatccgctacaagggctccaacgccccgccgccggccaaggtgccggagagtcccagcgggtgggcgtggtccatcaaccagtgcaggtccttccgctggaacctgacggcgagcgcggcgcggcccaacccgcaggggtcgtaccactacggccagatcaacatcacccgcaccatcaagctcgccatgggccgcggcaaggtggacggcaaggagcggttcggcttcaacggcgtgtcgcacgtcgaccccgagacccccgtcaagctcgccgagtacttcaacaccaccgacggggtgttccagtacgacatcatcggcgacgtgccgccctccaagtccgcgcccaccaagatggcccccaacgtcatccgcgccgagttccgcaccttcatcgaggtggtcttcgagaaccccgagaagagcatcgacaccatccacatcgacggctacgccttcttcgccgtcggcatgggcccgggcaaatggacgccagcgtcccggagcacgtacaacctcctggacacggtgagccggcacacgatccaggtgtaccctaggtcgtggacggcggtgatgatgacgttcgacaacgcgggcatgtggagcatccggtccaacatctgggagaggcagtacctcggcgagcagctgtacgtgagcgtcatctcgccggagcggtcgctcagggacgagtacaacatgccggagactagcctccgctgcggcaaggtcgtcggactgccaatgccgccgtcctacctctccgtctagagcatgcacgcatctcgctcggtttccccttccttccatcacgtgcgcacggtgctgtatacacaatttaaaggagcgtgagggcagcggcttctctcgtttccttcttctctagctttgtccccctagctcgtttgttctctcgtcgtcccgtcgtccggttcatttccgcttccgaggaataataatcaaccaaaggggcgggcgaccagggaaattaagaggcgatggtcagctgcaaatgcattcatgcgtaaacacatcgagacgccgtctcgaaccattgtaggagttaagtatatgatgatatataatcctgtctatctaataagtccctcagccaaaaattgttctttatatttatgtatatgtacatgcatgtctcctgattcaactttgatgtttattgtctctttcgctttcgtactgaacttatccgtgtaacttggtattggtatatggatcaatagattgttattcacaaaaaaaaaaaaaaaaaaagcggcc

SEQ ID NO: 44708 - DNA, 796 bp, Zea mays
  unsure (1)..(796): unsure at all n locations
  Clone ID: MRT4577_14077C.1
ctctcgtattgttactgctagtgaagaatcccaatgttccagacacaaacggtccagtcccttcacatcatggattgaaaaaaatcagggtaccttggaatcaagttgctcttgaagttcttaggtaatcccagttcagattggattagttcgatcttctccattggaatctggcagtccatcgacatcatcactaatttcctaaggtttctcaccaagattggctccattagttctcgtgcgtcagcatcttcacaggatatctttctggccttctctgtaagtgtaacagaaattggctttcgggaagcacttccaccagagacatggaagatattggggtggcgtccgatgagtgaaagaaaatcccatttttggacaaagccaacctccttttcaaggtcacgtacaagtagtgaccctgtcttttgtgccaaaatgaggtcacgcagacgaaggagaagggcaggcttcttttgaaggtccatggccttgtcaagaccaggttcacggtggtatggcttcttcttgggtcggcgtccatgaccagctgagaatgaggacatagcattcagttgcataaaggggaagagttctgggaatcaaatataatntgtcgtccgaatcttctttccatcatttatgaaatgaatacaagctatgtagtcactataggtccaagcattaagatgtgcatataaagaagcagcccacgttgcactttaaaatctcactagtgggnctggntctccctagtctctcatatcttcatcaacaatagtaaagtgaacctgaa

SEQ ID NO: 44709 - DNA, 725 bp, Zea mays
  Clone ID: MRT4577_140780C.1
ccggccggggatcgtcgtgcacgcccccgccaccggccggatcgacagcaccgatcaccctgaccgtctgcgcgcggcggctctcacacaccggcgacacgcagggcgcgcataggcgagggcctcccccccggcgagggatggtgtggtcggctgggatggcaacgacatgttcccgggccctaccatcaactgctcatccaacaacaacatcctcgtcaacgtgttcaacatgctcgaccagccgctcctcttcacatggcacgggatccagcagaggaagaactcgtggcaggacggcatgccgggcaccatgtgcccgatccagcccaacaccaacttcacgtaccactggcagcccaaggaccagatcggcagcttcttctactaccccagcaccggcatgcagcgggcggcgggcgcctacgggctgatcagcgtccacagccgtgacctgatcccggtgcccttcgacacgccggccgacgacttcccggtgctcatcggcgactggtacaccaaggaccacgccgtgctggccaagaacctggacgccggcaaggggatcgggcggccggcggggctggtgatcaacggcaagaacgagaaggacgcgtcgaacccgcccatgtacaacgtggagggcggcaagacgtaccggttccgcgtgtgcaacgtgggcatcaaggcgtccttcaacgtccgcatccaggaccacatcatga

SEQ ID NO: 44710 - DNA, 1153 bp, Zea mays
  Clone ID: MRT4577_140781C.1
ccggccggggatcaacatcacccgcaccatcaagctcgccatgggccgcggcaaggtcgacggcaaggagaggttcgccttcaacggcgtgtcgcacgtggacccggaaacccccgtgaagctcgccgagtacttcaacgccagcgacggcgtgttcaagtacaacctcatcggggacgtgccgccctccaacacggcccccaccaagatggcacccaacgtcatcagcgccgagttccgcacgttcattgaggtggtcttcgagaaccccgagaagagcatcgacaccatccacatcgacggctacgccttcttcgccggcggcatgggccccggcaaatggacgccagcgtcccggagcacgtacaacctcctggacacggtgagccggcacacgatccaggtgtaccctaggtcgtggacggcggtgatgatgacgttcgacaacgcgggcatgtggagcatccggtccaacatctgggagaggcagtacctcggcgagcagctgtacgtgagcgtcatctcgccggagcggtcgctcagggacgagtacaacatgccggagaccagcctccgctgcggcaaggtcgtcggactgccaatgccggcgtcctacctctccgtctagagcatgcatctgggtttccccttccttccttccatcacacgtgcgcacggtgctgtatacacaatttaaaggagcgtgagggcagcggcttctctcgtttccttcttctctagctatttgtcccccctagctcgtttgttctctcgtcccgtcgtccggttcatttccgcttccgaggaataataatcaaccaaaggggctctgctctatctcaagaagacttcattcatgtgggcaccagcagtcactcactgccaggggcgggcgaccagggagattaagaggcgatggtccgctgcaatgcatgcatgcggatatatgcatgcgtaaacacatcgagacgccgtaaaattgttcttttatatttatgtatatgtacatgcatatgtctcctgattcaactttgatgtttattgtctctttcgctttcgtactgaacttctctgtgtaagttgatatatggatcaatagattgttattcactataaaaaaaaaaaaaaacccacgcgtccgcccacgcgtccg

SEQ ID NO: 44711 - DNA, 1245 bp, Zea mays
  Clone ID: MRT4577_140782C.1
ccggccggggtttcccttccccacccgacacggcacaccactctccctccctccttcccttcccctccctctttgccctccgaaccccgctcgcgaaccctagccagcctccgcgagatggacgaggactgggagctcctcctcgcgtcccccaaggcggcctcggcggccgagccgtacgccggaggcggggaggacgacgccggcgccatcaagcacgactacttcgacctcggctccgacgccaagtacccccggagggcgtcgctgtcgacgggggacgaggaggagggcgtggaggaggggcttctcagggcgtcggacaacgcgagctgggtggagccggaccctgacgaccttctcttccccggccgcgaccgtgcggcgctgtggtcggactcgtcctccgacggggagaggcccgagatcgaggccaccgatcccgtggagcgggccagggaggaggccggggccacggcggccgaggctgatggggtggagggggccgtggcgaagggaggagaacagcgtggtgggaagctgccgctcgacgcgctgcgtgtttgggcgatgcgcgcggcgaggggcgcctggtcggtgccgttcgccgtcgcgctgctcggattcgccgtgctcgggcgccggctgtacaggatgcgccgccagagcaaggccgccgcgcgcgtccgcctcgtattcgacgaaatgaaggcctcccaattcaagggccaatcgtcacgtctgaatgaatccacgacgatggtgcgccgaactcctttcataaaacctatgcttcctgccaatggagtgactccatggcctgtgctggggcacctgtgagatgtgtgatcagtgacgtgatagagctaataatacagctgccccaagccctgcagagacgctcacacttgctacaggccggcatattatgcaatgcccagcagcagatgtactgtctgcttgtaattcgaaaccacgcacttgtggaagaccttgcaagcttccgttcatgcagaatgatatttaggcctgatctagcttatgtttcttttgtgtatatatgtttatatttctattttctgaatccttgtatcatcaacttatgtgctggagatgtaaacgatcgagtactgagtacccaactatctatatgtagtgtgatgtatcatgtatatgacgattacccttacccataaatcaatacacaagtgaaagttagattaaaaaaaaaaaaaaaaagcggcc

SEQ ID NO: 44712 - DNA, 2334 bp, Zea mays
  Clone ID: MRT4577_140783C.1
gccggatcgacagcatccatctgaccgtctgcgcgcggcggctctcacaccgaacacacgcagggcgcgcataggcgaggcgagggcccccgcgagggatggtgtggtcggctgggatggcaatgcgaggcgcctccgccgcgctgctcgtgctggcgctcgtcgccaccgtggcgcgcgcggaggacccctaccatttcttcgagtggaaggtgacgtacgggacgaagaccatcatggggacgccgcagaaggtgatcctcatcaacgacatgttccccggccctaccatcaactgcacatccaacaacaacatcgtcatcaatgtcttcaacatgctcgaccagccgctcctcttcacctggcacgggatccagcagaggaagaactcgtggcaggacggcatgttgggcaccatgtgcccgatccagcccaacaccaacttcacgtaccactggcagcccaaggaccagatcggcagcttcttctattaccccagcaccggcatgcagcgggcggcgggcgcctacgggctcatcagcgtccacagccgtgacctgatcccggtccccttcgacacgccggccgacgacttcccggtcctcgtcggcgactggtacaccaaggaccacgccgtcctggccaagaacctggacgccggcaaggggatcgggcggcccgcggggctcgtgatcaacggcaagaacgagaaggacgcgtcgaacccgcccatgtacaacgtggaggccggcaagacgtaccggttccgcgtctgcaacgtgggcatcaaggcgtccttcaacatccgcatccagaaccacatcatgaagctggtggagatggagggctcccacaccatgcagaacgactacgactcgctggacctccacatcggccagtgcctgtcgttcctcgtcaccgccgaccagaagcccggcgactacctgctggcggtgtccacccggttcatcaaggaggtgaacagcatcacggccgtgatccgctacaagggctccaacgccccgccgccggccaaggtgccggagagccccagcggatgggcgtggtccatcaaccagtgcaggtccttccgctggaacctgacggcgagcgcggcgcggcccaacccgcaggggtcgtaccactacggccagatcaacatcacccgcaccatcaagctcgccatgggccgcggcaaggtggacggcaaggagcggttcggcttcaacggcgtgtcgcacgtcgaccccgagacccccgtcaagctcgccgagtacttcaacaccaccgacggggtgttccagtacgacatcatcggcgacgtgccgccctccaagtccgcgcccaccaagatggcccccaacgtcatccgcgccgagttccgcaccttcatcgaggtggtcttcgagaaccccgagaagagcatcgacaccatccacatcgacggctacgccttcttcgccgtcggcatgggcccgggcaaatggacgccagcgtcccggagcacgtacaacctcctggacacggtgagccggcacacgatccaggtgtaccctaggtcgtggacggcggtgatgatgacgttcgacaacgcgggcatgtggagcatccggtccaacatctgggagaggcagtacctcggcgagcagctgtacgtgagcgtcatctcgccggagcggtcgctcagggacgagtacaacatgccggagaccagcctccgctgcggcaaggtcgtcggactgccaatgccgccgtcctacctctccgtctagagcatgcatgcatctcggtttccccttccttccttccatcacgtgcgcacggtgctgtatacacaatttaaaggagcgtgagggcagcggcttctctcgtttccttcttctctagctttgtcccccctagctcgtttcttctctcgtcgtcccgtcgtccggttcatttccgcttccgaggaataataatcaaccaaaggggctctgctctatctcaagaagacttcattcatgtgggcacaccagcagtcactcactgtcactgccaggggcgggcgaccagggaaattaagaggcgatggtcagctgcaaatgcatgcatgcgtaaacacatcgagacgccgtctcgaaccattgtaggagttaagtatatgatgattgatgatatatgagcctgtctatctaataagtccctcagccaaaatttgttcttttatatttatgtatatgtacatgcatatatgtctcctgattcaactttgatgtttattgtctctttcgctgtcgtactgaacttctccgtgtaagttgatatatggatcaatagattgttattcactat

SEQ ID NO: 44713 - DNA, 2312 bp, Zea mays
  Clone ID: MRT4577_140784C.1
actcctaagggcgattgggttcctcgaggccggccgggactcgatcgtcgtgcacgcccccgccaccggccggatcgacagcaccgatcaccctgaccgtctgcgcgcggcggctctcacacaccggcgacacgcagggcgcgcataggcgagggcctccccccccggcgagggatggtgtggtcggctgggatggcaacaatgcgaggcgcctccgccgccgcgctactggtgctggcgctcgccgccgccgtggcgcgcgcggaggacccctaccacttcttcgagtggaaggtgacgtacgggacgaggaccatcatggggacggcgcagaaggtgatcctcatcaacgacatgttcccgggccctaccatcaactgctcatccaacaacaacatcctcgtcaacgtgttcaacatgctcgaccagccgctcctcttcacctggcacgggatccagcagaggaagaactcgtggcaggacggcatgccgggcaccatgtgcccgatccagcccaacaccaacttcacgtaccactggcagcccaaggaccagatcggcagcttcttctactaccccagcaccggcatgcagcgggcggcgggcgcctacgggctgatcagcgtccacagccgtgacctgatcccggtccccttcgacacgccggccgacgacttcccggtgctcgtgggcgactggtacaccaaggaccacgccgtgctggccaagaacctggacgccggcaaggggatcgggcggccggcggggctggtgatcaacggcaagaacgagaaggacgcgtcgaacccgcccatgtacaacgtggaggccggcaagacgtaccggttccgcgtgtgcaacgtgggcatcaaggcgtccttcaacatccgcatccaggaccacatcatgaagctggtggagatggaggggtcccacaccatgcagaacgactacgactcgctggacctccacatcgggcagtgcctgtcgttcctggtgaccgcggaccagaagcccggcgactacctgctggtggcgtccacccggttcatcaaggagaagagcagcaccacggccgtgatccgctacaagggctccagcgccccgccgccggccaagctgccggagggccccagcgggtgggcgtggtccatcaaccagtgcaggtccttccgctggaacctgacggccagcgcggcgcggcccaacccgcaggggtcgtaccactacggccagatcaacatcacccgcaccatcaagctcgccatgggccgcggcaaggtcgacggcaaggagaggttcgccttcaacggcgtgtcgcacgtggacccggaaacccccgtcaagctcgccgagtacttcaacgccagcgacggcgtgttcaagtacaacctcatcggggacgtgccgccctccaacacggcccccaccaagatggcacccaacgtcatcagcgccgagttccgcacgttcattgaggtggtcttcgagaaccccgagaagagcatcgacaccatccacatcgacggctacgccttcttcgccgtcggcatggggcccggcaaatggacgccagcgtcgcggagtacgtacaacctcctggacacggtgagccggcacacgatccaggtgtacccaaggtcgtggacggcggtgatgatgacgttcgacaacgcgggcatgtggagcgtccgctccaacatctgggagaggcagtacctcggcgagcagctgtacgtgagcgtcatctcgccggagcggtcgctcagggacgagtacaacatgccggagaccagcctccgctgcggcaaggtcgtcggcctgccgatgccaccgtcctaccgcgccgtctagagcgtcgaccgatcgcgcacggtgctgtacacaactaaaggagagcgagaggggactttttctcgcgtttccttctctagccagccttgtctgtcccctcctcgtttattctctctctctcttttttttcgttcgcttccgaggaataatacccaaaaacaaaaaaacaaaggggctcaagacttcatcatgcatgcatgcataacacctcgagtaggagttgaagtacatgatcattgatggtatatatatagaggaagcatgtctatctaataagtccctcatccaaaattgttctttatgtcatgtatatgtacgtgcatatatatatataaaaatacgtctccttttattaagtgtctttcgctttcgtgccgaactctgtaacttgagatatggatcaaatagattgtaatcactgcatatctactatgggtctatggcttcccgttccagct

SEQ ID NO: 44714 - DNA, 473 bp, Zea mays
  Clone ID: MRT4577_140785C.1
caggccggccgggacctcatcctaccaccaccactgccccgtatacatacaagtagcagcagtcgctggctggcttcggccgagcgatagatcgatgctatagatagatcactcgcgcatcatgctacgtaaggagcataccgctgctagtacacgtatatcttcgaaccgcgacgagtaaccgtaagaacagaactgccatgtcgtctgccttctcggtgaacgtgtccttccttctgacgaacttcctggagtcggcgaacctcaagtacgtgcggctcaggtaccactacctcatcatgcacggcgtgtaccttggccaacatccacgacatcgtgctgacgtgcgaaaccaagctgtccacgctcagccgcaaccagctgaggcacaaggtgagcgcgaagggcacctacgacctcgccaccgtgctcgctcttcatcaccgacctcaacttcaccatctacggctaca

SEQ ID NO: 44715 - DNA, 270 bp, Zea mays
  Clone ID: MRT4577_140786C.1
aagagccacttttatatttgtattatgagatattaactagttacaagtccagactgacgaactttctcccaccattttgacatacattcaattcaaaaaaggattcaaccattactaccattattctactttttcactacttttttgaaagttgatagactatgcattgttaagtgcagtggaaacatccatatttttttgttaaataaccacctctctttccaggggatgggagacttcatattactttaagggccactggttcttcat

SEQ ID NO: 44716 - DNA, 275 bp, Zea mays
  Clone ID: MRT4577_140787C.1
gcagcgcgctgcccgcgctttccgacgcagcatgtcgcgcgcccgcgtcaggacggtcaaggacctcgccgaggaacgggcctcagtgctcgccgccagcagcaaggtctctgatgaggcggcggccgcggctaccgctgagccctctgcaggtgccaagaccttcagcagcaacgatgcccgcgacggcgccatggacagcgtgcaggacgagccgcatcagcagtgtcacgatgactatcaccccgagatcgtgccctataagatcatacacg

SEQ ID NO: 44717 - DNA, 371 bp, Zea mays
  unsure (1)..(371): unsure at all n locations
  Clone ID: MRT4577_140788C.1
cgcgggtggagccgggcgcggacaagcagcgcgngcggggggtggttgagggcaggaacgcgacgactcgcccaccaacaagagcggcgtgcaggaggagacccgcccgaacgcgcaaagccagggcaagtccaggaacaaccagcgggccataggcacgcgcgccgcagacaagcgcgagcaggaggagcgccgggtccgccacgacagcctggcgacggacccagagaacgtggcgctggacgacgcgagccggtaccagagcgagaccgaaaacgagcggggctcaaaggagaaccacaccgaggtcgggcgcgaggacccataagggaacaacaggttcctggacgacaagctgggcgagcaccaag

SEQ ID NO: 44718 - DNA, 228 bp, Zea mays
  Clone ID: MRT4577_140789C.1
gtcaaagaccgccaactggaacttcataaagtatgtgctcagttattacggcacaagacagcggacgggaaactgagactcagtgttctgatgcttagaggagcgtgtaacagaggcatcatgcactatctatactagccagagacgaagcgagccaaatctctaggtcttggacgtacctatggcgtcgtatctgaattacataatccagagcagatgctaagaata

SEQ ID NO: 44719 - DNA, 483 bp, Zea mays
  Clone ID: MRT4577_14078C.1
tggcttggaacctttgggctgatttatgtgcttgtggatgtgcgggtacagataggtgctcctgcatctgttcactcttgtgatttaaagtgcctgtttcctctttacctcctctctaccctctattattgttgttgtcatttttccctgataatattacgagggagcgtactctgacttatactggttaggttggcacttaggctggaaatgtgcgtcgggagtcgcatcgttctgagtacggtacctaggtcgacggctagacgtttggcgataagattaccgggggaggcgacgacgtccctaatattcctcctagcgagatcggtgtcgggaagtatgctttttgcgtcgcccccgccgattccgagtttatcgctactgacgaggcgaggatcggtattcactgttagtctccttacttcgagtagtctactagcggtaaggaggacgtagttaataatcctgtctgcggctatcata

SEQ ID NO: 44720 - DNA, 691 bp, Zea mays
  Clone ID: MRT4577_140790C.1
ctggccgggaaaagtttgtcccttgtcccgttgttccgctactgtttcttcttatcgccgtttcctttcttttccaaatcgacatcttaaaatcgaagttgttgcgctttgcaaagggtggatttggaaagcagaaaacaaaaaaaatggcagacgataaacatgattctgagcatgcgcttagcgattcagataccacgaccgacgagcaacaagttctagcgcagacgagtgaggcagaggaaaagaggttgctgaggaaattggatttgaggttgttgcctgcggtgtcgattttgtatttgttgtcgtttttggatcggagtaatgttgccaacgcacgcatcgagggacttacaaaagacttgaaaatgacaggcaaccagtacctaacgggtctcacactctattttgtcggatacgtgctattcgagattccgtgtaatattgtgttgaagcggacgacgccacggttttggttgccgacgctgacggtggcgtgggggggttgtggcgacgctgattggtattgtgcagaacttgacggggtttttgatcgtgcggtttttccttggtgtcacggaatctggtctatttcctggagtcgtgtactatctgagtatgtggtataaacggaatgagcggcagtaccgtatttcgctcttcttagctgtgcgtcgcttgctggagc

SEQ ID NO: 44721 - DNA, 367 bp, Zea mays
  unsure (1)..(367): unsure at all n locations
  Clone ID: MRT4577_140791C.1
tcaacgacgccaaccacccctctctcaccaccgagggggggaccaacatnattcaatnatcacacagcctgggacacaggacctctaagaaagcacactcaacatccacctcaatgactccaatacacttctcttagcacagactcccaccacccgctatctcatcacaaaccccaagaacatcccgcaagattaccctttagctgagtatgtctttggacccacctataaactaccctacaagaacaagcctgctgcacatctgaaacaacttgcccataatggtcttctctctaacccaaacaaatatgctcccatgtctcattctcagtctcattcatgacactaacacctccaatctaaacat

SEQ ID NO: 44722 - DNA, 204 bp, Zea mays
  unsure (1)..(204): unsure at all n locations
  Clone ID: MRT4577_140792C.1
cgacctcctcatccccagcggtgcggtgccccccccggcccctccccagtgccactgtctcgtcgctccgtagacaccgcgcctccgcctccccgccactcgccggaggatgccgncaccgttatgccatggccgacatcctctcctccgcggagccaacgatactgactcgagccacgcgacctcggaggtggatgaggagtg

SEQ ID NO: 44723 - DNA, 245 bp, Zea mays
  Clone ID: MRT4577_140793C.1
acggctgacgccaggaccacccaacccactgcccttttcagagatctctccgcctccgccgggtacttcagtcgggcgactattccccgtacggacttacccgattgcacggcatcactgtcttgatgccgctctgccgctcgggatcatcgctgagcatgctctgcatcatgggcaacgcccactatttcatccacaatgcacgagcacggcatgccgaagcacatacctaacgatatgttcga

SEQ ID NO: 44724 - DNA, 793 bp, Zea mays
  unsure (1)..(793): unsure at all n locations
  Clone ID: MRT4577_140794C.1
cctcgaggccggccgggatattttttttctcgcactgctgaaactctacttgaagccaagacagcggtctcaaaaagtctggttgatattccacttcagatatagtctttccaagatgaagttctctacctcggtcattctcccccttctacctgcactctccacagcagcagtgataccgcgccagaatggcgatggaccacagggtagcacagactcgacacagggtgatcttggagcacgacctccccccagattcccttttccggtcacaaagttccccgttccgactgagactgttgtgcttaaagaggccatgtacattgctgctggccaggtcttcgatggacaaatgaagcgatacgggcgtgttgagggtagctgcagtgagcaggctgagggaaccgacgcggatgctgtcttcaacttacttcctggtgctacaatccggaacgtgattattggtaaacaccagagtgaaggtatccatgctctcggagatgcctgggtggagaatgtgtggtgggaggatgtatgtgaggacgcacttacatctaagggcctaaacacccaactccgcgtcatcggcggaggcgcacgcaacgccaccgacaagatcttccaggacaactcgctaggaggcaaagtcaacatcacaggcttctacgccgaaaactttggtactttctatncatcctgcggaaactgcctcaccaggcgaagcgcaacgtcaccatccnaaacgtcattgccgtaaaaggcaccagaatgggtataatcaaccccaaactac

SEQ ID NO: 44725 - DNA, 950 bp, Zea mays
  unsure (1)..(950): unsure at all n locations
  Clone ID: MRT4577_140795C.1
gtgcggcgctcaggcggcgtggtttcagccacacgagcgccctcacctggtcctgcgacgctcgtcggctcagcagcagtcctcccccacaaaagcagagacgcgtccgacgccgccaccaaaagcaccttccccagccacgctccgccgccatagccgcaggaaaatatcaaatcggagccgcgaagcacaacagaaatttttttccctagggcttgcacgcaaaaccctcctgaattccccaattccgtgccgtccctcgcttcttgtgggccacgaatctagggtttatgcatggcttctgaccctcccggagatggcaccagtggtgaggagacggcgccgggccctgcccccgccgtggaggcgccgcctgctcccgccgttccggccaggtcgcgctgggccgctgagatcaaggtctacacccgtaagcacccccgcaaaaaccctaaacctcctccagaatcagcggctgaccccgtttctgttccttccccggctccgaatcccctttctgaaaccttatcctcgattcgccgctccatccaccgcacggaggcggtggacgctgcggcgctgtccgatccggcagcgccggcctcggttcccacccgggcgccgtctggggaacgtggcgccgcctctggggatccctcgtctgggctgaaccgggtcggcggcggtattcctaacggccacggcgacgaccgggcggccgccgctgctgtgaaagctgagaaagcacggaaacgcaggttaaggagtgagctgcggcgctgtctggcaggagagctcgaccaggtccgcgtgctctccaggcgactgaaggaggctgccgaggccctggcgcaacaggaggcttctgagcccgtgcctttgcctttgatggtgctgccaacacagcagcaggtggtggatgctgggtatgttcagcaccagntcttggc

SEQ ID NO: 44726 - DNA, 157 bp, Zea mays
  Clone ID: MRT4577_140796C.1
tgtcgccttgggtttttccttttatattttaattctattacgggggccaaagaatacacaaagaataacttgtaggaaatggcgtacaaaacgtgcaaaattcgtttcggggcgggtttttaaaagctaaaacaactggcgttctgatacaacacct

SEQ ID NO: 44727 - DNA, 307 bp, Zea mays
  Clone ID: MRT4577_140797C.1
ctttttcaacaaggttttttaagggcaacgggtcaactaacctttcaagactgcaaccaatcagagccgggaggcctgtacacactcactgaaacataccattcattcattcattgctggccgtctctgttaacctctcaagctacctagatagacacatgtattaccaattgaacaacaaaaactagcttgatacataacaacctatatacgctctgaagggccaccgtggtggcacacacaaacatccaaatgcaacgaatgcccagaccaacattgaaacaaacgaaacaaaccgtgcctaaaa

SEQ ID NO: 44728 - DNA, 123 bp, Zea mays
  Clone ID: MRT4577_140798C.1
tacgttactacccgcagaatataaacatatcgggcatcttaggagaagggggggactataataaccctattaacgtctagcgaaccgttagcagcccatcttgagaatcggacgtatttttat

SEQ ID NO: 44729 - DNA, 469 bp, Zea mays
  Clone ID: MRT4577_140799C.1
gggaaagggattgtttcttatatagtatataagtatatctcaatggaccaccccccaaaacccgaataattaccggggcacagactactcacacaccctcacaccaagagaagtagaggaattcaaagcaagcccgggccaaagtggaaggggaactgatgcacaaccatcgggggagccctgggaagaacccttcttttgctcctctccttgcccccccctgctgctgctccctgggcccctcccttggtcatcttctcctcacctgccccctgcttttgctgccccttgtcaacttctaaatgaccccctgattccttacccacggcaaaagcccataccgggggggcaacggccccaaccccccaacatcctcccaagcccaaaatcatgattggcccacccatgggaaggatggatccatgttttatttttccctcaactcttgcaccgcctgaatgaaccctcc

SEQ ID NO: 44730 - DNA, 1345 bp, Zea mays
  Clone ID: MRT4577_14079C.1
atttcttttagtagattatcagccatgaaccacctaactacaatatatataaataaaaaactcgacctgtggggctaagacaccccccatgacattatattaagaaacacagatcgagaaaccccctcgaacccctgtcccacccagacacagcggcaccgtagcctgaccgaggccggaccttggacctgtgctttggtgtgggacagatgagaggacttttttaaccacaactaaaattcgctctcacggaaagtcgaacccaggacctaaggagtgctactcggaccacctaatcaactcaactagatgccctttcacatctgactacaatatgcaaagtataatttgaactcctctaccctaagtgcttataatgttctgtttattttgaatttagtccctctgtttcttaaacaagaaataattaaattcaccatatatcccccatgttttccttaaagactatagtgccatcttgaaatatctgaagcttcctggagacacttatgatggcttgttctttgtcaggttgctcgagaaacctcaaaaggtattgctgattttgttgatggaaatcgacaaggcttttcagttgcaagtgctgttctcctcagcctagttccatggattcaaggctgtgcgacacttcttcatcttgctctgctggctttcaatgctgcaatgttggcgatcttgtcacgtcttgaacagaaaggggagtcagtctttgcaaagaaagagtacgcacgagcagtcattttggtggccagtcagaaaacgttgccagtgttggttgctgtggttgagcagcttggaggagcgttcggggagtctggatttctggtcatcccttgtgttgccgcacacattaaccagatcattattgattctatcatagtaaattggtggcgccagaaggatcaacaatttacttctgcaaagtaacttcaggattcaatttcggtgtgtaacatatggaatcggtcaggagctcttaatgtttatcccctgacgccaaagcaaaatgagatctacgtgttcagttatttcaaccgaaagtagtcatatcgagatgttttacacaaaaatgccttttcgtgcctgaaggaacgatattatgtatttccttcacaatcttcagatgtcttccttgcaacgtttttggatagttgaataaaaaaaatgaagaatgtagttgtacttgtcatgcaggaagttcagtaaaaggaagaattgctgactgcaaaacctgttttgtggaagatcattatacgctttaatttccaaaaaaaaaaaaaaaaaaaaaaaaaaaaaaaactcgaggaggggcccggggtaccca

SEQ ID NO: 44731 - DNA, 410 bp, Zea mays
  Clone ID: MRT4577_1407C.1
gccaaccccggagaggccgacacccctcagaactaatgcccaaccccgaagcttcaatccacccatcctctactcatgcactccgggcggtcatggcctgctgcttgcgcgtcgggaccgtggcttgttcgcgccccaccccggtcgacaggactcttgacgctgtcgcgtagttcgtctctgattcccgctccgcggtcggcaccgccgacaggtcggtccgactcgtaagatacagatccgcgcgggccatcatacttgtggaccgcgccggaggcgattatgacttgccgctggctgggaacaaggcgccacacttcgaagccgatgccgagttcgaccaagagttgatcaacgtgaaggtctctgaatacatcggtaagaaacacgccgctatggtcttgtacccc

SEQ ID NO: 44732 - DNA, 244 bp, Zea mays
  Clone ID: MRT4577_140800C.1
ttatatttttttttttctttttaacaactacatgaaataccctcggactttgcggatttgaattacagaaatttaatatattcagaccagattgaaacttctcgtagagagttcgtaacatcactcatctatggaacaactccttgtaaagaccgaaactccgcgttgagagcattatgcagttcgcaagcagtataccagttaaagcttatgctcagaaatacagatttgctacaatgccggt

SEQ ID NO: 44733 - DNA, 387 bp, Zea mays
  Clone ID: MRT4577_140801C.1
gactaaagaaaactgtattagataactgctgcagtgagcagggccaatgttgacatagttttaagacatgtttggttcgtggctaattgtgccacactttgcctaaggttagtcgctcgaattgaagaactaaccttaggcagaaaagttaggcaaagtgtggcaagttaggcaccgatccaaacatgctcttacaatgttgtcatagaattattggaaccagagcataggaacctcagtgagcctcagtgattccagatttgagtgagcctagagcataggaacctcaacaagcatacacacgatgccctgagagccatggctgccctcagcatgctttgggccactggcccacaactgtcgtcagaagataactcaatgactttc

SEQ ID NO: 44734 - DNA, 215 bp, Zea mays
  Clone ID: MRT4577_140802C.1
aaaattctctactagagcacctcttctctgtcgatcctcttactaggtgctgatatccggtatagatattcattctccttttttgcttgctgttgtgccctgactacctctatcttccactatggaggatctagacaccaccagccgcacggtgctcgacgatatgcgactcatgaatgcgcgcctgtccgagcgcattagcgcatgctgcgacg

SEQ ID NO: 44735 - DNA, 484 bp, Zea mays
  Clone ID: MRT4577_140803C.1
gggagagaaaaaaaaaattggaaaatacaggagccggtacgttaggggcctaaaactacggggggggcccagggggcaacgggggacaacttttgcccgagcccacttttgctgggaaaaaagactgggttgcaatcccaaagggccctaagcccaagggaatcaaggggtccggggtgggaaggccctcaagaaggggaaaagctttttaaccccggggagggggatggcattgtaaaagggggggcggacccccccaacaaacctgggccccttgagctgcaccatgccctccttggccgccttggggaaaaactggtttttaaaatccgggcccttggccagggggaagggcacctttatgtgcgagcgcccggacttgtcgacggggcaaacaaaaaaccccccgctggcatcaaagggggcaaaaagggggccggccttgcccgcgttttttttttcgacctcaaggagggccccctgg

SEQ ID NO: 44736 - DNA, 369 bp, Zea mays
  Clone ID: MRT4577_140804C.1
atggtgagcgcagagaagggcatgggagagagaggggtaagtgacgggcttcacctcacaacgatgaacaatagtgagagcatggatgacgacacatggagcttcagcggtcgacgcgacgcgagcttcggatgggtcggcgagggacgaccgcgatgggtgcgcgccaagggaaaaggacgagatgagggagagagggaggagaaggtcggcccggcagcgggcgaagctgggggacgcggttgcggcggcgtgggtgctagggcacgcaggttgcgcacgctactggcctataggtgggccgcgcacactgctactgggccgaggagggggctaggtgggtcggcccagagctgggccgcggggtga

SEQ ID NO: 44737 - DNA, 829 bp, Zea mays
  unsure (1)..(829): unsure at all n locations
  Clone ID: MRT4577_140805C.1
gcgtcgtcccttcgccactccccatcgcaccctcctcactcagcggtccttgtcctccgctcctcctgtcgcggaaatcggaatcccctgctcggccgtcgtcgccgtcgccgcccccgccgcctcctgtcactccaccagatccatagcggctagcgctggacgccggcgcttgcaaatcgagggtcagcgcagcgaatcagtgctagcggcgggcaggcaaatcagcgcggacaggtcgcgtattggggtcgaattggaccgacgcgtccgcgcgggcaaatcctagaggccgtgctcgtgccgtactgatacggctgcggcctgccggccgacgttgctcatttgcgcacaggacaggcgacggtctccagctcgagttcggcgccccgggcggctggcagcagcagaagagcagggcctggatgctgaaccaatggtgtcaggctttggctgctcttacgctgtcgctggaaggaagcgcgtaaagttgttggcagccgagtcatcggatggtgaacccctcggctgttgcgtgccaatatgtgatgattcactgggggacttgattgagtggtgctccgagcggcatcacatgccttccngattgtggtgatcaaacacaacacactggtgtgtttgctgcaatgcaagaatacacctgttccactggtaaacaatggtgtgatttatccacaatctgggattagccattcatctggtcaaaatggggcacaggacacatacttgcaacaccaacattntgaaggctgcatgtatatgagcggnaacggacagatgtgcggaccttactgnctgacaactgtat

SEQ ID NO: 44738 - DNA, 339 bp, Zea mays
  Clone ID: MRT4577_140806C.1
ggccaggaaaaagttgggcttttttccaagatttttggggcatccccaaccccccggttaggggcttccctcctttaatatcaggggggggaaatttacattccgcctaaacccgacagggggacctaacccggtgggaatttggcatcgccatggggcctgacaatgggtcaagctagatataacgggtatggggaccaactccattcggcagctcccttaggtggggcaataaaaggaggtcaggttagctaaaccattttttttggggatgctgggttcaccggtctcatggggcggagaggcacctcccctggaaaagggggccccccttgaggg

SEQ ID NO: 44739 - DNA, 260 bp, Zea mays
  Clone ID: MRT4577_140807C.1
ctttatatcaaagtcagtgggtcaattgttcatcgattttgtaccaatgtttggtaaatgtgtactccctgttgagcatacctcttctgtgatcatcttagcgtccagtacgtgtgtttcactgtatgccatcgtcaaaaatgccaagtggtattgccaataattgtggtatgggaattaccacaagtccttatttctcattttggtttttagagatttctttctgttgtgtatctgtaacagttacaattgttcaaatt

SEQ ID NO: 44740 - DNA, 980 bp, Zea mays
  unsure (1)..(980): unsure at all n locations
  Clone ID: MRT4577_140808C.1
ttgggaccctcgaggccggccgggaaaaacatatgcctcaggccctcagcaccgggccggtgttcgtgtccgcaccctcggccggaaacagttccccggcgagtccccgactgctctctgtctctctattggcgacgactgggctaccgccgccacaggcgccctacgccaggtgtccaggtctcgggcccttctccggcaccgagcacccaccagcggaatataccatggaggtcaggcccatggtagctctgcgtgccgccctagttggtggggtagcggcatttgcgaagatcggtggggcgatgaaagccgcaggcggtgtcaagattggtgcagccgctgcagccgtcacggctgcaacatcagctgccatatcgggaaaagacgcaaaagaagacacttcaaagccggaaacgaaatgatatgacccatggattggtcgacaagtatgaaatcgcctctccagaggtttagaagagagagggtgccatagtcaataagttacaggagtaaattttgatgctccgtgtgttttttatctcgggaataagaatgacagtacagttttccccagaagtatgattttgtgttgtgcaacagtttcggctgttgaatgcttttagtcacactgtctgaatggcttgatttctgctgtgccacattctggggcgcgatgcatctgtgatctgttgccatattctgtttgcacatggagatcctgaaggatttgtgcagtttcatgcgtaaggcagtgcatctaagatctgcttgccaaattctgttcgcacaggaagatcctgaaggccttgtgctgtatcatgcgtaagatcctagtgatctacatcagcatctgtatatttgaagtatctcaaactgtagaacgctgtaagttttactatgccgctggttgtatctctcggntttttttttctgggcatgctcccttgtatgatgaattgatcagacagtgttgttca

SEQ ID NO: 44741 - DNA, 951 bp, Zea mays
  unsure (1)..(951): unsure at all n locations
  Clone ID: MRT4577_140809C.1
gtgcatcggcgcgagccgggacgccggcgacgccatcacgtcgacgctttggaaaccgtcgccgtcccaccctcgctttccatctccatggctccaggtcctccacggttcgctcaccttcccctccaaacccaaccaagccaagccaagtctcgtccttcgcgatcccgcgccgtcctcgtatataaagtagccgcgctactaatccattcgaattcccaacaccggcacgagcgccaaaacatttattgccttcaagtggagaggcttagcggcgcgaacgtcgaggagctttagcctccagggtaggctcctgctgatcggccaagcgcaatctcgttcttccaagcagacgtacagagagagagggtcgcgggggcggttgagggctcgtcgtcgacccatggccgtgaccgcgacgacggtcgcggcggcgatcacgatgctggcggccgtggcggcggttttcctcaccgtgctgctctgcttctacatcgtcctgtgcgccaagcaataccggggcgaggcgccccgcgcgggcggcggcggcggcgccagggcgtggctgctgcgcgccgtgttcggcggcgggggtgcggacggcggcggcggcgccaccgagtggtgccacgagggcgggctcgacgacaaggccatggcgaggctgccccggcgggaggtgggcgcgggcgaggcgctggactgcgccgtgtgcatcgcggaggtggcggccggggaggcggcgcgcgtgctgccgcggtgcggtcaccccttccacgtcggctgcgtgnacgcgtggctccgctcccactccacctgcccgctctgccggtgccccgccgtcgacgacccgcccgccgtggccacgcccgtggccgaccgggagtcccccaacttccccaccaacgtcctcttcttcggctcccaggacgacgtcagcaccggccgctc

SEQ ID NO: 44742 - DNA, 1285 bp, Zea mays
  Clone ID: MRT4577_14080C.1
aaaaaatagctgtggcgagcttgcatcgttgcgcaccatgatgctgggcatgctgagcaggacgaggttggccggagcggcgctgcgggtggcgctgacggcgctgctgccgctggtcctgccggcgtactacgtgtacaagctgaccacgtacctcctcggcgccgtcttccccgaggacgtcccggcaaggtggtactcatcaccggcgcctcctccggcatcggcgagcacctggcctatgagtacgcgaagcggggagcctacctggcgctggtggcgaggagggaggcgagcctccgcgaggtcggtgacgtcgcgctggggctgggctcgccgggcgtcctcgtcctcccggctgacgtctccaagcctcgggactgcgagggcttcatcgacgacacgattagctacttcggtagactggatcacctggtgaacaacgcgtccatctggcaagtgtgcaagttcgaagagatccaggacgtcaggcacttgagagccctgatggacatcaacttctggggccacgtgtacccaacccggctcgccatccctcacctcaggagaagccgtggccggatcgtgggcgtcacctccaactcgtcctacatattcatcgggaggaacaccttctacaatgccagcaaggcggcggcgctcagcttctacgacaccctgaggatggagctgggcagcgacatccgcatcaccgaggtggtgccaggcgtggtggagtctgagatcaccaaggggaagatgctcaccaagggaggcgagatgaaggtggaccaggacgaaagagacgccatcctggggccgacgccggccgagcccgtgggcgacttcgccaggaccgtggtgcgcgacgtgtgccggggcgcgaggtacgtgttcgagcccaggtggtacatgggcgtctacttgctgcgggcctgcctcccggaagtcctggcctggaactcccgcctgctcactgtcgacacggtcggcgcgtccaccacggacacgctcggaaagtggctggtcgagctgcccggcgtgcgccgcgtcgtgcagccgccgtcgctccgctcgccggagatcaaggactagtgacggtgatcgtgtacgttctgtggccatggatagcactagctgtatgagaccgaagttcctttagacatcgacacgattaataaaggactcaattatcttaatgctactacaaattactccctctgttgtttttttatttgtcgcttttttccaaaaataaaatagcgggcacggacaaatattcgag

SEQ ID NO: 44743 - DNA, 221 bp, Zea mays
  Clone ID: MRT4577_140810C.1
cgagaacgcaccccctcgcctcctactaccgtacccatccagatgatgcttactgaggcgtcgtcattctccgtcatggtgtccaaccatctcttttatggtgccgaggtaaccacggttcctgccagggtgacggcgcatcgcagcgttgtttctctgtacgtcgtcttcatcatctgctaggggaaggaggtactcaactgttttgtttcccagcccta

SEQ ID NO: 44744 - DNA, 256 bp, Zea mays
  unsure (1)..(256): unsure at all n locations
  Clone ID: MRT4577_140811C.1
acgaccacacntcccactactcctagcctcactcatttccaaacccacccaacaaaccacattggggccatacatacaacagtggctaccacaatattatccctccttgcacttcttgcgctttatccgaactcaacaattgcgtacattattccacaatgctcacttgctccaacttccattattacacatttccttccaccactttcttaaattggcttcgaacacccaaatgtccacacctataacctacaac

SEQ ID NO: 44745 - DNA, 664 bp, Zea mays
  Clone ID: MRT4577_140812C.1
atgtggcactatcagttcaaatcgaatttcatttatcgtattgtttgatcaaaagcgaaaggaatctcattttgcgtgttgtctctgctcatggtgtagatggggtatcttgaccacggttcacgggcatttgggtaccgaacgtgagcacgacaaatatctgtaggaggacgcagatggtgccacatatgttgtcgatgttgaactctttgaagctttcagcttagttgtcaccctagaagaggaaggcacgacccatgacggtatcgacgaggcactcattcaagtgccgtgtctccctagcaaagacgatcggcagcaaggcctcgatcgtcttgagcgtcgtctccagctacgtcaggtttgggtactccagcaactgcaacacctacttcatcctcaagaagacatgttacttatcaattctacattggaaagataaaaatcgttgggtttgagttttttggggcgatggagaaaaaaatatagctgttttgttctattattgtgacattccttaccatgttacttatcaattctacatgtggaagtcaaaacatggtgttttggtttcctccaatagtcagagttcgctcaacatatatttatagctacaaaatgcaaagttcatataactcttggaacatatgtgcccacgcgaccg

SEQ ID NO: 44746 - DNA, 763 bp, Zea mays
  Clone ID: MRT4577_140813C.1
cctcgaggccggccgggctcttcgttcaaatatccttgtacctgcatctcgacctcaccggcgtccggcggtggtatcacgatggtggctgcggcagctgccgcgttcatcgccctcgtggcgttcggatccgcctcatcctcgcccaagtccttcgtgaagtccaccgtctccgcccacgacgtcgtcatcttctccaagtcatactgcccgtactgcaaaagagcaaaggccgtgtttaaggagcttgagttgaagaaagagccatatgttgtggagcttgatcagcgagaggatggctcagagattcaggatgccttacttgagatagttggcaggcgtactgtccctcaagtttttgtccatggaaagcacctgggtggttctgacgatactgttgactcctacgaaagtggaaaactggctagacttctaaacatcggagtcaaggacgacctttgagtgacatgctacatcggtcagcctgttcgtttggtttcaatccgtaccggcttctactacttctatattgtttttgtctctatggattacagctacaacagtctaaatagctgattttaatccgaagcgaacagtccaaacagtctcttgttttgagttaccaagggactttttgtgtgactctgataaaagatatgtaactgaatgttttattatagtttataccatttgaaccgtacttttaaaaaaaaaaaaaaaaaaaaaaaaaaaaaaaaaaaaaaagggcggacaataataaaaa

SEQ ID NO: 44747 - DNA, 765 bp, Zea mays
  Clone ID: MRT4577_140814C.1
cattgggtacctcgaggccggccggggccgttcctattccattcccgtcttctctccaccgatccccgcagaatattccattccagccaaggacgacgatcgcctcatccatccaaatggccacgcctgctccagccggcgccgccatgcccgagctcgccccggggcagggaagagaagccaagcacgggcgcgccggcggcgggccacgccagagcgccggcgcgcgcctcctatcgctctccgtgcaggcggccgtgatggcggccacgctcgcggtcctcctcgtctttgccgccgcgtccgccttactcctcctcgtcctcgtcctcgccgcgcgcgccttccgccaccaccgcgtcacgtcgctcgaccttgccccttcgtcgccgccgccgcctctccgcgcggggctctcgcccgtcgacatccgccgcctgccgagcttcgccttcccctccacgcgtggcggcgccggcgacgataccgccgccgcctccccctcatgcgtcgtgtgcctcgatgccgcgcgcggcggggagcggtggcgcgcgatgccggcctgcacgcacgcgttccacgccgcctgcgtcgaccggtgggtcgccaggacgcctgtctgccccgtctgccgcgctgccgtcgccgtcccgatatgagctaaggccgacgccgcgaacttgcccaccggggcccttcgtcctggtcgggaagtcatgggaggccgatatgaaccggggctggtggaaagaaaaatgcggggga

SEQ ID NO: 44748 - DNA, 877 bp, Zea mays
  Clone ID: MRT4577_140815C.1
cattggtaccctcgacctggcggccggccgggggccgacctgttagatatccaaccgtacgtaaactagtcacaactcaggaccagtgcctcttcggtcaaaaatatccttgtacctgcatctcgacctcaccggcgtccggcggtggtatcacgatggtggcgttgctgggccggcggatcggggtggctgcggcagctgccgcgttcatcgccctcgtggcgttcggatccgcctcatcctcgcccaagtccttcgtgaagtccaccgtctccgcccacgacgtcgtcatcttctccaagtcatactgcccgtactgcaaaagagcaaaggccgtgtttaaggagcttgagttgaagaaagagccatatgttgtggagcttgatcagcgagaggatggctcagagattcaggatgccttacttgagatagttggcaggcgtactgtccctcaagtttttgtccatggaaagcacctgggtggttctgacgatactgttgactcctacgaaagtggaaaactggctagacttctaaacatcggagtcaaggacgacctttgagtgacatgctacatcggtcagcctgttcgtttggtttcaatccgtaccggcttctactacttctatattgtttttgtctctatggattacagctacaacagtctaaatagctgattttaatccgaagcgaacagtccaaacagtctcttgttttgagttaccaagggattttttgtgtgactctgataaaagatatgtaactgaatgttttattatagtttataccatttgaaccgtacttttattgctaaaaaaaaaaaaaaaaaagcgttgttgctactgtccaaaaaaaaaaaaaaaaagcgccctaaggg

SEQ ID NO: 44749 - DNA, 319 bp, Zea mays
  Clone ID: MRT4577_140816C.1
aacgagataaatctcaatcaatatattgattatttttaggaaacacatgccgctttgagggccccattatcgagtacatttcatatgtaatctaaaagaagggcccccccaccatgggttgctggcaccacaagggaggggttattaaaaaaaaattggtttattggaacaattttttcttgttttagaaaggcaccaaccaaggggtaacccccccttgggggataaaaaaactgtggcccttttttaaggaccccacaaaattttacaccatccatttggttaaatggaataaattttttaaagaaggcacaagggt

SEQ ID NO: 44750 - DNA, 225 bp, Zea mays
  Clone ID: MRT4577_140817C.1
taattaaacagacaattacatatattatggcagtgcatatcctaaaagcctcaggacggttatggatgtgtttactgtacttttaggtttagagctaatagatagataataggtcaaccagtctgtttattctatgaaccaacctaaatccaaaagctcgaaccattgggtctctagtggctcgatgaagtctgttttcagcttatcggatgatgcctcgtgccg

SEQ ID NO: 44751 - DNA, 453 bp, Zea mays
  Clone ID: MRT4577_140818C.1
acaaaaggtaaaccacacgggcaaaaaaatcggtgggaattatctcacggggggggctttttgaaaaaggggtcttgggggacaaaccttgaaactggggggggaaaatgaaacatcaaaggggcgggggaaaaacactccattgttttgggcaaacccggatttaccggacggggtttccaggaaccaacacagggaagggaaaagcctagggggattcaaggcaccttggaatttaactcaacaccctggggggggcgggaggggtctacgggctattttacaaaaaaaaagccgaagtcgattttgtttaggccgcaggagctttggtgtcccccaaaagcttaagttccaaacaccaaccaaaaatttttttaaacttttccaggggttaaaaattaaatttttaaggggcgccttggacttgggcttaaaataaacggattttttttt

SEQ ID NO: 44752 - DNA, 378 bp, Zea mays
  Clone ID: MRT4577_140819C.1
ggggttggggaaagaaagagaaaccttcattgagcaagcaaatcggatctaaaagcttaacatccttatgatgttgaaaacacaacggcgtgccatttgcctttcatgtaaagatgacaactcaagcgttaacagaggctgaccttccagcccaattagggtctgctgtatatcatggatactgattcatagctgaggttgatcaaatcctgtgcagctacaagctgcttctaatatccagaaacacctacaatggttggagagcatgacaccaccctctggaggaagcagcggatttaattgactaccagcaccgcatttcccccgcctgcccttgatagggccactcccttctgcgataaagaaaccgaccttgat

SEQ ID NO: 44753 - DNA, 1880 bp, Zea mays
  Clone ID: MRT4577_14081C.1
cccacgcgtccgcggacgcgtgggccggttttcagttggtggccacgcgcacggggacggggttcttcctttgctgtcgcccccgcctccgattccgcgatgataacccaccatccctccctgatccgcccatctgtcctcaccctccgtgccgacgtcctccgtcggcgcccaacactgcacgccgtcgcctccgcgccgcctccccgattgtggtctttgcgcgccaccaccggtggaacttcgcccgtcagtggcgatggaggcaaacgcgctgtgcccagcgtccggcgtgggcccgccctgctcggcttcgtgcgtagcaacttcctcccgcttgctctcattggtgggatcatattgggtcttctagatcctactcttggatgccttgcacacaaatactccctgtcaaagtacagcacttttgggatattcgttatctcaggactgaccctgcgcactagggagcttggtgcagcgttagaagcttggcctgctggactatatggactaggatctattttgctgtttacaccctttcttgctcagtttattatgcaagttcagttcttcccccctgaatttatcactgggttagctatgttttgctgcatgccaacaacactatcaagtggagtcacactaacacagcttgttggtggtaactctgcacttgctcttgcaatgacagttgcatccaatttacttggcattataattgtacctctttctcttgcaaaatacattagcaatggtgttggggtttccttgcctactgagcaattattcaaaagtcttgtcaccagccttctaatccctcttattatagggaaggttgctcgagaaacctcaaaaggtattgctgattttgttgatggaaatcgacaaggcttttcagttgcaagtgctgttctcctcagcctagttccatggattcaagtaagtagatcaagaccactgatcttatctgttcaagtaaaatcctttgctgttgccgttactattggagtgcttcttcatcttgctctgctggctttcaatgctgcaatgttggcgatcttgtcacgtcttgaacagaaaggggagtcagtctttgcaaagaaagagtacgcacgagcagtcattttggtggccagtcagaaaacgttgccagtgttggttgctgtggttgagcagcttggaggagcgttcggggagtctggatttctggtcatcccttgtgttgccgcacacattaaccagatcattattgattctatcatagtaaattggtggcgccagaaggatcaacaatttacttctgcaaagtaacttcaggattcaatttcggtgtgtaacatatggaatcggtcaggagctcttaatgtttatcccctgacgccaaagcaaaatgagatctacgtgttcagttatttcaaccgaaagtagtcatatcgagatgttttacacaaaaatgccttttcgtgcctgaaggaacgatattatgtatttccttcacaatcttcagatgtcttccttgcaacgtttttggatagttgaataaaaaaaatgaagaatgtagaaaaaaaaaaattctaaaaaaaaaaaaaaaaaaaaaaaaaaaaaaaaaaaaaaaaaaaaaaaaaaaaaaaaaaaaaaaaaaaaaaaaaaaaaaaaaaaaaaaaaaaaaaaaaaaaaaaaaaaaaaaaaaaaaaaaaaaaaaaaatcctttccgggcccccccctttttttttccaggcccccccccggggggagttgggcccgggaaccccccaaaaaaaaataaggggatcccccttcccccgcccaaatggggaaaaacaccgggtttgggaatgggggcaaatttcaaaaccccaaaaaagaaccaagggggg

SEQ ID NO: 44754 - DNA, 382 bp, Zea mays
  Clone ID: MRT4577_140820C.1
ggcttggaacctttgggctgctttatgtgcttgacctgactcttctttactattcctactgctattctctgatggtagatcagggggtaggtttactctaattggtggtagttcagggtcctactttttatttttaaacttacgttgtctaggccggagactaacgcgcgttcgtctgattctatcggactctagcttttacgctgcttcctcatcctctgtgctatcccgaccccgtctctcagcccgaccccgtccttaccgcggcgaccagcggaaacccctctaacggctagagagggctaagccggcggatccgtattttatggaggtacggacgccgagttcgcctctgaggagcgttcgtacttgggaccactat

SEQ ID NO: 44755 - DNA, 167 bp, Zea mays
  unsure (1)..(167): unsure at all n locations
  Clone ID: MRT4577_140821C.1
aagccaggtccttatactcgaccagcaggcggggacgcttaagatcctnccaagagccgtactagatcatagagcgcaagcatgcctttctacgggccattgggaagatgttggaacactcaaatccttcctcgatgcaaacttggccctcactgagcatccttcca

SEQ ID NO: 44756 - DNA, 288 bp, Zea mays
  Clone ID: MRT4577_140822C.1
gcaactagtttctgaacagcgtgtccgctgtctggtctgtcaaaataatcttggtaaccagtgccaaaatgattgctgggggaggctattttgatggttctcatgaccatattctcatggaaggatcaatgatccatgattctttacaatcttccatctatgacaatacagatgttgtacagcagaacttcagatttgcgccctttatcatagaagatcactccaatccagccaaccttacctctgaggctgcaagggtgatagaccaaattcaacaccagctgggga

SEQ ID NO: 44757 - DNA, 300 bp, Zea mays
  Clone ID: MRT4577_140823C.1
cgcagaggtcccgcggcttcctattcttcaccttttccaccgaggaggcgatgcccagggggatctatggcatgagcgggagggaactgcaccgacggaacatcaccgtgaaccaggcccagtcccgaagggggcgaagaggccgaagaaggggtaaactgactggctcgaggagagctgatgctacggcggaccttgacaccatgatgccgggatccgttacctgggtatcggtcgatactgctgctgcggctattaccgctgctgcagcttgccctacggtatttagaaccgaagaag

SEQ ID NO: 44758 - DNA, 283 bp, Zea mays
  Clone ID: MRT4577_140824C.1
ccgacgcttacgaacatgtgccacattaactataaacagctgtcctacttgagagactgagcgtattattacgatgatgaggaggaaactcaacagcgcatccacacgatggagagcgaatatccaccgcgtcacgccagtgctctgagcctactagtgcgctctggcaggaccagctgtcggcatctaaacttacagccttctctcgcacagcaactccgaagatgttcctaccaaatcagatctggtttactgcacagcagcatcagacgcccaccccata

SEQ ID NO: 44759 - DNA, 553 bp, Zea mays
  Clone ID: MRT4577_140825C.1
gtaggtaaaactgtgcaactaaataaatagatcagcacgtaacacactgttgatatcacaggatttattcactcacacaccatgcatcccgtaatacctggatcacagaatacagaatacactcacatgactggttaggccttattcaggactcaagataccacaagtgcacagcacagacagatcacaattccagctgtctatattatgtccctacattggaaagcgggtaggtacacttgtcaccatgaacacatccgttgggcatggccctctagactttgagtaaacagcggtccagggggcaatagcagcagatggcagccaagcatccctgcatgaaggaaggcccgctgatctgctcgtgctgtggaggcggcggctgcgcgtactgcgccgggtggccctgcagagggtagccctgcgccggcggtgggaggccggccggcggataccccgctggcgggtagccgtccttgcccggttagccttgctgcggcggcacgccaacggggggctgctgcccgtagtaactcatctccctcttcttcct

SEQ ID NO: 44760 - DNA, 423 bp, Zea mays
  Clone ID: MRT4577_140826C.1
gtatccccatctccatctggaatcctcgctcgcccacactcagcatgcatggcgccctcgcgcaccggggccggagcctgagccagcggccgtgtggtggtcttaccgtccccggtgcatggacaattgaactggtcgatgcggctggccagagcgctgcacgcgcgatgtctagggattaccgctttagacagtggcgccctggacccagcagactacgccggctactaccgcttggtgcccgtgaccgtacaggcagagccaaagctactaccgtccgaggacatggcctgcatcgctaccacgctgaacgctagatgagacgcccccttgagggccagactatcggcgctgctgaccgcccaagggagggacagagtccggagcgtattccccgacttcagatggatcgcctggctgacg

SEQ ID NO: 44761 - DNA, 361 bp, Zea mays
  Clone ID: MRT4577_140827C.1
cgcactcgttcgatattctagagtatattctcttgctaactacttattttattcatttacgggtcattattgagcaggcatgtggtccacaatactcatgcttgcagtatcatcaatgatcaattatccttatcaacaattgacattacatttgcttatacttacctgcataataatatttttgggggaagtttgttcttttataataagtgttttattgttagaaatcctaactcctttagttgggagatttatatatatacttatttataatataaaaataaaataagacatgacggtctggattatttaaacttacatacttcttgcattcggacagtataacttttttatttttttt

SEQ ID NO: 44762 - DNA, 142 bp, Zea mays
  Clone ID: MRT4577_140828C.1
ggagttaaacagcgacttattatgcctagtggtgtcaaagaacatactaagaatccacatggaggtaagtactatggtagaaaaccacgagacatgcaaggacaattagacaagacggaggtcgcgccatagtagggactaa

SEQ ID NO: 44763 - DNA, 157 bp, Zea mays
  Clone ID: MRT4577_140829C.1
tctatgaggaaagttggcgcgcccgtaggctccgatcctgtatagcgggcgcgatctacgcgttcgatttagagcttactcaatctctcgatgctaagcacattacccacgccgtactgcggtcgctaccatgatgtcatcccttcttgcgcttatt

SEQ ID NO: 44764 - DNA, 720 bp, Zea mays
  unsure (1)..(720): unsure at all n locations
  Clone ID: MRT4577_14082C.1
actagttctagtcgcgcggccgccctttttttttttttttttatcaacaacaatggactaggatgtagtccatacgacttggtagaacagaccatgtgagtcagctcgatctgtggtgaatcgtttttacatgcgtgaaccagtacagtgtacatacaaatgtacaataatatgtactttgataaaccattacataagctattcatctttctttcagatggaactgttgtcacagacgttgaggcatttagaaaactgtacgaggaagtaggacttggatgggtttatgctgttactaagtatgagcctgtagctagcatggcaaatgcagtatatggtgtgtgggcaaaataccgtatgcaaattacaggtcgacctccgctagaagagatcatggcatcccgaagagctgcaggcgacatgtaaagatgacaaagtatgcaagatgtgagcataaagatgttctactgtgctacatacctcgcctctagccatgctttatataggctaaggctcgtatatatggctttaacagtacaaatagtcgcagttgtattagaaaaaaagctgaatagcttatgtaatggtttatcaaagtacatatgattgtacatttgtatgtacactgtactggtttcacgcatgtaaaaacgatccaccacagatgagctgactcacatggtctgttctaccaaaaaaaanaaaaaaaaaaangggggg

SEQ ID NO: 44765 - DNA, 402 bp, Zea mays
  Clone ID: MRT4577_140830C.1
gccttttctattttagttctctcaaaaggtttttcccctcccctttgtctcgcttttctctttttgtgactgcttgttgggtttcaactctagcctacccaacttgtttggtactaaaaggctatgttgatgatagtttataatagtgatttcatatggtatgtggtttgatgtgtgccttgcctggtgcccaatttaagctgacaccattatttgcagcaatcaaggaagaagaaggacaatgacttctggtacgatgtttgtggatgggtgatccttggcgccggcattgttgcttgggttggattggcaagagcaagcatgcctcccccgacgccaccagccaggtgagaactgatcgagtgccaagaacgctttgcaaatgatggcatgcctatatta

SEQ ID NO: 44766 - DNA, 263 bp, Zea mays
  Clone ID: MRT4577_140831C.1
cgtacgcgcacgtctggacgtcgtcgtggagcttcaccaggacgccgtggccgccgtctgcatgcacacacaggcaagcacgtaacgtatgatcagcttcagctagctgtttgttttcttccgaaaaggaaaaaaaaagtaaaggtgtattacgttacgtatttatttataagaaaaaaatatatgtaattccttgcacacagctggagctatattgtacacctctctttcgtgtgagcgtgacaggggaacggaaagatgcg

SEQ ID NO: 44767 - DNA, 167 bp, Zea mays
  Clone ID: MRT4577_140832C.1
cccacgcgtccacccacgcgtccggtctacagctagggactcgcgcacatcttcgacgagtccggcgtcatctaggtcgccgaggttatctacaacagataaactggccattaccgtacgtttggtataattactatgagcacttttacggaagctgacaatgccat

SEQ ID NO: 44768 - DNA, 635 bp, Zea mays
  unsure (1)..(635): unsure at all n locations
  Clone ID: MRT4577_140833C.1
ggccctccctcncctgtgtgctcctagctttgtgtttgtggcgttggatagctgctgtatctattgttgctgtgcacgtgatgatgcaggttcgttggaaatctggagctctgtggcctgtccatccagaaagcttgccgtggaaccctcggctttcctgccgtgctgccccactccgatccgctctcttcagctggcggtgtctctccaatcagtaacaacaacaagacatcgcactttctgaatggcgtcgtgatcggctcgatgtcaaccttggctcttgccctgatcgctgtgctcggattcctgtggatctgcttgctgtccaggaagaagagcgtcggtggaaactacgtaaagatggacaagaaaactgttcctgacggtgcgaagcttgtgacgtaccagtggaaccttccatactcgtcgagtgagatcattagaaggctggagctgcttgacgaagaggatgtggttggctgcgggggcttcggcacggngtacagaatggtgatggacgatggcacgtcgttcgccgtcaagaggattgatctcagncgacaaagccgcgacaggaccttggagaaagagctggagttcctgggcagaataaggcacatgaatgttgggacttt

SEQ ID NO: 44769 - DNA, 1012 bp, Zea mays
  Clone ID: MRT4577_140834C.1
cttagaggcccttcagcgacgaagcaggcccccaacagaccccatacacctctaccaagaaagcgaggcagggtaccactacgaggcctttacaatgttccactagcttcagaaaacccgctacagtctaggaagcgcagtataggaatccctcgtctgaaaagccatcgcagcaaaatcagcccgacaacctctctataccgaccactcccctattgcccttgcctctttcgtgtaaggtagtcctccactagttttcctaattagtcagccaacacgtcccataccacccttgcggtagcactattttcccgggtggttctccatgttccaattaacaatatgatattatcatgaataatatctaaacaacataattggaacatgatcataataaaacattagtttcccaaaactaggtagagcaaatctacccaatagttcatctgtttgcaaggtggggggggggggtaaacaatgctagggaaacctattaggtcccatcaaattaacctgagcatgtcacagtgattaatagaaacattattaggtaaaaagtagtgatcaagggcacaacttgcctgggactcgagattccaggtatcaggatgatcttcagattctcgtgacctcactactattcgtagcaatacaaataaacatggcataggcaaaattaacatcacaccaaacataagcacaaactgcataacaataatctacgcattgtaacgagctcgtgggttcgagaatcactaaattcggagttacggttgaaaagatatggttttctaaagatttaggagtcgggtacaaaagaaattaagtacataatttttaatttaggtttcataaaaaaataaagctactaggggataaacaatattattgtgcatttactgcaactgaaatggatcaatttggagttaaaatgaattaaatatgaattaaacaagtttctggaattatttttataccaaaaaccattttctatattaatatcccggccagg

SEQ ID NO: 44770 - DNA, 357 bp, Zea mays
  Clone ID: MRT4577_140835C.1
tgcgctccgcatactcatctaatacggccgcaacgtaatctaagaatttcgctcgagcccagagcagcatcttttaggcgctctcgccaatcgtcaatctcgctgatcgacgaatccatggtaccacgtctgattgctctcttgcaacgcttagcgctaatctacaagacagactagacaaagcaaactctcccttcagacacaatggccgccatcgacaagcaactcattgccgcccgggatgctgcctctcagctcatgaagcgaaagaacttcgctgctagagagccctgggtcattgtcgtcttctgcatcgacttcattgacggtgttggctgttagggctctcatccacaa

SEQ ID NO: 44771 - DNA, 288 bp, Zea mays
  Clone ID: MRT4577_140836C.1
gttagctccatgcagctatttataaactgggaaagtttaacgaacagatacattctgggtacggcatgagggttctggagaacatgcgggttaactcacaccctgtggtaaagtccatccccacccacaccattgttggatggaaacaaaccacgaattctaccctacttgttgactttacatgacacggaggtgacgagcaatatccatgaactgtatgcaggaacaggctcgagctcaattttgcgagtggaccaagcgtggacgccataggtcatgcagtgactg

SEQ ID NO: 44772 - DNA, 385 bp, Zea mays
  Clone ID: MRT4577_140837C.1
ccatgagggtgctgctcgtggggctggctctcctggctctcggtgcgagcgccacctgcacgcatacatgcggcggctgcgggtgtcagccaccgacggcggttcatgtaccgccggcggtgcatgtgccacctacggttcacctgccacctccggtgcatctccgaccgccggtccacctgccgtcgacggtccacctggcaccgacggtccatgtgccgccgtcggttgatctgccgcggccaccatgccactaccctactcaaccgtcccggccttagactcattgccaggcacactcatgcccgtgccgacagtcgcatccaagcccgtgccaactgcatggaacctgccgcgttggcagcaccgcgatccttggccaatg

SEQ ID NO: 44773 - DNA, 420 bp, Zea mays
  unsure (1)..(420): unsure at all n locations
  Clone ID: MRT4577_140838C.1
ctaaaanaaaaaagcacaatggtccgatatactgactaactcatgcggaacaacgggcgcacacatccatcacacatgagagctttccggaggccggtcgccggcggcggcggcgacgggtacaggatgcgacggagacgcacgcgcggtcgctctcggccgcaatcgacgcacagaacccgcggtcggaccagcgacgggcatcttacaccaaatgatgagaaaagggggggcttgctagagccgcgccaacgtgcggggggggacggggacacaattcccgggccgaaggcgggcgcgcgcccaccctatttacagggcccgacgtttaccatccacaaccaggacccacttgtccctttttcctgcttgatcgggaaacgcccccggccggtagcagtccactaaagattccaggga

SEQ ID NO: 44774 - DNA, 235 bp, Zea mays
  unsure (1)..(235): unsure at all n locations
  Clone ID: MRT4577_140839C.1
ggacttnccggcgcccgttcaggatccacatgcttcccgagcgagttnttggttgacctcttncttttngaccacctnctaggctcttggtgtagcttgccactctgaccaatcaagttttgatgtntgatntggacgttgagatcctaactgccttngatccctttggtgnggcgcgtggtggggactgtggtgcggntgtggggtctatgggttgctgttttgtgcgcgtgcg

SEQ ID NO: 44775 - DNA, 621 bp, Zea mays
  Clone ID: MRT4577_14083C.1
gtcttctatatcctactcttggctgccttgcacacaaatactccctgtcaaagtacagcacttttgggatattcgttatctcaggactgaccctgcgcactagggagcttggtgcagcgttagaagcttggcctgctggactatatggactagtatgaccttatgtttgttctgtggctgccaaacatgcccttacctattctaatatcattctgtggcacaactataagtatgttggaataaagttctcactgccgtttgatccaaggcataattcaaggaaattccatgccattgattttctggcatttatttcttaccaggagtgctaattgcctttctgattatttttttcagttcctatacttctattggtcatcaatggagcacccagcacctgcaataagtttgctaatgtattatattattgtatataattgcagggatctattttgctgtttacaccctttcttgctcagtttattatgcaagttcagttcttcccccctgaatttatcactgggttagctatgttttgctgcatgccaacaacactatcaagtggagtcacactaacacagcttgttggtggtaactctgcacttgctcttgcaatgacag

SEQ ID NO: 44776 - DNA, 146 bp, Zea mays
  Clone ID: MRT4577_140840C.1
agtcatgcgatagataccccggcccatggcccacccactgtcccggtggcggcccggggttgggcccgccacactcacccactctacgtcacacttactcactacgtgtgtcgctacgctacgctacgctacgctactgttcctcg

SEQ ID NO: 44777 - DNA, 956 bp, Zea mays
  Clone ID: MRT4577_140841C.1
tacttgacccgggccgggaaaaaaaaaaaatacaaaaaaaacacgacaccggcaccaatctgccatcctctccatcacgaagatggcgttcatcagcaatgtcgcagtgaaggcggcgggcgtggccgcgctgcttgtggtcgcagtggtgtcgcctgccgcgcgcgcggcggcggtggcggtggcgggaggggcgccgtcggttccggcgggtccgctggacatcgcgcagctgggcgccaagggcgacggcaagtcggacagcaccccgatgatcctcaaggcgtggaagaacgcgtgcgaggcgacgggggtacagaagatcgtcatcccgccgggcaactacctgacgggcgggctggagctgaagggcccctgcaagtcctccatcatcatccgtctcgacggcaacctgctcggcaccggcgacctcagcgcgtaccaaaggaactggatcgagatccagaacgtcgacaacctgtccatcaacggccacggcaccatcgacgggcagggagccctggtgtggaacaagaacgagtgccagcgttcctacaactgcaaaatcctccccaacgtacgtgcttcttctttctctgtctgtcccctgcttcggaaggtgatgtgatgtaaatcgcaacggcgaacgcgtgcagagcctggtgctggacttcgtgacgaacgcccagatccgcggcatcacgctgctgaacagcaagttcttccacatgaacatcttcgggagcaagaacgtggtgatcgacaaggtgacgatcaaggcccccggcaacagccccaacacggacggcatccacatcggcgactcgagcaacgtgaccatcagcggcaccaccatcgccgtcggcgacgactgcgtctccatcggccccgggagcaagaccatccgcgtgaaagacgtcaagtgcggcccgggccacggcatcagcgtcggcagc

SEQ ID NO: 44778 - DNA, 563 bp, Zea mays
  Clone ID: MRT4577_140842C.1
atctctcgacttggagcattcctctagcgtctgcacccgtgatacaaaccagtcgtgtgtcctttcagctgtgttcacatcgcgcgattgatcgtggtcctgcccagtgcaaagtagagttagttgtttgttatcttccccaccactagtgaccacgccggctaattctaaactctgccgtgaccaaggattcataaggtatttcgttttcgtcttaggtgtgttcctggatcgtttagtgcctgtggtgctcacggagtcctccctttgagctctactgctgttagtagtcaggaacagggtctcgccgccgcagaacgtcgttgcagatcgcttcaccgtcgaccctttgaactgcgtcatccccgaccaatctcgcgcgcgtacggagagcttcgaaggtcagtgatactctctgcacacctaatttgaactctaccgcatggaagctatgggatcgagcttgtcggacccgctgttccaccgtcgtcgtcggtaactgtgctctggtgtccccgcggccgaattaaacacatatctgagttcaccttgggtcagaggtt

SEQ ID NO: 44779 - DNA, 381 bp, Zea mays
  Clone ID: MRT4577_140843C.1
accacgcgttcgggagctcatgggtacgctgcactcgacggccttggttctaggcatgggtcccaaagagacgaacagcgtgggccatggcggcttgcatgcgcaggccagacgcatcagcgacagcgccatctaggagctggctggcggcatctagaggctgatagagatcaagcggagacgaatggagaagctgtaagacctgcttgtcagcatgctggagctgtagaacctgatggacacgccttctgatgacaaaaggggatccagggcatggcctgcaacatcgacgcgttcgaggacgagatcacggatcctggcgcgctgtccatggccttcatacgcaacagggatgcggacgtgatgaggctggataacctt

SEQ ID NO: 44780 - DNA, 646 bp, Zea mays
  Clone ID: MRT4577_140844C.1
cggacgcgtgggcggacgcgtgggcggtacgcgtgggcggacgcgtgggcgaatctgcggtcctctccaacacgaagatggcgttcatcagcaatgtcgcagtgaaggcggcggccgtggccgcgctgctgctggtcgcagcggtgtcgcctgccgcgcgcgcggcggcggtggcggtggcgggaggggcgccgtcggtgcccgcgggctcgctggacatcgcgcagctgggcgccaagggcgacggcaagtcggacagcaccccgatggtgctcaaggcgtggaagcacgcgtgcgaggcgacggggcagcagaagatcgtcatccccaagggcaactacctgacgggcgcgctggacctggtgggcccctgcaagtcctacatcatcatccgcctagacggcaacctgctcggcaccggcgacctcaacgcgtacaagaggaactggatcgagatccagaacgtggacaacctgtccatgaacggccacggtaccatcgacgggcagggagccctggtgtggaacaagaacgtggtgatcgacaaggtgacgatcaaggcccccggcaacagccccaacacggacggcatccacatcggcgactcgagcaacgtgaccatcagcggaaccaccatcgccgtcgg

SEQ ID NO: 44781 - DNA, 206 bp, Zea mays
  Clone ID: MRT4577_140845C.1
agtagcttaccgacacgccggggcactacgacacagggggagtacacgacacagcttgcctcctctatgtctcaaacttagaacatctttgacagttcttggttacacgaacccacccacgcctactacctacactttagcttcccgcccagggtttatcaccatgccattttaggcctggattaccttccattacactgggaatt

SEQ ID NO: 44782 - DNA, 1701 bp, Zea mays
  Clone ID: MRT4577_140846C.1
tccgcggacgcgtgggcggacgcgtggcggacgcgtgggctgccatcctctccaacacgaagatggcgttcatcagcaatgtcgcagtgaaggcggcggccgtggccgcgctgctgctggtcgcagcggtgtcgcctgccgcgcgcgcggcggcggtggcggtggcgggaggggcgccgtcggtgccggcgggtccgctggacatcgcgcagctgggcgccaagggcgacggcaagtcggacagcaccccgatgatcctcaaggcgtggaagaacgcgtgcgaggcgacgggggtacagaagatcgtcatcccgccgggcaactacctgacgggcgggctggagctgaagggcccctgcaagtcctccatcatcatccgtctcgacggcaacctgctcggcaccggcgacctcagcgcgtaccaaaggaactggatcgagatcgagaacgtcgagaacctgtccatcaacggccacggcaccatcgacgggcagggagccctggtgtggagcaagaaccagtgccagcattcttacaattgcaagatcctcccgaatagcttggtgctggattttgtgacgaacgtccagatccgcggcatcacgctgctcaacagcaagttcttccacctcaacatcttcgagtgcaagaacgtgctgatcgacaaagtgacggtcaaggcccccggcgacagccccaacacggacggcatccacatcggcgactccagcaacgtgaccatcagcagcaccaccatcggcgtcggcgacgactgcatctccatcggccccgggagcaagatgatccgcatccatggcgtcaagtgcggcccaggccacggcatcagcgtcggcagcctggggcgctacaaggacgagaaggacgtggaagacgtgcaggtgacggggtgcacgatcgccggcaccacgaacggcctgcgcatcaagtcgtacgaggactccaagtcgtcgctcaaggccagcaagttcctgtacgagggcatcaccatggacaatgtctcctaccccatcatcatcgaccagaagtactgccccaacaacatctgcgtcaagtccggcgcctccaaggtggccgtcaacgacgtcgtcttcaagaacatccacggcacctccaacacgccggaggccatcacgctcaactgcgccaacaacctgccatgccagggcgtgcagctcgtcaacgtcgacatcaagtacaatggatccggcaacaagaccatggccgtctgcaagaatgccatcggcaagtccatcggcttggcaaaggagctggcgtgcatttgaaccaattgactaacatgcatatattatatatataatcactcttcgtaacctctctctttctcacgtactctcaagtctccaccgaatatataatccgctggtttgtattttctttcttctttggatcatcacaaaaccaaccgatgtaattattattagaccgacgcctcacaatcttggaacttattcattatgctagtgtatatctgtaatcccattccataatgttaatgttgatttgtggtcacgtttcaaaaaaaaaaaaaaaaaatttgcggccaaaaaaaaaaaaaaaaaacgaggtttaatccccgtgcattgcaacggaaaacacttgtgtaatcccaggtcattttttttagaacgctttcaaaaaacaacttatatattataacac

SEQ ID NO: 44783 - DNA, 425 bp, Zea mays
  Clone ID: MRT4577_140847C.1
aattcggcacgaggccggaagctctctccccggcggtaggggacggagacggagacggagacggagacggagacggagatggtgccgggcccaccccagttgtcgacggaggcagacatggcattatcttattccggtccaccacgaccttcccgacgggccgcggcggcacacatttgatccccccctcccccacatggcaccgcacctcacccctccaccactccctcctcccgtcctcctcccgtctcgccgtcgcctcctgctcctcctcttccgccgccgacgtcgccgctagctgccgcttttcgccgtccggtcacactagcacagccagcagcagcaaggtttcatcccatggacttcgacccctcccccgtcttcgtccacggggacagtagcggcagtgcctgtccctttgactg

SEQ ID NO: 44784 - DNA, 464 bp, Zea mays
  Clone ID: MRT4577_140848C.1
gggcacaaccaaatgggcggaaaccaaaaaaaagattttaaaagcaaacaaaattcgcagacccgttggggtaaaaaaaaggaaaaaaaggggcggaaacccaagcccaaattgggtaaaaaaccaaaaacccccgggaaaaaaaaccgggtttattgggacccccccccggggaggttttttcgcataaaattccaaacaagaggacttagggccaagccccaaaatgggggggaaccattgggaaacttaaaccatttccttgggaaaaggggagggcccaaaaatattggaggccttgaagagcacatgggaaaagccctttgccttaaagggaccaaaaaaactctccccggggggggggggaaaaacaaaaaaaggttttccaagacagaacaaaagagggtttggggaacccttttgggcccacccgggggggggttaaatttgggttttaaagggcc

SEQ ID NO: 44785 - DNA, 827 bp, Zea mays
  unsure (1)..(827): unsure at all n locations
  Clone ID: MRT4577_140849C.1
tgggtacctcgaggccggccgggacgccacctgcttctgagcttctccacccggtctctctctcatcctcccttctcttccctctctcttctctctaccgtgaccgcgccaaggatcaagcgcacgtgacgcccgacaacccgactgcctcgacccgcctgcgcccaggaagacccgacgccgccaggcgacccctcacctctctcctcccttccctcgggaccagggcaacgcacaacgcgccggcggtgaccagtagcccgctctggcaccagctcggcatctcctcgcatcgcatctcccctgctaggcctcctcatcccgctcggaagatgattcagctggtgcatgcgaggaacctattgtgctgaaacaaattaccatctcaagaggtcctagacgctcctcaaaggattcaaagagcctctacccaaagaggagaagggagaggatcaatgaaaaactaaggacgctacagcagctaattcctaatggcaccaaagttgacatgagcactatgctggaggaagcagttcagtacgtcaagtttctgcagctgcaaataaagtgttcagcgctcagggtgccttggaagtacgctagcttgttgtcatgaagaaatcattcaagttccttccactgaagttgatgcataaggctgcaacaccatctagtggagggtgttctggacaaagaaagcttgtaccttanaacaggaggatacaagaagctggagtggttgtctgaagggctttgaactgcttgaagcattagtgtagctttggtgcttttgtgactgatcagctctggagcagctagaatgatat

SEQ ID NO: 44786 - DNA, 764 bp, Zea mays
  Clone ID: MRT4577_14084C.1
cttggttgggtttatgctgttactaagtatgagcctgtaagtcgctacttgcagagagcaaaatatgatcatcttggactggtccattcacttcataggctcaccattcagccgcatgctttttatataagcagaacgtcttccaactgagatcaaacataagttttatgttcttgctaacaccggtacttcttcattcaccttctaatttgttctaaaaaaacaatcatattctaatactctgcaggtagctagcatggcaaatgcagtatatggtttgtgggcaaaataccgtatgcaaattacaggtcgacctccgctagaagagatcatggcatcccgaagagctgcagtaagttgtccttctgagttctgatcatgagctcgcttcatctggctgaagctctgtaacaatcatactggttgcatgcgagcgaacatttcattggcttcgttttactgactgctttgtccttccgcagggcgaatgtaaagatgacaaagtatgcaagatgtgagcataaagatgttatactgtgctacatacctcgcctctagccatgctttatataggctaaggctcgtatatatggctttaacagtacaaataatcgcagttgtattagaaaaaaaaaggtgaatagcttatgtaatggtttatcaaagtacatatgattgtacatttgtatgtacactgtactggttcacgcatgtaaaaacgatccaccacagatcgagctgaaaaaaaaaaaaaaccccaaccc

SEQ ID NO: 44787 - DNA, 1757 bp, Zea mays
  unsure (1)..(1757): unsure at all n locations
  Clone ID: MRT4577_140850C.1
acacnncttcttaannaaatgcgaaaaccattatatttacttgtctctgcaatcatgttgatgacaatgtcatgccttttcctcatgggtactgtgtcttacctatttaagggacgatctctgcgtcaagctccattcagagtcatatttggatcaacgctggcaccttgatgaggttctcgttcttgctgggatgtttctctatgtcatcagtcttggctcaagttcttttgtggaagaagagcagtatacatggcacttcctcacttctactctgtatctaatatttctggccaaggcagttcagtcaatgctaaaaggatcaaatccaacacttggtcataaagcagaaggaaataactttgacagaagtagctttttctatgctacaagctatgaattaacaccaggcaagagaaatggttacaagttatgtactatccttattgttcttgttgctggaagagttataagagcttggcatcaaggtggaatcaactgggttcactttcctgatatttccaagttactggcgcaagctgacccttctgttgtaaagtctcttcagattatctcagttcttgcagttgtggtattgttttcaatttcactcactttactcagagcaagaccagagtttgttataggagtatggttgacccacatttcttgtggatttttggtcctactgcatgtttggggaaatcatattggtacttcattaccaattaaccataccacagcatcggtagctcgacaattttatgtcattgctagtgtttcagtatctgtcactgttcttgcttcaccttgggtatttccaatattttctacggaagcaaaatcagcatcctctggttctagtcctgtaaaggcaatacatggcatcagaaaatcacttgttctcactggaatgacatacacagcgttctggggccttctgcaattgcttcttcaacaaccaatcaatgcaattcctcttttcctcattttcttgcaaacagtctcgagtgcagttcatttttctctggacaaaacattacataaacaatgggtacaggttgtggcaatgcatttcttgggaatggctggtcacttcggtcttgggaatacaaatagccttgccagcattgatgttgcgggagctttcattggcatttcaagttactccacagttctttctggtatactgatgtttatgataacatatgcatcacctctcatgttataccttgggttggtccttcatgcatcggtgaaagatgtcgatgatgcctccaatctacggcagctgaaatggagctatattctagacaaaattgtcacattgccatgtttgtttcctttgctcatcaattctcttgcgttgacttcatacaccattgttttgctagccatgaggaatcacttatttgtttggagcgtattctcaccaaagtacctctatgcctgcgcagcaacagtgtgcacatatgtcggagtatccatcatagctatgactgcattatacagttgtgctgttttcaagttcagggcgagaagctacagggataaatccctgtaatcagactaatgattagctgttctgatttaatggacatttgtaagaattcagaaagggagggtatcttggcctattctctcgttgtacaacatcgtactcacatgtttccagaccatgcaatccctgcaagggcctttacacatttccaaaattttttgtaaaaccctgacgttacccaaccttaaaaagcctt

SEQ ID NO: 44788 - DNA, 757 bp, Zea mays
  unsure (1)..(757): unsure at all n locations
  Clone ID: MRT4577_140851C.1
cattgggtacctcgaggccggccgggctcccacccggcctctctctcatcctcccttctcttccctctctcttctctctaccgcgaccgcgccaaggatcaagcgcacgcgacgtccgacgccccgaccgcctcgacccgcctgcgcccaggaagacccgacgccgccaggcgacccctcacctctctcctcccttccctcgggaccagggcaacgcacaacgcgccgacggtgaccagtagcccgctctggcaccagctcggcagctcctcccatcgcatctcccctgctaggccttctcgtcccgctcggaagatgattcagctggtgcatgcgaggaacctattgtgctgaaataaagtaccagctcaagaggtcctagccgctcctcaaaggattcaaagagcctctacgcaaagaggagaagggagaggatcaatgaaaaactaaggacgctacaacagctaattcctaatggcaccaaagtatgctcttttgtttcgttgacatgagcactatgctggaggaagcagttcagtacgtcaagtttctgcagctgcaaataaaggttgggacaaaagtggctgcagtttccctcaagacaaatactacgactcacaaaattttgggggtgctaacaaaaggggacacacagattggatctggaataacaggagcctgatggaagcatngagatttttaggctcctctgctcctggagctggacatgatgggccaagtcatttatattggggct

SEQ ID NO: 44789 - DNA, 1071 bp, Zea mays
  Clone ID: MRT4577_140852C.1
cctcgaggccggccgggacccggcctctctctcatcctcccttctcttccctctctcttctctctaccgcgaccgcgccaaggatcaagcgcacgcgacgtccgacgccccgaccgcctcgacccgcctgcgcccaggaagacccgacgccgccaggcgacccctcacctctctcctcccttccctcgggaccagggcaacgcacaacgcgccgacggtgaccagtagcccgctctggcaccagctcggcagctcctcccatcgcatctcccctgctaggccttctcgtcccgctcggaagatgattcagctggtgcatgcgaggaacctattgtgctgaaataaagtaccagctcaagaggtcctagccgctcctcaaaggattcaaagagcctctacgcaaagaggagaagggagaggatcaatgaaaaactaaggacgctacaacagctaattcctaatggcaccaaagttgacatgagcactatgctggaggaagcagttcagtacgtcaagtttctgcagctgcaaataaagggaagacgatgaagacgatgaagacatttttttttcaaaactaaagcatttatttagggaagatgatgaagccatcacgtttggccgtcccgtactttttcctctgcacttttgttcagcgctcagggtgccttggaagtacgctagcttgttgtcatgaagaagtcattcaagttccttccactgaagttggtgcataaggctgcaacaccatctagtggagggtgttctggacaaagaaagcttgtaccttaaaacaggaggatacaagaagctggagtggttgtctgaaggcttttgaactgcttgaagcattagtgtagctttggtgcttttgtgactgatcagctctggagcagctagagtgatatagttgtgggcttttgaacaatagttggagtgatagttagagtgatatgaaacattagtgatctagttgtgaatgatattataattgtgatgcttttgtgaatatataaattgtggtgcttttgtgtttaaaaaaaaaagaaaaaaaaaaaaaaaaaagcggcc

SEQ ID NO: 44790 - DNA, 196 bp, Zea mays
  Clone ID: MRT4577_140853C.1
ttcactttatcttctaatcatttttctacacgtgtcaacttccaattataggggtttaacacccttgaaaacatataaccacacattttctttgctttttctccaaaacacatttattatacttcaacccacttatgactaatgagtatgttttttgttttttacaattctttcacgtacaacgccaccactattt

SEQ ID NO: 44791 - DNA, 643 bp, Zea mays
  unsure (1)..(643): unsure at all n locations
  Clone ID: MRT4577_140854C.1
aattcggcacgaggcacgtgaggttgacaagcaacgggtgacttagtccccattagtgatcatgcaaaccaaaaagggtgcaacagcagcagtgggatcttccctgtgcaactcaacgggtgcacctacaacttgatcgcagactaaacagtgacaacgagtgtccaacgcctggcatgaagaggcgggcgcctaaacagtggcgttgcccctggtggggataaatctctccccgggggtgcgtggtgcagaatctatcgctggctagggttagatctaaaccgaacccgggcaattgataccatggaggaaaataaaattgttgtaattggatggatgcattgcattgagtccttaggtggtttatatagagtacaggactaggaaacaaggcaacccatggatacatatgatagtctacgatacacaatatctaaactaccaaatataacagattttatttgacttgtagcgtgctagagaagtatttttcaaggagtgggatcctcaacgaaatggataccctgacagcagtaatgctgacaaattgagaaatttcattaagcatgtgtatgtggaacggagatacacaggagaaagaagtactgataggccaccaagggcaaaagatgacanggatgag

SEQ ID NO: 44792 - DNA, 476 bp, Zea mays
  Clone ID: MRT4577_140855C.1
cccacgcgtccgcccacgcgtccgctctcctcatcctgctgctcgccctctccttgccaagtccgcaggagtcccgagccccctcctatgatcattgcgctggacgacgaggaggtcgaccaagggtacgggtacggcgccatgtcgtcggagctggagctctgcgtggcgcgcatcagggacctgagggcggagctggagttcgagcggcgcatgcggcgcaaggcggaggcgctgagcgaggcgctggccgcggagctggccgacgagcggcggcggagcgaggctgcggaggccgagtgccgggcgctgcgggaggaggccggcgccgcgcgcgcggaggcggagcgcgccctggagggcgtcgaggaggagcggcggatgctgcgcgtcgccgagctgtggcgcgaggagcgggtgcagatgaagctcgccgacgccagggccgcgctggacgagaagctgcgggagatcga

SEQ ID NO: 44793 - DNA, 152 bp, Zea mays
  Clone ID: MRT4577_140856C.1
acgctctcactggcgatcacgcgcagcgctacacaggaccggccacactccctctgtcattgagcctggtagacctcgctgaggctgacgctgtgatgttactacgggaccgcatgcactagcgtcgataaagtccctagatgatagcatgt

SEQ ID NO: 44794 - DNA, 366 bp, Zea mays
  Clone ID: MRT4577_140857C.1
atggcatttgagaacaagtctccaacattggtgcccacctccggtgtactcacttccaaaatcttcggcaaagcatcaaccttcgtcatgccaccgaagaagataatagcgccaggggctgcactacagccactggacacaaacgaggagactctttctctccgagaggccagaagccaaaagagaaaggccgccagtccaacacttcaggaggaggagttggaccaggagatcagggacctagaaatctttcaccagcaggtgcaaaggaaaaaagagaagatggctcggctggccgaccttcagaagaagatcgatgaagctactgaggaagtgtgtcatcttactcaagatgatcatgattga

SEQ ID NO: 44795 - DNA, 403 bp, Zea mays
  Clone ID: MRT4577_140858C.1
ctgggctcgttactatttttggggggttaaaaagtgttgtacgaacttaaataacgcatttggctttttaccgcaggcaaccagggcaacaagggacaaaggggatccggggcgagccaacacgcccgggacaaaaaacctgcccccccacaaaccaaatgaacgaaagacaccgggtacacccccggcgtggacgcaccacccaaaaaaaacccaggcgctccttttgggccggaaaacaaggaaaaccgtgggggacaggaagggagccctccgcgggaaaacacgctgcggggcactccaaacaagaaaggcggttcgccggagggggacgggacgcccaaggagaccaaaaaggggggggggggggggaaaggtttcaaccaccccggggtggggggga

SEQ ID NO: 44796 - DNA, 472 bp, Zea mays
  Clone ID: MRT4577_140859C.1
aacagggggggccctaaaatacacggaaaaaggcattccatttttacagggtttttttaccggtttcacccccactaaattaacataaaatttacgctataaacccccggggcgggccccccaaaaaccccaaagggaaacaaaaggtacaggcccacgccggaaaattaagcccagggaaggtattcgcccgggcacaaacaaaaaaaggggaggggttttcccccacgttttccagggggggagcggaaattcaggccacaaaatcatgcataaaaggggacgggtcaaaccggtgccgggggtgggggggaaaaaatggggccgccgaaaaaaaccctaaaaacgggggggcaaccttaaaaggaggagctggggggttgaacaagtctggggctttgaccccggggaaacccggctgaaggtttggggggaccggaagggtgttctgggggggctgaaagcccaacgt

SEQ ID NO: 44797 - DNA, 491 bp, Zea mays
  unsure (1)..(491): unsure at all n locations
  Clone ID: MRT4577_14085C.1
catgtttcaaaaggggagtcagtctttgcaaataaagatacgcacgagcagtcattttggtggccagtcagaaaagttgccagtgttggttgctgtggttgagcagcttggaggagcgttcggggagtctggatttctggtcatcccttgtgttgccgcacacattaaccagatcattattgattctatcatagtaaattggtggcgccagaaggatcaacaatttacttctgcaaagtaacttcagaattcaatttcggtgtgtaacacatggaatcggtcaggagctcttaatgtttatctcctgacgccaaagcaaaatgagatctacgtgttcagttatttcaaccgaaagtagtcatatcgagatgttttacacaaaaatgccttttcgtgcctgatttgttgaatacaataggcctacaatatagagtataaaaggatgtatctctaaaagaaggcatggaataacagaaatacctccaccgnat

SEQ ID NO: 44798 - DNA, 403 bp, Zea mays
  Clone ID: MRT4577_140860C.1
gcttgggttctgtagacgcggacgcggtcgccttttttttttgcgtaataacatttgagttatagcttggagttacactctttaggctttggtacacaccaaggccaatgttccttcttaaaaaaaattacagatgacatttgtacaagctgaatgtacataattgtagcacagttacatggccaataacatcagagttatagatttcatactgctatagtaaaatggcgataattttaaactttaacaactaaaaaattgataaatcgggattagcacaaaactactatggaacaaacattttggattgcggaaagaatattaacagaaaaaaactacggcaatctatgaataacattgggctgcagcatatgcttacgctgaaacagaaaggcgcattctt

SEQ ID NO: 44799 - DNA, 375 bp, Zea mays
  Clone ID: MRT4577_140861C.1
gttctccatgcactcttattcaagggtaaatggttgggtatattctatcatttcaagtctccttttaccgcattttcccatatcaccttcggtctttccttgcctctcttctcattgctatcgtgccttaggatcccactacacactggtacctcaatatgtcttcgtttggatatgttcaaaccatctcaaacggtgttagataagtttttctgcaattggtggctggtgctatctctagtctatcacatatatcatcgttccggattcgatcccttctttgtatggccataaatccaacatagcatatgtatttccgcaacacttatctgttaaacatgttgtcttttttagactgacattctgcaccataca

SEQ ID NO: 44800 - DNA, 392 bp, Zea mays
  Clone ID: MRT4577_140862C.1
gtaagctagaatacttgaaatgcaaggttgtggagccgtggttcgagatcgttctttacctgacgtattcttgcttccggagcggaaagaaccagtgtgacgagatcatcccctcctagcagattatccggactataccctcgtacgtgtgcatcaccgtgtccgagcggctgatcggagatggtgctgataacgacgtcgacatgaacctcgtcatcaccctctttgatggcatatgtctttttgacaaccagatcatggatggctctgttcacacggatatgaacttctgctacttgctggatattccagggcttgtagagaggcctatggtacgttgatcagatcagggagaggagaaacagtttgccatcgaagacatatcactctat

SEQ ID NO: 44801 - DNA, 1353 bp, Zea mays
  Clone ID: MRT4577_140863C.1
acgcctgcaccattggggccctcgacgctgtgcgagccacaccgcccgcacaccccaccggccggccacacaggccccgacagcgactcgaagatgacggccgggcagcttctgcgcaccgagccatcagcccagccccagcgggtgcgccacagcaccccgccggcggcactccaagcggacatcgtgccgtcgtacccgccgcccgagtcggacggtgacgagtcgtgggtctggtcccagatcaaggcggaggcgcggcgcgacgcggacgcggagccggcgctggcctccttcctctacgcgacggtgctgtcgcacgcgtccctggaccggtccctggccttccacctggccaacaagctgtgctcctccacgctgctgtcgacgctcctctacgacctcttcgtggcgtcgctcgcggagcacccgtccgtccgcgcggcggcggtggccgacctgatcgccgcgcggtcgcgggacccggcctgcgcgggcttcgcgcactgcctcctcaactacaaggggttcctggccgtgcaggcgcaccgcgtggcgcacgtgctgtgggcgcagggccggcgcgcgctggcgctggcgctccagtcccgcgtcgccgaggtcttcgccgtggacatccacccggccgccaccgtcggcaggggcatcctgctcgaccacgccacgggcgtcgtcgtcggggagacggccgtcgtgggcgacaacgtctccatactccaccacgtgacgctgggcggcaccggcaaggcggtgggcgaccggcaccccaagatcggggacggcgtgctcatcggcgccggcgcgaccgtcctcggaaacgtcaggatcggcgccggcgccaaggtcggcgccgggtccgtcgtgctcatcgacgtgccgcccaggagcaccgccgtggggaaccccgccaggctgatcggcgggaagaagggcgaggaggtgatgccgggggagtccatggaccacacctccttcatacagcagtggtcggactacatcatttgagcccgcaagctagaaaaaaaaagagctcgtcttgctactgttgttatactgctgttgcgttttctgtgtatgtgcgtggatgtgttagctgtatgctcttgttccagtgaggtgaaccgtggacatgctggtgtggtgtccagaaagatatgctcaaagttcgctctgtaattttcgaagcagatgaactgtgttactactttttactctagtaaaaactgtttctttggctcaaaaaaaaaaaaaaaaaaaaaaaaaaaaaaaaaaaaaaaaaaaaaaaaaaaaaaaaaaaaaaaaaaaaaaaaaaaaaaaaaaaaaaaaaaaaaa

SEQ ID NO: 44802 - DNA, 179 bp, Zea mays
  Clone ID: MRT4577_140864C.1
tgaaaacgaaaattatacctctctcttgtattattattgatatatttttgtgggtacgaaactcgatcagatgaaacacatccgagttagatgacgcagtcagatgactgagtgttggtgtctgacatccaaggtgaaagatgtatacgtctgcaacgtctatgtagatgtacttaatt

SEQ ID NO: 44803 - DNA, 276 bp, Zea mays
  Clone ID: MRT4577_140865C.1
ggggggggtttttttttttgtggggttttttttttttttttttgggtaaagggaaaattttttaaagcattaagttttcaacacaaggtttaaaaatgaaacatgtgtaaattctataatatttaaattcaaaaaaaagtgcgttgggttaaaataaaacaagcgaatctggagttcgagcttccaaaaattaaaaggggcgtgggtcatcccaataggaaatcgctccattgagattacggtaatttggtggggggggggggggcatatttgatt

SEQ ID NO: 44804 - DNA, 567 bp, Zea mays
  Clone ID: MRT4577_140866C.1
ggccgcgggttttttttttttttttttggcacacgaaacgccgaatttattgtgtttgctgttagtctaaagacattcatgaatcatatcattaccctccaactcctgatacacgtttctgcagatgcgtttcttgcgacgcgtgctatcctaatccgtggtcacaccaccgccagccctggccatcagcaaatgcctgatttactggaaatcgttgggccagcacttctccttaggccaaagcttcgcatcgtgcgtctcagcgtgcacctcaagctggagcttgttcgtgttaacgatctccttgcggcagttttggcagatagaggtgggcttaggaggcttgacagggaggccgttggccttcacgggagcacgagttccagcggcatcagcccgcttgtgctccttgtttcttctgtccttcttgctgataggcattttgagagtttgggtcgggttgagggagaaagtttgaagtggtgatcaagacgtagggtaggagatttaatgacggtagaaaaagtcgagaagtttgcttgaataaatattcagggtcccggccgg

SEQ ID NO: 44805 - DNA, 380 bp, Zea mays
  Clone ID: MRT4577_140867C.1
aagctcggaattcggctcgagggggtccgacaagattttttttttttggccgagctttcatggagaagaggcttgctcgaaaaatggaaaggaaaggagctcacctttctggggacaacatgacagcctacaacgtggtcgagaccggccagagagcctaggcatcaggaaacgagtctgaatacggcttgcataacccaacgaccttagtgaaggccatttaaaaggcaacggatggagggcttgctgatatagggggaagcgctaatttgtccagaccattacgaccctcgcagatcactcggtgtggggggacttgattaatcagaggggggaactagcggtcctagaacactgagaggagggaccatgccttggaa

SEQ ID NO: 44806 - DNA, 184 bp, Zea mays
  Clone ID: MRT4577_140868C.1
ttgttttttcacttatcttttgggttttttttacatgttgggcgcaactttattttttcattaacccaaacagaaagagggggctttctggcagaacaaaaacaggttatttcccctgggccaggggggtcctatatcaactttttttcaagagagaaaacccccaaattactctgaaattttt

SEQ ID NO: 44807 - DNA, 1483 bp, Zea mays
  Clone ID: MRT4577_14086C.1
ttccgagatgataacccaccatccctccctgctccgcccatctgtcctcaccctccgtgccgacgtcctccgtcggcgcccaacactgcacgccgtcgcctccgcgccgcctctccgattgtggtctttgcgcgccaccaccggtggaacttcgcccgtcagtggcgatggaggcaaacgcgctgtgccgcttcccacgcgtgggcccgccctgctcggcttcgtgcgtagcaacttcctcccgcttgctctcattggtgggatcatattgggtcttctagatcctactcttggatgccttgcacacaaatactccctgtcaaagtacagcacttttgggatattcgttatctcaggactgaccctgcgcactagggagcttggtgcagcgttagaagcttggcctgctggactatatggactagtatgaccttatgtttgttctgtggctgccagacttacctattctagtatcattctgtggcacatctataagtatgttggaataaagttctcactgccgtttgatccgaggcatagttcagggaaattccatgccattgattttctggcatttatttcttaccaggagtgctaattgcctttctgaccgggtttttcagttcctatacttctattggtcatcaatggagcacccagcacctgcaataagtttgctaatgtattatattattgtatataattgcagggatctattttgctgtttacaccctttcttgctcagtttattatgcaagttcagttcttcccccctgaatttatcactggtatatgggtcaagcacatgcctgcttttcatgatggattttctgtcttcattccaccattttttgttgccatcgattaactcatacttttgtgctccttatagcttgtttttttggcatcttacagggttagctatgttttgctgcatgccaacaacactatcaagtggagtcacactaacacagcttgttggtggtaactctgcacttgctcttgcaatgacagttgcatccaatttacttggcattataattgtacctctttctcttgcaaaatacattagcaatggtgttggggtttccttgcctactgagcaattattcaaaagtcttgtcaccagccttctaatccctcttaattatagggaaggttgctcgagaaacctcaaaaggtattgctgattttgttgatggaaatcgacaaggcttttcagttgcaagtgctgttctcctcagcctagtatgtctctaatttgaacatatgccagttgacatgttatttacttgctctgtagctcccttgatttgtccttcagcatgtcatgcttttgggtccatatatatagtgcttccagccccattacccatcccttttggcgaagcggggacaagagggaaactgatgcatgcataaacctatcctggattaagtttatcatcagcgagtatttgggctctgtgttgatcccatcata

SEQ ID NO: 44808 - DNA, 639 bp, Zea mays
  unsure (1)..(639): unsure at all n locations
  Clone ID: MRT4577_140870C.1
ggcgattgggatcctcgaggccggccgggaacggcgcgcgagcgacgcggccacgccacacaccccttgctttcctccacgatgcggtcggacaccgcgaccacccgcatggcagcctccgtggcctacctgtccgctctccgcagcaaggacgccacagtctccgcgggtccgagccaacacattcttgtcgtgtacacatcgtcgtcggagaggaaagtcgcgagctttcggagcgggaggcaggatcagcgacctagcggaggagctcggtcgccgtcgtggccgtggacatccaactagatgggggcatcagaacaggttgggcaccttcacctccagcctccaggcactgctacttcgccgaaagccgcccgttcatctcacacctcctatggatcgatttgtggatttctggcttacacagcaatgcagtgggcaatggcactacgacagacaaagagaagtgcaagagagaagtgggaggtcgcctccattaatgcctggcctcttgcgagtagcactctagtcccactacgcttcaacctgctaggagctcaaatacaattnaatcgactggttcccacncattttaagaaagtatttaacaggaaaaaaaaaaaaaaaaaacccgcggcc

SEQ ID NO: 44809 - DNA, 403 bp, Zea mays
  Clone ID: MRT4577_140871C.1
cctgtccggactgataggagacgccgtcctgtccgtgctatttgtgaccatgaggcccttttagaagagctggtaccgtaggatcaacatattcctgggcggtgactgtgtggcttcagctcgtgtggtcggtggactgacgcgcaggtgttaaggttcaactggatgcagatgaggatacttacagatcaacgattcaagagcatgcactcatcatatgaaatcatcgcagtgatatcgcttggctcatgggatggatataggccgagcgttcagggaggcttggaagtacactcgctgtcatgacgaattaatccaagttccttccagttcatgggtgggcactgtggcaagcagagtacctcttcttggacaggagctggggccaggatgaaaagacact

SEQ ID NO: 44810 - DNA, 232 bp, Zea mays
  Clone ID: MRT4577_140872C.1
aaattagggagggtacacattcattacccatgttttatttgcgacaattaaattccaacaagcataatacccaccgaactgacacatagcttgcataatgtgttcattcctttctaggaggggggcaacaccctttttcaattaaaaaacccaaaccaacttcaaatgcaccaacccagatttggaatatgtatccattattattccgcttgtttaacattacacactattt

SEQ ID NO: 44811 - DNA, 225 bp, Zea mays
  Clone ID: MRT4577_140873C.1
tacgcgtgcgcgaacagcacgatatgctagtgtaaacaaccatggttcttgctatgaatcgtcatgacagaaagggagccctaaagttcttttggtgacctacaattcaatgcatcacaatttataatagtcaacaaaatcataatgtttgtcaaattgctttgtcatcgtcagaacaatttttacagttttattgccaaaattttcttagcctatgacaaaata

SEQ ID NO: 44812 - DNA, 302 bp, Zea mays
  Clone ID: MRT4577_140874C.1
aacaaaagtaatactactgtttatcttgatgcaacttttgcccggtttgctcattcttcacgaaaaaccacttggttttgtctcacatgctaacaacaggcatttatactttccgaacgaaacgacgacacacgcatggtggactttctccaaaacgggggacaagcattctctgtcgaccacgacaagaacattataattggttcgaacacacacgctctctatagggacggggacaagatgggggatagaatgtgacacatacgttcgggaccctgtctttaccctggtgcaaatgcaca

SEQ ID NO: 44813 - DNA, 814 bp, Zea mays
  Clone ID: MRT4577_140875C.1
atgtgaaccaccaaatggcacatatgttcctaagagccatggtaattacagaggataaggtacaagttatccagcaagggaaaaaaaaggcgagggacaactcctaattctttcagagtatcttttcccaaagataactgaagcaagcaacaagtgacgggcacccagctggcagccagtcctgtaattctggctctccgttccacagcatgtcaatgacgaaggaaacactaaatctaagagctaatatggaattcccacacacacacacctgttataccatgctacagctacttgaaccttttttttcacagcactaaatgggtgaagagtggacaaaggatgtggcacatggtggaattgcaactcccagtaaagaatcggcaaaaggttgtaaaactcaggggagtagatcaagaagagattgccaaactgacagttacagactttacatgtaccagccgggatgcacgctatcgcttatgggcgtgttcggctggctgcaagccgacactgttgcagctgtttggattgctgcagctgcaatccatagagagaaaaatactgtagaagccgcagccggattgcagccgcagcaagccgcagcgaacaagctgtatggtaccctttcacggcagcattaatgcggaagcccaaagggagagactatggcaattggcaccataaatgctccacacgcgttgccagcaagggcagatgcatcgtcacactgcactcttatggtttctggtcgctcgctctattgtgagggtttccagtcatactgcatgttattgaagcttgttcctgatct

SEQ ID NO: 44814 - DNA, 675 bp, Zea mays
  Clone ID: MRT4577_140876C.1
ctttctcgctgggccgccgcctccgacatcgttccttcgtccccacgagcaaccgataatccgccggcgctgagatggtggattatcaggatctcctatctggcgacgagctcctgtcggattcattcacctacaaggagctcgagaacggcgtgctgagggaggtcgagggaaagagggtcacccaacgacctgttgatgtggacattggggccagtccgtccggcgagggtggcgaggaccaaagcgttgatgacacagctgcgaatgcgagggatattgctgacacattccgcctacatgagcaacctccttttgacaagaaatcctttgtgttttacatcacaaaatacatccagaatctcactgcgtgcgatgtagccacagaaagcgtgtgacttcaagaagggtgtgtagggtgcaaccaagtttctccttaacaagctgaatgacctccaagatccttgttggtcgagaccatgaaggatgatgcgtctgtggtattcgcctattacaaggatggtgccactaatccgacattcctctattactctcatgggcttaatgagatcaagtgctaggcgtgcgctgaaattagttacccatgttgggtactatctatgtactattgacatatccaaaactatagactgccctggctgaattgaactcaaa

SEQ ID NO: 44815 - DNA, 139 bp, Zea mays
  Clone ID: MRT4577_140877C.1
ctttttctttttttttttagcatcaaatattttgtctatcttcgattataacgtcaaaacaaacgttgtgcaaggcattgaggatttcatgggcaacattgtttacttgtgtccgaatctatctaatgttcataatttc

SEQ ID NO: 44816 - DNA, 2545 bp, Zea mays
  Clone ID: MRT4577_140878C.1
gcacatatgttcctgagagccatggtaaattacagaggataaggtacaagttatccagcaagggaaaaaaaaaggcgagggacaactcctaattctttcagagtatcttttcccaaagataactgaagcaagcaacaagtgacgggcacccagctggcagccagtcctgtaattctggctctccgttccacagcatgtcaatgacgaaggaaacactaaatctaagggcatgtacagtggagagacaccaaaacagttctccaaacacaagagacaactaagagactctattatacaatggagtgtctataaatgtagtctactaataaatacagaattaaatgtatttgtacaacagcagattgatagaacagacgacaaattcgtacagtaggaagtgagacgtctattactacttggtttacgagccagaggcgtctcttcacggagagacggctctaagatttttttgcaaatacaccccttaaacagcttaagagcctccacattaaacaccactgtacatgccctaagagctaatatggaattcccacacacacacctgttataccatgctacaactacttgaacctttttttcacagcattaaatgggtgaagagtggacaaaggatgtggcacatggtggaattgcaactcccagtaaagaatcggcaaaatgttgtaaaactcaggggagtagatcaagaagagattggcaaactgacagttacagactttgcatgtaccagccgggacgcacgctatcgcttatggtaccctttcacggcagcattaatgcggaagcccaaaggggagactatggcaccataaatgctccacacgcgttgccagcaagggcagatgcaccgtcacactgcactcttatggtttctggtcgctcgctctattgtgagggtttccagtcatactgcatgttattgaagctgttccctgatctaaatccgcccagcagctggcttcctatgtcatgctgctgctgatgttgctgctggtgctgtagctgacccagctgcgataggtcgtgtgaaccgtggttcattcccatccttgcacccatcgccatcggattgatcgccattgccgtcctcatcccatgaccgaacccgctcatggcgccaaatcccattcctcctatccccgagttattcgcggcagcattgccgagtaagcagttaaccccattagcaccatgggttagtccgttcggtgtcttcgtgtcattccccgagtggccaacaccattcatctgcgacgacatcaggtcttgcaagatcttctgaaccgagctttgcgagtcacttggctcggcctcctgaggccgagcagcaggtggctgcatcggaggtatgcttggtgatgtcgttggggagctcagctgatttgtgttttgaggagcatgcatcatgctattattggacgttgtcggtgctggggaagggaaagaggtaggtgggtttgagtgcagtgagcttgtagagttcaccttcggaatagccacattgcctccattatatgggccaccattagtgccgctcattggatggtcttgtctcgaattcattgaattttgcaggagtccaacaactgatggtgaaggcgcagatgtagaaggtgcacaactgtgagaattatttgatgtcacgtcaccattggcagaggcagaaggctgcacaccagccataggagcagaattctgaccactctggtttgaattctggggaatggcctgcttctcctcagtttgctgctgctgtggttgaatagtactggcccctgaaggtgtcctccgtggaaagttatgcaggctatcaatgggtcctgatccagtctgcctgctgtgatcaatcaaatccttcatacagtttacaacctcggcaatctgaaggcagcgaacatatcgttttgtgtatcctaaatcatttactaaaggaacctccagtgccttggccaattgacgggcacatgcaacaaacgagttgcaattattctgcatgtcctgagctgacaaactcgtcgaattttgtgtggcggcctggtacttttgtacagccgcgccaagattactaacctgtggtattatagatctccgcggaacaagttcttcatgacgcctagcacaaaactcccaagatgcaatcttaaggtctggattaaaaactatccttagatgcccctctcgtacaacacgcaattgctcaaagacactttcttggattgcttttgtgtaatccaaaataatttgcccagacgtattctgggactcacgtggcatgtcgatgtacaaaagttcttcaagtgtaccactggcatatttaatttggcataatcgtggtagtacctcaactgttgtttcaaaaccccggccaggtttccgattacaaatctcacagtgccatacatcctgagggaaaactccagtagtttgacgaccacttccataaagcgagacacaccacctctttttagcgtttggagcaaaatactcattgacaaagtttcaacagtaccccatgttctcgtgc

SEQ ID NO: 44817 - DNA, 417 bp, Zea mays
  Clone ID: MRT4577_140879C.1
ctgactcatgcgacgccctccaggccgtgctcaatggcaactcctctaacctcttactgagcgtctacaccatgggcctagatgtatatacaaaattacatcaactacatacataacacagtctacaccaccaagaacgagtcacctgacatgctcaccacgcacactactcacccagttagcttctaaccacacgacaagtactatcgccagcggtacctgttgaagaacacatttgtacttatgccaacacagaatccagcactgaactactgaagcttcaactttccaaccatggatgtgcaaattgtgtaactgattgatgcttggttgctgcaatgtacaaatagtatcttatgaaaccatttaaacactgctacgcactactatgacatctcagcgcatttaagcactata

SEQ ID NO: 44818 - DNA, 2089 bp, Zea mays
  Clone ID: MRT4577_14087C.1
gccaaggtcccgaccccttcatcttcgtcctctgccgacgctaaatccatcggtgccgtggccgcgctcaagctctccgatcgcacctgcaccggcgtcctcgcctcccacccgctctccagagatatccacatagagtctctttcattaacgtttcatggccatgacctcattgtagattctgagttggagctcaactatgggaggcgttatggtttgcttggccttaatggctgtggaaaatctactcttctcactgcgataggctgcagagaactccctatacctgaacacatggacatataccatctcacccatgagatcgaggcttcagacatgtctgcactacaagctgttgtttgttgtgatgaagaaagagtgaagttggaaaaggaagcggagattttggctgcacaggatgacggtggtggtgatgctttggatcgtgtatatgagcgtctagaagctattgatgcatcaactgctgaaaaacgtgctgctgagatattatatggtttaggttttaacaagcaaatgcaagctaagaaaactcgagatttttctggtggttggcgtatgaggattgctttggctagagcactcttcatgaatccaacaatccttttgcttgatgagcctacgaatcatcttgatcttgaggcatgtgtctggttggaagagacgctaaagaaatttgaccgcatactggttgtcatatcgcactcccaggactttctcaatggtgtgtgcactaacatcatccatatgcagaacaagaagctaaagttatatactgggaattatgaccaatacattcagacacgctccgagcttgaagaaaatcagatgaagcagttcaggtgggagcaggagcagattgcatcaatgaaggagtacattgcacggtttggccatgggtctgcaaagcttgcacgtcaggctcagagcaaggagaaaactctggcaaagatggagcgtggtgggctcaccgagaaggttgttagggacaaaatactggtcttccgcttcacaaatgttggcaaacttccaccaccagtgcttcagtttgttgaggtcacgtttgggtacacaccagataatctcttgtacaagaagcttgactttggtgttgacctggactctaggattgcattggttggtcccaatggggcagggaagagcactcttctgaagctgatgacaggtgagctggttccattggacggtatggtgagacggcacaatcacctgcgcatcgcacagttccaccagcatctggcagagaagctggacctggacatgtcggccctgcaatacatgatgaaggaataccctgggaacgaagaagagcggatgagagccgcagttggtaagtttgggctgtcagggaaggctcaggtgatgccgatgaggaatctgtctgacgggcagaggagccgtgtcatctttgcgtggctggcatacaggcagccgcagctattgctgctggacgagccgacgaaccatcttgatatcgagaccatcgactccctagcggaggcgctgaacgagtgggacggcggtctggtcctggtgagccatgacttcaggctgatcaaccaggttgctcatgagatctgggtttgtgagaatcaggcagtgacaaggtgggaaggcgatatcatggatttcaaggagcacttgagaagcaaggcttgtctatcggattaagggaaggccttggctttccttaccttctctttggagatgtattatcccttgtataattatgtattattataggccctccaagttttactagtagctagctgatcatctgagcaagtacctctgtatctgtatcctgctgagtctcataataagaagcgaaagttttgtagtactaacgtaattgtcacgaaaagaagtgccatggagagcaaggatgcgggagaagagaggctgggagactgaagaagcagaaagtgcgtggtgtgcgtgctgttgggctcaatgtgtgtgggcgtgagtttggtgggttcggcccatgtaagtgacctataattctgtagcgaactgagaataaggcagacaagccatagaaccagag

SEQ ID NO: 44819 - DNA, 495 bp, Zea mays
  Clone ID: MRT4577_140880C.1
gacaccggccaggccaccaagggcgcgcacggggggtgcatcctgaccgaaagggacgagttcaagaccctggactaccagaacatctacaacaacatgtcagaatcccacgcttcaaccctcgacaaaaaataacatcgaaaaagtaccacaagctcaaggagatcgggtacatcatatacgggagggggaaaacgctctactcctggctcaaggacatagcccaggacagactaatcccaccacgacaagccatggaccggatacccggaaagaagaggaaacaagctggccgacagccctctattacacttgaagaacgcaggctactgtaccgatcccgtcttgggggaagcctaaaaaaagggcggacgggctgttagaacaccaccacgaccggtgttgttgcatccgaggacggtggcacatgcacaagagcacacgacccttgccttcggcaccaggaagctgccgacgtaccatggacctgccata

SEQ ID NO: 44820 - DNA, 175 bp, Zea mays
  unsure (1)..(175): unsure at all n locations
  Clone ID: MRT4577_140881C.1
cacctccgccagccactccaaacacttgcgctttcactgcctcacaggtaaggggggcatgggctccggttcaaaacgtgtgcgcgaagcgcatcgtggtggacgcgcgccaccacatgctggggacgtntatcctcgatcatagccaaggagctgctcaatgggcaaaaggtgg

SEQ ID NO: 44821 - DNA, 601 bp, Zea mays
  Clone ID: MRT4577_140883C.1
ctccatccacctgtcctcggggtctcccttcccagatccatcggactcggcttcggggccgcccctcccgtcgtccccggttccgaaggtgggcggaaagccgggaagggcggagccgaattttgaattccaacatgaaaaccccggagggaacgacctaccctttccaaccttccgccttaatttgggggaatcctgggggttggggaaaaaaccaagggccttgggccttccccccagaaaatttggggaagaaaagaatttctttaaattttggggcaaaggggtttttttttttccggcccccaaaattggggggggggtgggtatttttcaaaaaaaaattccccccaaccgggggggggcaaaaaaaaaagaggggggggggaaaaaaccccccctttaaaaaaaaccctttctccccacaaaaatttttggggggagaaaaaaaagggggcggggggggggggaaaaaaaaaaaaaggggcgtctttttttggggggggaaaaaaaacaccccccccaaaaagaggggggtgtgttttatttaaacacccgcgggggggggggggggggccccccccgcgggggggggggaaaa

SEQ ID NO: 44822 - DNA, 340 bp, Zea mays
  Clone ID: MRT4577_140884C.1
ccggcacgacccacgcctccagcaccaacactcaacatataaagctttttgcactagcaacaatacatcaacaatggggaccaggtattatacctccttatgctccttgtatctgacagcatgtgttgctaacgccacaatgtaattcttaatagctcacaagctactatagctccccttcttccccaatacctttcatcaattatagtttcactaagaaaaaacacaactcttcaaccctataagctccaacaagcaatctcatcatgcaacatacctatatcactctagattcaacaatcgccagccatatctttggtgcattcattggtacaaacca

SEQ ID NO: 44823 - DNA, 302 bp, Zea mays
  Clone ID: MRT4577_140885C.1
gcctctgcctcgaaaactcttactcgcggcgctgcagccaggggggcgaccggtgtgtgagccgctgccgctatggctgctgcttccgttccgccaacatcttcctccggtggctgggacttcacctgtaacctcgaagtcgattatgggtctgaagaacatgcatacatagtctacagaacgtatgcatgcgacaaggacttgaagcctgacaaggttaacacgctcatgacactctcatgcttcaagctgctagtatactgactagccatgcagtccctcatccatcaagccatcatcat

SEQ ID NO: 44824 - DNA, 269 bp, Zea mays
  Clone ID: MRT4577_140886C.1
tggaagcgtttttggggtcgcggtccggactttgggcggggggtccggccccaggacagttttaccgcattccatccactcccgattccttcatggatccggcgtctgcactttacagaggtccaatcacgcggacccagaaccccatggtgaccgggacctcagtcctcggcgttaagttcgagggcggagtggtgattgccgcagacatgctgggatcctacggctccttggctcgtttccgcaacatctctcgcattatgcgagtc

SEQ ID NO: 44825 - DNA, 1011 bp, Zea mays
  Clone ID: MRT4577_140887C.1
cctgcttgcaccttcaagcagctaagccaattttgttggttggagcagttttcctaaatctactcttagaaaatgatcgagcgttcgacattctttactgcataaccttcaaactgatggatcagaaatggcttgaaatgcacgccagttacatggatttcaatacggttattaaatcaacacggcgccagctcgagagggagctgttgctagaagatatccagagaatcgaggacatgccatcgtacaggtttctcgcctgctagcaattgaacctcctggtcataccgaacattgccacaagatagtgcagctccatacactcgaagaagaagctgagaggttggaaccacgtacaccgagcgaagggtgaatctaggttcatggactgtggatgtgttgttgctttgaattgcgctgtcgtgtttacctactccgagtccgacaacagcctcgacgccgagtgccttttcgtttcaacgatgtgctatatcttggggccacggaacggcagatcctagctttctttgtaaacaagaggatgtggaaagttggctgcgtaaactttgtggccatgtgcatggatcataatgctgctcgcctgaaagaaaaaaaggcattaaggctgactatagccttatagtcatttgagttgggctgggtaccttgtgtggggcccataacgaacacagacatgccttatttatttcggcctaatagcctattgggttggttggtcctgattagcttgggatcggagtaaaatagttgaaacatcactgcagtgcatactgttgcagatccgggattcaaatctacctatggcgaagctctcaaaatctgagattaatgtaatgtaatcactcaactgctgcactgccctccgccaaagccgtaaggcagatggcagcaccgcgccgctagattgacaagagacgaggagatgtatggtcacgagcagggcaaccattcagaatagatgtgtgcctgtgtttatatagttcatttttc

SEQ ID NO: 44826 - DNA, 1822 bp, Zea mays
  Clone ID: MRT4577_140888C.1
aggccaaactaagaaacgccaagttgccagccaaacgaaccagctaaaacaagggggggcagcaccgcggcggcgtcgcttcgtggggacagccctcgtggtcgatccgcccgtgggatctcgcgcacgccaggattggagagctgcggcctccctccgccccaaccagccatgggttcccgcgttgattgcggcgcttagacgcggaggaggagagagacacggggagggggggaggccgaggcctaggaggcgtagcgctgtgcagggcgcgagcgcgttcgttcggcatggaacagaacgccggctcgttcctcgccgtgcgtcgcctctccggtggcgccatccaccaccatcgtcaccactcttccccggctgaggtcgtgggcgtgtccactgcgtggctcggtaaggggctttcatgcgtctgcgcgcagaggagggagagcgacgtgcgcctgtccttcgatttgagtcccattcaggaagagtgcttgaataggttgcagaaccggatagaggtgcagtatgatggttcaaatctggagcatcagaaagcactggaagccctttggcgttcttcttttcctggaactgaacttctagggttagtatcagaccagtggaaggagatgggatggcaagggaaagatccatctacagatttcaggggcggtggttttatatctttggagaatttactgtatttctctaggaactatccaaaatccttccaggagctccttcgtaagcagaatggtgatagagcattgtgggaatatccctttgctgtagctggtgtaaatattacattcatgctgattcagatgcttgaccttcaagcagctaagccaacgtcgttggttggagcggttttcctaaatctactcttagaaaatgatcgagcgttcgacattctttactgcataaccttcaaactgatggatcagaaatggcttgaaatgcacgccagttacatggatttcaatacggttattaaatcaacacggcgccagctcgagagggagctgttgctagaagatatccagagaatcgaggacatgccatcatacaggtttctcacctgctagcaattgaacttggtcatacctaacattgcagcaaggtagtgcatctccatacactcgaagaagttgcgacgttggaaccacgtataccgagctcagtatggggggcgtgggcgatctaggttcatggactgtggatgtgctgctttaaattgtcgtgtttacctacttgacaacgaccttaacaccgaatgccttttcgtttggacgatgcgctgcatcttggagctaactttcgttgtaaacaggactacaggaggatcgtggaaacttgtctgaatatgatttgtagccatgtgtatgcataatcttgccgctttactgaaaaaaggcagattaaggctaattatagccttatagtcatttgagttgggctgggtaccttgtgtggggcccataacgaacacagacatgccttatttatttcggcctaatagcctattgggttggttggtcctgattagcttgggatcggagtaaaatagttgaaacatcactgcagtgcatactgttgcagatccgggattcaaatctacctatggcgaagctctcaaaatctgagattaatgtaatgtaatcactcaactgctgcactgccctccgccaaagccgtaaggcagatggcagcaccgcgccgctagattgacaagagacgaggagatgtatggtcacgagcagggcaaccattcagaatagatgtgtgcctgtgtttatatagttcatttttcaactgt

SEQ ID NO: 44827 - DNA, 650 bp, Zea mays
  Clone ID: MRT4577_140889C.1
gtgcggcgctcgaggcggccgtccgggactgatggatctaccctggaaaatatacatacaatgatgatatgactgctgaagacatgaaaaaggttgtgatggagaactatgacccgaactttgtcaacctagttcaagctggggatgttctcgtgggtggttttaactttggcacaggttcttctcgtgaacaggctgctactgctatcaagtctcgcggtattcaaatcatagtagctggttcttactctgatatctttaagcgtaactcggttaataatgcccttttgttgattgagagtcctgaattggtcaatgatctaaagcaggaagttggtactttggaattgtcaaagcgtactggttggaaggtagatattcatgttgctgaaggaaaagtgcaagtgcaaaaggaaaatggcgaaaagaaattatataaagtcggtgcacttggcaagagcgtacaagaaatttggttggctaatggccttgaaggctgggtcaaagagcgtttgtagaatgtatattttaataagcatgtaacaagataaaaatggttaaagcttcatcattaaggacttaaaaagtttgtaaatataataaattggtgtgctgttttccttgaaaaaaaaaaaaaaaaaaggccccta

SEQ ID NO: 44828 - DNA, 276 bp, Zea mays
  Clone ID: MRT4577_14088C.1
catgatcatatggtactacaacgacatctactccagctggcttctgttgcagcatagccggatgccaattaaggctgattgcaactgtgcactaatgaccagtttcaacaatatcttggagcgttttagggataatttctatcggctcttagaggttcgctgtgaacagatgatcaagtacttgaacttcagttatattcgaactattgtgaacgtgcatgatgatgtccatatcttctagaccaggttgttgttagtgcattgatatggctcaaa

SEQ ID NO: 44829 - DNA, 331 bp, Zea mays
  Clone ID: MRT4577_140890C.1
tcttgggcaagcgccgaaggactaatttctattactttattctgttaaatgccctgactgcgtatttgcaataaacgcggggcgatcaaacccatctttgattgacaatatctacttttttgatatgacctactctctaggctggaggtggtcaaattgaagatgcaactctactttgttgctctttaattataccacctccaaaccaaaatgtatggaatcacgctctgaatgattctaacctacgaatccaactgttgcacacccctgttttaccaaaccgcactaacaacgctttccgctaaagtaataggaattagggctcctacga

SEQ ID NO: 44830 - DNA, 603 bp, Zea mays
  Clone ID: MRT4577_140891C.1
ccggccggatcacacacaccagcgacttaaatcaaagtcgaatacgcactgccctctccaccttcgcccaaatcgattacgcatggtgaaagcacagcctcttacggtcctatagccccgatcccatctcccaattttgcccagagccgccgcgacacagttttcccctttctctgtctccggcgaacgtaaagctctgtgctccgtggccagccctctctgaaaatgaagaagaagtcgaagtgaccgaagagaagacaccaccaccttcggaatctcaggcaggaaattgtttctactttgatatctacggatccgagcctgactcacctatcaacgaaggtgaggaagcgacaaatttttgttgcttctgctctaaggtggtgccaaaggaagaacgcaaggaatgaagtgcgtgaggaaaggatcctccatttaggacttttgtgtaaaaacttatcgggaggagtttttgcctcccttggtatgtgtaataatattactctgcactcctaggataatctagtctgtacatattcaactttatgttactttaaaataaaggtaagtttatgcaaaaaaaaaaaaaaaaaatttgcggcc

SEQ ID NO: 44831 - DNA, 574 bp, Zea mays
  Clone ID: MRT4577_140892C.1
cacataaccagaggcgttactgaaacgttaaaacctaaatttttaaccctaccgtaacagcatgcgagcctgctgacattgtaactttatacttcttgttgcagcacattaatgaattcctatcgcattatttatgtttgagtggattcattggtacaaaacatcaagttactaaaactacaacaacttgtgctatgaaaactcttgtttggctactactaattatcaggagtgactatcacttcaacacaactaactgtattgaactatagttcttattagcgacaacaacaactaccattcagccagctacactgttggctacaattataattatttccattcaataactggcagtattgaactctcctgcattatttacagcagcacaactactaccattcagccagctatctgctgtgagccacactaccttcttgatacaaacacagttgttgccgatctaacagcacgctgagcctaacgctgtcaccctattacaactgctacaattgatgccattcaaccaacttgctttgacaaactcagcagcgttctaccaacaacccatcat

SEQ ID NO: 44832 - DNA, 426 bp, Zea mays
  Clone ID: MRT4577_140893C.1
ttttgttttatttaatggttttttacatcaacccaatcaaattatttttgccgcctgaaaaaatataggggcctgcaacctttctacccttttggcacgaaacgggggggaagtgcctttttcatggaaagggcgccagtattccaaaagggccggttggtattggaaaaataagaccaacaccaactttagctctatacctcgttgcccggtaacccacccaaaggccggggggtgttcttcggtgaggtgaaaccaacgacggggtccatgttccaggtgcgcaggccccattaaccccgggaggctcccctcgtagtaagtgaggatgcggccaaccataagctccaggtcgacgtggccaaacgtgttgtccgggtacatgaggccgacgatgccgaacgggatatactaaaacggagaccc

SEQ ID NO: 44833 - DNA, 718 bp, Zea mays
  Clone ID: MRT4577_140894C.1
aggtcgggcttcaacagatactcccatccgtcgccgaaatgtctaccagcgagctcgccacctcctacgcagccctcatcctcgccgatgacggtgtcgaaatcactgccgacaagctccagtccctgatcaaggccgccaagatcgaggaggttgagcccatctggacaactctgttcgccaaggctcttgagggcaaggatgtcaaggacctgctcctgaacgtcggctccggtggcggcgctgcccccgctgctggtgctgccgctggcggtgccgctgctggcggcgctgacgctgctcccgctgcggaggagaaggccgaggagaaggaggagtccgatgacgacatgggcttcggtctcttcgactaagcgtcttctctcgtcccttctttcgccatttgccattctcggggttgctcaacacggatcaacggtgcatattcccatttctggggtggaaatagtcacgaacttcattcagtgacaacagcttgcattttggcctaaccggaaacacgatgacggcgtcatgagaaacgtataggtcggcaggtcaatggaacaaatccaaaaaagtgcaaaagctggagccacccttgtgatgtgctgggttcctccagacgatctggctttgtgcggcatggctacaaccgaaaagattacgacgtagctgggtcccctccgcgatgtccgctcaatgtgatcgactacgc

SEQ ID NO: 44834 - DNA, 830 bp, Zea mays
  Clone ID: MRT4577_140896C.1
aattcggcacgaggcatccactggaatcataaaagaacagagcggagcagctgcacttccgcgtcgagaaatcattagagctcaagaaaacaggtcagcaatggaggccacggcgacgccaagaacccaagaagtgatgaagcccgagcccggcacggccaaggtgaccgtggacgaggtgacgctccgcaagttcgagctgtccgacgtggacgcgatgatggcgtgggcgtcggacccgcaggtggccgccgtgtgccggtgggagccctacgagtcgacggagccgctgctggccttcatccgcgacgtggtgctccctcacccgtggttccgcgccatctgcctccgcggcgagccccgccccgtcggcgccgtgtccgtgtccccgacgggggacccgtgccgcgccgagctcggctacgtgctggcgcgcgcgcactggggccggggcgtggccacggccgccgtgaagcgcacggtggccacggtgttcggcgaggtgccggggctggagcgcgtcgaggcgctcgtggacgtggccaacccggcgtcgcagcgcgtgctggagaaggccgggttcacgagggaggccgtgctccgcaagtacggcgccatcaaaggcgtcgtcagggacatggtcatgtccagcttcatcgacaccgacgcagtgcccgagtgacttgagcgcccctgttgcaaatcttttgctgtcggatgcatccagttccgaatttgaatgcaagcacttccagtggtgtccggtttctcaaaaaaaatttatccgccctatattttattctattttagttccaaaaaaaaaaaaaaaa

SEQ ID NO: 44835 - DNA, 374 bp, Zea mays
  Clone ID: MRT4577_140897C.1
tcatcaagctaagtttctcctcctcttctccctacatccgccacccctctcttccccatctccggctgccacctagccccctcccccccaccgtccggggtcggtcgctctgtgatgtattttgttttgcaccaattcatgcccatctttatgtacaacatgtttactgcttgggttaactactactttacgttaattagcctgcagtgaaagcttatttagatatgctctgcatcacacaacttctacgttcttgcttttggaattttcagtaagtaaaatacatggggcttcttacgatgatctttcctagatattactttgatgtgtcctgtgtatagctagccttttttttcaaacattatccaggtagc

SEQ ID NO: 44836 - DNA, 268 bp, Zea mays
  Clone ID: MRT4577_140898C.1
tcgcaggttctcagcgtctccgccattgcggcggccctggacgaacctggggcgacgtctaagagcgcgaggacggccggctgcgccgccgtcgtgaacgggatggagtcggcggcgcggctcggcaggtggcccagcgcggccggcgccgcggcctggaagtggagcgtcaggcgctcgcccacgcgctccgtttcctcgcgaaagaacaccgtcgtgtgaggcgtcaaaaacaccacttccgtcgattcgcgccgacccgcggacc

SEQ ID NO: 44837 - DNA, 358 bp, Zea mays
  Clone ID: MRT4577_140899C.1
aattaaagatattaaaattaatagtgtatacatatatttgttgttatggttacatagtgaaataagggaatggtgcagtgttctaaacgaacgggaaagaaagaaacagaaaagggaagcatatatactaataccgtaggtactaaacgcgggcctggaggaacgcaaaggcaagggagtctgcatctaaagaacatgagggctgaaacacggggggcggaagaaagagttgaaagggatagaaaaagaagcaccagaaagaggaaaactctggtacagaaggcaattacccttggggagaccctatgaacacaagcagtcaagcaccagccggtggggctgagccttagaagaaacc

SEQ ID NO: 44838 - DNA, 388 bp, Zea mays
  unsure (1)..(388): unsure at all n locations
  Clone ID: MRT4577_14089C.1
tgggtacccctcgagggccggcacggagaaaacaccgaaacccgcacgtttctctgcgactcgcacggcccgcgcccaccaccgaccaccccacctggttcggtcggcactcggcaccccgccccgcatacatgccgccgcccagcctcaccgtggcgcgcgacccggccgccgccgccaccatgcggcaccgcaaggtccacccgacgccgggcggaggcgcagggacgacgaaggagatgggcgcggcggaggggtgggcgcggcccgagtggtggtcggcggnacaagganctnnttgncaccctttgtggctttgatgtctacgtcaatatggcgctggaggacgtgaccgagtatgaatacactggtcaagggcgccggctta

SEQ ID NO: 44839 - DNA, 621 bp, Zea mays
  Clone ID: MRT4577_1408C.1
aaagggttaaaagggaaaggtttaaaaactttttgaaaaacaaggaattacataaaaatgtttgcaaggggccccacccttgagtatgggccaaaaactcatcacaaaatatttggaagtttaaaatacaaaaaataaattatccggggcttaaaaattcttcctttttgggggggggaaattactcccccaccccaaaggcaaaggcatcaaaggggtcggataggccagggccagtcttgaaggaaaccttttccggggaggccttgggcacgtaaacctccacaaccctgagccaaagcataagctcctttgttttcaccccggggattttcctaaatttgcccttttggggaaaggccggcccctcaggggggaacaaaacagtctggttgatttttttgaaggggggctccaccttttttttcccctggaccaaccaaataaaccctgtttcgggggtggccccaaactcctggatgtccacaaggggcaaaaaccccttggggaggcccagctcctccagcagttcgattgacttcttcctgcaaagggggtttcctccggggacaacctcagggccggcacgggggctttcgatggcctgggaccccatgggcg

SEQ ID NO: 44840 - DNA, 414 bp, Zea mays
  unsure (1)..(414): unsure at all n locations
  Clone ID: MRT4577_140900C.1
atatttttacttcagctacttatcttcactttgcagactcttcgaggacaatatttttacttcagctacttatcttcactttgcagactcttcgaggacaaancgctgattctggctactcaaagatcatcttcaggcttctagctttcgcttggcagctagcttattgaagaagcaacgatgccnacatgcaacctttcttttgcgaactcccacatggattccttccttaattagtcttctggtgcttcatcaacaaaacttgggtgaccacttctcatccagaaacatacatgcttggatgatcgggtcctccacaagcttgctacaaaccttcttctttttctccatagcaggaaccttactagaacactaccccacttaaaaagaatgagggtagatctcttctcgtgc

SEQ ID NO: 44841 - DNA, 351 bp, Zea mays
  Clone ID: MRT4577_140901C.1
atctggaacacacgcaggttttaaattacatggccgtcattaccacatccattagcttccatctaggctagctgggcgaggacgtcgactggcgcatctttggatgctgccaagtattgaatcggcctgacaggcgtgctcttgatcttcgcggcctggtcaacatccaagctggtgctgaaaagcttgccggtgagctccttgaggctgtgcttcacctccttgggctaggaagcgataacggacttgaggtcggagagcacgtaggaggcccggaggccgtggtcgttttgaacgtacggccacgccttgttggacaggagcggcttgagggtgattatttactgcgcc

SEQ ID NO: 44842 - DNA, 448 bp, Zea mays
  Clone ID: MRT4577_140902C.1
attcggctgttgaaaggagtgatgttaacgtatcctatcgaaccatctaattttgaggatcattggtggaattcattcttttggagagctttcacgctaccatgtggcggtagcctgggactccagcttgaatcaagttttgcatgcagcaagctgtactttagattcttcatacataggtcacgagagttgtttggagcttgggtcatcgcttactttcccatactactggggggcttatttggaacagttttttacacaaaactcctgacctgtaaatcaattttggaaaaccgtatccggtggtcgatccatgtattaatagagtaataatgttactatgttcatccaaatctcaaagacgtgatggttgtgttgaaaaaacagcttgaatcacttgcttaaaaaaaaaaaaactgttctgtggactcacttgtctacaagggat

SEQ ID NO: 44843 - DNA, 487 bp, Zea mays
  Clone ID: MRT4577_140903C.1
tttctcgtgggctttatatttgattgtccaccgtctgtcgctgaccgtctattattttaataccttcgctgcatctccgctaatactcctccaccatcaccaccaccccaaccgtcaacatgcgttccgtcttcgccctcagcattgccgccttcactggcctggtcgctgctcaggacgctccccagatgagctacccatacaccattgaccccgacaccgtcgaccagtctaccagggattactggtgcgaccagaacagggcacagtgcccgctcatctgcctccaacagcccggtgtcgactccatgaccaccgagcagaacgactgcgattccgacgctctgacctacacctgtgtctgtgacaacggtgtctctcccaacatcacccagtactcgcagaccctgccatactttatctgccaacaatggggaaacaactgcgtcgccaactgcaacggtgacagcacttgccagagcgcttg

SEQ ID NO: 44844 - DNA, 273 bp, Zea mays
  Clone ID: MRT4577_140904C.1
aaaaacgcaaaactatgggccaaagggtgctccgttcttcaaagcactgtggccaattggacgaacgctgtttcattcccccaaccactacaacaatgcttaaaaaattcacccccgggaattccaattttcaccttaacacaactgcagcccaccccccaacttttgggggtggcgaggaattataaaaaaaacattccttcacattggctggcgttaaaaaatacaaaagctacccttcatttacccaagccgcaagtagaccggatcttg

SEQ ID NO: 44845 - DNA, 315 bp, Zea mays
  Clone ID: MRT4577_140905C.1
atgctgcagcgtagtaagtcggaatcgtcgaatgttgaatattatggcccaatgtatttgagacatctcctcatgtaaaggaggcagttatgggagccctagagggcctgagagttgctattggaccatgtagaatgttgcaatattgtttacatggtgtggatcacccagcccggaaagtctgagatgtaattggaaaatttacaactccatctacattggttcccaggacgctctcatagcacattacccaagaatctacaacgatgataagaacacctatattcgttatgaacttgactatatcttataatt

SEQ ID NO: 44846 - DNA, 578 bp, Zea mays
  Clone ID: MRT4577_140906C.1
cacaaccatctattgcttacttctgggccgcgtggctcttaccagccgtgtcttcagtgggtgaaacccctattgcatcaaccgtacggcatccaacaggcaatccggacaaggctgtcacccttatcacggttgttcctccaacaacccacactcctattacagcacatacctttggtggggggggggggcacataacatcaggccgacagccgctacgacaacttgggctcgcaaaccttgctgcatactgctcagcaacatgctttatcttgcattcaaccaattggctgcattgcactctgctggttatttgcaacaccaattcccattcagccagctagttggtgcctccccagcagcactttattccattcaaacacctaaccaacattgaactctgatgcttatttacagtcctgagccgctactcccattctacacaactacctgttgtgtagccccgctgccttctggacacaccaacacaggatgggcgctctacctccacgctatgcttaaccttggcaccgtcctaccacttccgacaatcgctgccatgcatacccacttgtttt

SEQ ID NO: 44847 - DNA, 869 bp, Zea mays
  Clone ID: MRT4577_140907C.1
gccggccgggctgccctagactttagtccacggtcaccccgggccggaaaccctggaatctcgcccaccgccccactcgccgcccccgctggtcatccctccacccaaccccgctcctcggggaccgctcgtcgccggagccgccggcggcctcgagcgatagggatcgacagcgagcgcgcgagcccgtcccgcaacctgatctgcgaggaccaccgggtgggaggctgcgagatcgacgacgggctcggttcgattcggctggcgcgagcaccagcctatctgagacgggcatcggcggcggagagacctggcgcgcggcggaacgctgaggttatcttgtattctcgtcaagacaactctcttccctcagagcactgaacaatcattgtgatttatgactaactctgagtggtgaaagaattaagaaaatacagaacaccgcgatggctgttagatgctcctgtactgctcttttccctctactcttctgttttatgatctgtcagctttgctatggcactgtaactgatatccaatgtctgaagaagctgaaggcatcagttgatcccgacaataagttagaatggacattcaataacaatacagagggatccatatgcgggttcaatggtgtggagtgctggcatcctaatgagaacagggttctttcgcttcatcttggtagctttggtcttaagggcgaattccctgatggacttgagaattgtagtagcatgacttcgctggatctctcaagcaacagcctctctggccctatcccggctgacatctcgaggagacttccatttgttacaaaccttgatctgtcatttaatagcttctcgggagagataccagaagcgcta

SEQ ID NO: 44848 - DNA, 339 bp, Zea mays
  Clone ID: MRT4577_140908C.1
gacgcctgcggctccggtccggaattcccgggtcgacccacgcgtccgaaaaagtatcaggagttgtcaaggcagagaagagagtgttgcaaaaagggaaaagtactttgctgcctctttaagactagggctgggagaaagaagaggagagagaaagaaaggagagaagtttggagcccgaggcttaagcctttccaaaaactaatcacaacaatcgcggcggcccgaggaggagagcgcctgttttttcatcccaattgcacttcgcccgtctcgagctccgcttccccccagctattctccgccagatctccgcgcccagcgcccgcgtgtataaca

SEQ ID NO: 44849 - DNA, 714 bp, Zea mays
  unsure (1)..(714): unsure at all n locations
  Clone ID: MRT4577_140909C.1
atttctgggagattctctcctctcgccgcccgtcgccacacaggcagcaccacagcggctaaggcttagcagcggctcggtctcgtgcggccagcgcaactgcggcaagaaccctaccgccttgggttggcttggcttggccctccccgtccagcttcgacggaaggtactaacaattgtaatctagctgcacgtcatcacaaattcaatggcagatcgctggctggagctgcccaatctggccctgcaagtggtggggatcttaccggaggtccagaggcctagcagcatggtccctcgctgccagaaggtggcttacacggccatttccctcctcatctaccttgtcggcagccaactgcctgtgtatggatatggagtccgttctccatcggttgctgactctcagtactgggttgacatgcccgactgcaactccgtcatgtctgctgggatcatgccccttgttctgtctgaggcggtgcttcatttcctgctgtggtgtaaggttcttagagcaaacaatcctgaggaccggatgctcctgagtcgggtgcagaagttggttgggataatttttgccgctgatttctcagtctgcagggtgctaatttcacctatcttgngcaaactgaccttagggcagtcaattctgatcgtgcttcagcatttctttggaagtgtcatcgtcatttatcttgatgatctccttaa

SEQ ID NO: 44850 - DNA, 194 bp, Zea mays
  unsure (1)..(194): unsure at all n locations
  Clone ID: MRT4577_14090C.1
accgggcgtccgcactgtcgtaacttctatctnatcattttatcattaatcatccctgagaacggggggcacggcaaatgttgagatatcgctcataccactgtcaatagcctgacttttgggactgggggcattgaagtacttgattaagcctgacaaggtcctgacacacagacgtgctgatattgatgagg

SEQ ID NO: 44851 - DNA, 305 bp, Zea mays
  Clone ID: MRT4577_140910C.1
aatccggtgaacaatcatctgagatgaacactggaagccgtcaagaaaatgcagtatcattcattgagttcagaatttttttttaaaaaaaattatagtctcaaagaatgctgtggcaccgtttgaaccgctggtttgtttggagatgccagggagcagggtttttgaggaatcccaagattgaaatgattgaagcatgctggtgttgccagccttgcgccatgtggtatgtgcggttcgctcgttcaaactggtccacatatgagttgtcttgggtacaaggctgaaggctggtcccgactggt

SEQ ID NO: 44852 - DNA, 291 bp, Zea mays
  Clone ID: MRT4577_140911C.1
aaaacaaggaacaactttttttttggtggggggggccagtttaatacaaacccgagacacgacgaacaccaacagcgcgcgggggaagactacgtacaccgtacacctaccaacagggggggcgaggaccaggaggctacaagaacccaggccgcaaaagaattttttaccaccacaccacgcacgcaccattttttgggttacaaatcggcaaggcctttatttatctaccaagtttcgaggcctttcgtcttgccttgacccggggatcaacacctatcgtccttgcgg

SEQ ID NO: 44853 - DNA, 427 bp, Zea mays
  Clone ID: MRT4577_140912C.1
gaaaagttcatccaagatcctgggggggataacttttgcacagggcacatattttttgtctgtgggatatacatgaattgcactctctttattttaaaaccacagaactgccatcctcttacatcttgtcaggcttctgtcaggtaatatttgtcgatgaacatctgcctctcctctggcacagactccataaacatcaaatttgtgagaatatgtttttccttgctttcacctttagcaggaaaactattgattatgttgaagtcatcctgttttgcagctttgtgaatagttacatgattgcatctctctgattcgttgagttctttacagcgctcatttctgcaacatgatgttactcttccttttgcttctgattcattttcttgacccacttgattgaaggctgaaatagttgtgggctttc

SEQ ID NO: 44854 - DNA, 280 bp, Zea mays
  unsure (1)..(280): unsure at all n locations
  Clone ID: MRT4577_140913C.1
tcgcggttctagtacgcgagcggcagcccttgtggttgtttgctttctttcgcgtgcttgcggcgttctcggcccccccttgcgtncccccgngtcccttccctggccgccgggncccgntccctcttgccncnccccnctccccnnccctttgggggggggggggncccccctnccncncccccncnnnccccccnncgntggncccctngcccccccgcggccggctgcctgccgcccccccccctcgngncgtccccgntgcgtcgcccccggcccc

SEQ ID NO: 44855 - DNA, 302 bp, Zea mays
  Clone ID: MRT4577_140914C.1
ccggcgactacggctgggacaccggctggctgtccgccgaccccgagaccttatccaagaaccgacagctggaggtgatccactccccctggggcatgctcggcgcgctcggctgcgtattgctcgagctgctttccctcaacggcgttaagattggcgaggccggctggtttaagggcggttctcacatcttcaaggagggcgggctggactacctaagaaacctcagtctgattcacgcgcagagcattctttgcatctgggcctcgccaggtcgtgctcatgggtgccgtcgagggcta

SEQ ID NO: 44856 - DNA, 2133 bp, Zea mays
  Clone ID: MRT4577_140915C.1
cgctactagaatctgcttccacggagaagcaggctggcccgagacaaacaaatggaacagggaatcatcaggatcatactgaagatagtgaatccaatggtctcgagaagctagaacaaagtactgagacgggagagaaggacatgggcaaaaagcgaggtgcacacgctgctggaaagaaccgagtgtggtgagagcaagcagcaaaagcttctgcagtgaatcattgtcaggacaacattggtgccaaggaggaagtcatgaaggatgtgaagctggtctttggagaggacatcaggtgtgctcagatgccagctaactgctctctgccacaattgagagaaatagttcagaacaaattcccgtcactgaaagcatttctgatcaagtataaagacaaagaagaagacttggtgacgataacctcgtctgaggagctaagctgggcaagcaatctggcagattcgcaagtgccaatccgattatatgttgtagaggttaatcatgttcaagagcttggtgtggatggggtcaggagacgtccttcctttgccacgttagagagaaatcgtgatatcatgttggatattgggaccattgggcatgatgttgagcataagcattacgctgatgactggatggtacagtttgcacagatatttaagaatcatgttggttttagttctgatgcatatctggatctccatgaccttggcctgagactgcactatgaggctatggaagacacaatacaaagagaagaggcacaggaaatatttgaggttgcagagtccaaatttaaggagatggcagcactggcattgtttaactgcggcaatgtccacatgtctcgtgcaagaagaaggccatgcttggctgaagatcctttacaggaatttatacttgagaaagtcaatgtttcatatgattgggcatgcacagaatatgccaaagctggtgcaaacattgaagaagctgtcaaaactaaatctgacttttttgaaggacttattgctcttggccaacagaaattcgagcaggccaaactctcttggtattacgctcttgcatgcaagataaatatggaaactgaagttttggagttgttcaaccacgcagaggataatatggagaagggaatggatatgtgggaaagaatggagacattgcgcttgaagggactgtctaaaccaagtaaagagaaggttgtacttgagaagatggtcttagaaggttttgtgaaggatatatcagcagatgaagcatttgaacaggcttcaagcatacgatcacatataaatatcttgtggggaaccatcctctatgaacgttcagtagttgaattcaatctgggacttcccagctgggaggagtcactgactgttgccatggaaaaatttaagatcggaggtgcctctcaagctgacatcaatgtgattgtaaagaaccattgtgctaatgaaaccacccaagaaggactcagtttcaaggttgaggagatagttcaggcatggagtgaaatgcatgatgctaaaaattggagaagtggacccctgtatttccggcttcaaccagtattccgacgtagagctccaaagttgcatcatatactagagcatatgcactatgcataactcctaactactattgtatcagatttgttcatcttagaagctttgttgcacttactcatggaaaaaaggaataaacggaaaagaaaagcgataatctatgcattatcaagttatagatttgctcaatctaagaagaaaaaaaaaagattcgctgactcttgtggttggctgaccatgtagattgcattttgctgtaaagtttactgggttcctaatcatctatgtagtaggtggcgttatatatcctctctcaagggatattttgcatagtgctacacttccttctgttttacttgtggaagtgctaaaatagggtttgtactcttaggtcgctataggaatggtaggctcatgtattttacttggagggtttattagtaggtctcatctaaagtatgttacactttagcgacacgtggatacttgatgtgttcaaaacagttgttgtaacttgtagcacagatgctagagcatagtgctttttaacattgttcttaac

SEQ ID NO: 44857 - DNA, 438 bp, Zea mays
  Clone ID: MRT4577_140916C.1
aaatgggcaacaaattgtttccacaagctaaaacaaaaagcgtgcaggaatgggtactttaacttggaaaccaatcctactccgtactactgaaacaatttttacagctttttttttgactgattgattgaacgatcgatcagagtcttaaagtagatttacactttctacagcagcaggaaggaaggagaatgatccctctcagttgttcagcagaggaatccagctcaattcaaggaatgaatcaaacaccgaaaccgagatgaaatgaaatcggggattgaaaaggacctctgcagggggggtacggggccaaataccttggccggtgggggcaggtctcatttctggagcagatcggggcggtgcccgtgacgtcaatgctgatacagttgcttgtgcggccgatcggcggccataagcataatctcccgctgg

SEQ ID NO: 44858 - DNA, 131 bp, Zea mays
  Clone ID: MRT4577_140917C.1
atacccttgtggctgaaggtaaataaattcactgaattgtttcaacttacagatgcttgcatgctacaaccatacatgaaacagaggatttattcattcttgggactacacgcgggggaggatcaaaaaga

SEQ ID NO: 44859 - DNA, 537 bp, Zea mays
  Clone ID: MRT4577_140918C.1
gggaaaaaaaaactcacatagtatttatgtcgtcttgtatcctacttaatcgaaggaataaataccctcttttacaactcattttcgcaaattggggctaaaaaaattaagcctgggggcccctggggattcatgcggccggcaaagcaaaaaccaggctactagacccattcccggggggccgggagccgaagttcctgcagccgggccggggacggccaactccaaaaacagacctccggtaaacgctagggtcctaatctttttggtacggccgtatagggggcacaaattgggcccgtatgtcccccgtatttatagatccttcacgaggaaaaaagaatcgggggcgggcttgcccccgcgccccctgccctaagttggctttttttcccagaaaattattcacatccggggggggggcggcatgccctcccctctccattccggaccacgccgcccgggtccccagcttcccgcggggcaggtcgccgccgacctcctcgggcacccccagctggtggccgttggggttga

SEQ ID NO: 44860 - DNA, 707 bp, Zea mays
  unsure (1)..(707): unsure at all n locations
  Clone ID: MRT4577_140919C.1
attttataataccaggccaggaaaacctctcgcctcacaaacaagtcccccaactctccaagtccaaccccacgaccatggcgaccaagcagagcctcctcgccgccgcagccgtctgtctcctcctcctcccggcggcctacgccttcaccgatgtcgagtactgcaataagggcaaaaactacccggtgaaggtgagcggcgtggagacgtgcctgatcctgtcgagcgcggcgtgccggccaccttcaagatctccgctacaactgataaaaacatcaccgaggggaagctggttattgatgttaaatattggatcttcaatgtttactctgaaacagatgacatctgtacgaagacccaatgcccggcaacttctaatttcgagctatctcactcgcaaaccttaccatcaatcactccaccaggttcttacaccattcagatgaagatgctcggaaagcacgatgaggaattgagctgcatctccttcgggttcagcattggcttccttgcgccggttgccttgagttgaaggcatgcacgggttgcacgcggaactacacacttgtggattgtaactctagaaacctatttatcctagtatacgttttctgtgtaacactcgtgggtgccgcaacactttgtgttcgactaagaagnttttatcaagagttgaacatcacaataaaatgaaaatctggtgc

SEQ ID NO: 44861 - DNA, 384 bp, Zea mays
  unsure (1)..(384): unsure at all n locations
  Clone ID: MRT4577_14091C.1
gtccgcaatntcaacttcgctcccccggcggcgccggcggcggtaagcccccgaactccccttcatttctggtccccagagtgtcaatccgccctaaaaaggcaggatttgttggcaattatggaaccaggtatggggcaaccttgcttaggcaaatcagtaaaatggaggtatctcacaatccaaagtacttttgcgatttctgtggaaagtttgctgtcaggaggaaagcagttggaatttggcggtgcaatgactgtgggaaggtgaatgctggtggtgcttacaccatgagcactgctagtgcggtcaccgtcaggagcacgattcgccgcctgagggagcatactgaagcatgatatacctctttatattattggggtt

SEQ ID NO: 44862 - DNA, 804 bp, Zea mays
  Clone ID: MRT4577_140920C.1
cattcatattggttccctgttttctggattggcgttggtgtagcattatctgcagcattttccatggtttcttcgatggtaaagaaatatgcaatggaacaagcattcaagtcgatgatgacccaggcaccacaaaacacatttggtgcgaactcgccattcccattctccatgccaccacaggcaggttccacggcaccaagtagttacccatactcaggaccaaggaaaaatacccccaaaggtgcaactgttgatgtttcagctactgaagtggcagcaactggatcttcggaagcagctgatgtggcagaaacatcgaagccttcaaagaaatttgccttcgttgatgtttctcccgaagagttgcaaaaacagaaggagcttcaatcttcattgcagacggtagatgtaaaaagtgatagcactgaaagtgaaacgaagggtgatactgaacaagttcctacaaatggtgctgcttttaagccgagtgaagattcctctacctggacaactgaatccagtaaatcaggacctatgctatctattgatacaattgagaaaatgatggaagacccagctgtgcagaagatggtttacccctacttgcccgaggagatgaggaacccagattcattcaagtcgatgcttcagaatccgatgtaccgccagcaactggaggatatgctaaacaacatgggcgcatctcctggtcaatgggataaccgcatggttgatcacttgaagaactttgaccttagcagtcctgaaagtaggcagcagtttgctcaagttggcatgact

SEQ ID NO: 44863 - DNA, 219 bp, Zea mays
  unsure (1)..(219): unsure at all n locations
  Clone ID: MRT4577_140921C.1
ggcgcaaggggcgcaccacccgacgggcgcaaagggcggcgccggaaacccgagagccaaggaagggcaggagacaagggaccggaccgacctgggcacgccccacccggaggggagcaccgaggaggaccggcacgaggacgccaagccccacgagaagcccggccaagggaacccgcccaagaagccgaacagagaaaagcacaagcncccgaaccg

SEQ ID NO: 44864 - DNA, 163 bp, Zea mays
  Clone ID: MRT4577_140922C.1
attatcacattagatcgggctgcacatctttatgagcaagggcaggaggtttatttaagtatggtatggatacacaggccctgcagggcaagatgtaaatccggaaatctatgcaaggattccatccgctggtctgattttgaactcactgataaaaagcccg

SEQ ID NO: 44865 - DNA, 534 bp, Zea mays
  Clone ID: MRT4577_140923C.1
ggaccaaggaaaagggggaaaccaggaaaagtatcggactaaaaaaaaacaacgttaacaggcaaaaacaaaaaaaaaatattattgtttttggaacacacaggacccccatgggaaaaacggaaaccaaacccccccgaaaaaaaacatagggctctaggcaaaggcaaaaggattcattattcatcggggggggggccaagggaaaaaaactttgggtaatccccccccagggacccacccggggagggcttctgggggccattctaaagcggggggaagtcccccttctccttgacaaacgggaggggggggggcttgaaaaaaaatttcccctcgggcgcaaggaaataaaaagggctgagggggccccctccagggaaacacttgaagcagctttgggggaaacaaagggggggaaacagggaccctctaaggggaaaaaacgggttggctgaatccaaaacatttttcttgggggccaaaaaaggcgctggaaactttaggagcattctcattccaaaggtttttttt

SEQ ID NO: 44866 - DNA, 166 bp, Zea mays
  Clone ID: MRT4577_140924C.1
tagctcttttattgcaaaaaaataaaataaaacaagagaataaaaaaaaagaggagtgctgatttccaaaacaatatacgaaccgtacaaaactaagtctatcaaatcctttataccttcagatttttaagctagtcgtcttattaatcttacctcattcttaact

SEQ ID NO: 44867 - DNA, 433 bp, Zea mays
  unsure (1)..(433): unsure at all n locations
  Clone ID: MRT4577_140925C.1
cggnccggaancccggggcggaccaacccttccggtggccttgaaccaaaaaataaagggaagtttgttgcctgaataagtaatgggattgtacggaccatatttgggctccaggggactttcaagtgagccaagggattacaaatgcaaggggcttaaaaataactaaaaagttgggtaaactggtagcctaacatggggactcctaacaacggccctttttggggccaattttgttgtccggcctggttcttttgaaactgtgttttggcaaccaaattaacaacgtggaaccgacaagccattgtttcctttaagaagggcagccgaccaagaagataagaaggatgtgccaaggccgggaacatactccaactttttttttaacctaattttttccttggccagaatgtactcggcaatgcttttgact

SEQ ID NO: 44868 - DNA, 417 bp, Zea mays
  Clone ID: MRT4577_140926C.1
acacgcgtctaaaattttacatttcatatatataaacgcgcgtggtcgtccacgtcggtataaaaaaaactgtgcacacgatttctcatcgacgggcgcggtttcttcttctgtgtcgtctcccaaagggccactcaaagggctgccgtctgcagcgctgacgaccgcggcgtcggagactagcgtgcatcccgtctcctcgtctgctccgttcgtctccacagcttgtacaggtcgctgaaacacttggaacaaacagagcttgcttctgaagccctacacctctgaaggatcaggtatcatcaacgaatgtatcaagtaaatttacctgacactcctcgacatcgacgaaacatcttctgatcagttcattcctaactattaaaggaagtttacgctcttccatctactgcaaaa

SEQ ID NO: 44869 - DNA, 926 bp, Zea mays
  Clone ID: MRT4577_140927C.1
cccacgcgtccgcccacgcgtccgcccacgcgtccgcccacgcgtccgacgacatgtacaaggattgtatggagacatgctcacaatctggtgaccgtgaactgtcagaggacttgcttgtctatttcatcgagcagggtaagaaagaatgctttgcttcttgcctcttcatttgctacgacctgatccggccggatgtcgctcttgagcttgcatggatgaacaacatggtggactttgccttcccgtacctgttgcagttcatccgtgaatacactagcaaggtggatgatttagtgaaggacaaaatcgagtcacagaatgaagaaagagccaaagagaaggaggagaaagatcttgtggctcagcagaacatgtatgcgcaactgcttcctcttgctctgcctgctccgccaatgcccggcatgggtggccctccacctccgatgggcggaatgggcatgcctccgatgggcgggatgggcatgccgccgatgggccctggtccgatgccagcattcgggatgccaccaatgggaagctactgagatggttttttttttgttgcagagagcttagatgatgatttgatatgttcctgtgtaagcagaggcggaaacctcattggagttgtagatggttacattttggaattaatattctttatggtaccaggaaatttttggcgagtgaaatcttggccagagtcatcggataggacggggatgattaggttggttgagcatgagctggtgaaagctggtaccatttgtatagtgtgatgaaatctttgtagacattttgcttgtgtaataataatacttgttcgcacagcgaaggacaaaaaaaaaaaaaaaaaaaaaaaaaaaaaaaaaaaaaaaaaaaaaaaaaaaaaaaaaaaaaaaaccgcgagggggcgccggtac

SEQ ID NO: 44870 - DNA, 1082 bp, Zea mays
  Clone ID: MRT4577_140928C.1
gagagactccgtgaatcagttgatatgcacgacaactttgaccaaataggtcttgcccagaagcttgagaagcatgaattgctggagatgaggaggattgctgcctacatttacaagaaggctggcaggtggaagcagtcgattgctctatcgaagaaagacaacatgtacaaggactgcatggagacatgctcacaatctggcgaccgtgaactgtcagaggacttgctcgtgtatttcattgagcagggtaagaaagaatgttttgcttcttgcctcttcatttgctacgacctgatccggccagatgtggctcttgagcttgcatggatgaacaacatggtggactttgccttcccgtacctgttgcagttcattcgtgaatacactagcaaggtggatgatttagtgaaggacaagatcgagtcgcagaaggaagaaagagtcaaagagaaggaggagaaagatcttgttgctcagcagaacatgtatgcgcaattgcttcctcttgctttgcctgctccgccaatgcctggcatgggtggccctccacctcgggtgggtgggatgggcatgcctccaatgggtggaatgggtatgccgccgatgggccctggtccgatgccagcattcgggatgccagcaatgggaagctactgagatgtttttgcagagagcttagacgatgatttgaatcgtccctgtgtaagcgaaggtggaaacttcattggagttgtagatggttacagtttggaattaatattctttatggtaccagaatttttttggcaagtgaaaccttagccagagtctgagaattgcaacctgttataccgtaggatcggataggatgggggtgattaggttggttgagcgagctgttgaaagctggtatcatttgtatagtgtgatgaaaactttgtagacattttgcttgtataatactcctacttgttggcacagtgaaggacaaacaaatgtatgctgacttgttatgtcctcctgattgcaatttgttagtatgtgttttcttgaagaagacagtaacattcgacagatactcgtgtctgtccatttttatg

SEQ ID NO: 44871 - DNA, 656 bp, Zea mays
  Clone ID: MRT4577_140929C.1
gcttgcacttcgtttagatcacaccagagttgtagacataatgcgcaaggctggtcagttgcatcttgtgaaaccatatatggttgcagttcagagtaacaatgtatctgccgtgaatgaagccttgaatgagctttatgtcgaagaggaggactacgagagactccgtgaatcagttgacatgcatgacaactttgaccagattggtcttgcccagaagcttgagaagcatgaattgctggagatgaggaggatcgccgcctacatttacaagaaggctggcaggtggaagcagtcgattgctctatcgaagaaagacaacatgtacaaggactgcatggagacatgctcacaatctggcgaccgtgaactgtcagaggacttgctcgtgtatttcattgagcagggtaagaaagaatgttttgcttcttgcctcttcatttgctacgacctgatccggccagatgtggctcttgagcttgcatggatgaacaacatggtggactttgccttgccgcacctgatacagttcattcgcgaatacactagcacggtggctgatttagtgaaggacaagatctagtcgcagaaggacgaaagagctcaggagatagaggagaaagaccttgcggcccagcagaacatgaatgcacagg

SEQ ID NO: 44872 - DNA, 412 bp, Zea mays
  Clone ID: MRT4577_14092C.1
ctaatgaataaagtttcattttatatttttttaaaaaggactatccatggataggctatgggtagagttggataatggatcgcattcctaggacatgctgtattttgtaatgactaaatcctgcttcggtgaatatcttttgccagttgagttcctcacgttctttgctcataaacagcatcatcatctgcatatccatcaagacttgagcttcaagtacttgctgtgagtgtgagggagatccaacaacagcatcgatgattatcaccttccctgctttcgctccttgggcaacggcctctttacattttgtcaggatcttcacacaatcctggtcgctccagttgtgtagcacacacttaagcaaaactgcatcagctggtggaacgtattccatcatgtcgccggcagc

SEQ ID NO: 44873 - DNA, 293 bp, Zea mays
  Clone ID: MRT4577_140930C.1
ggggcgacgggccccggccccacatgatggaggagtgcaagggagccttgcaggtgatgctggtgatcatggcggacatggactcggaggacattctgagaccggggcggatcttctacggggcaacactacgacacgggcggcgacaagcgctggcgggactgcctcagggtggcctggcctttgtatttcaaggttggaaggggtgcaaggagacgagtggtcgaacacgcccgacatggtgaggggtggtgaggagtggttcaccgttgtggcaaaaggggtgaaggtgg

SEQ ID NO: 44874 - DNA, 4984 bp, Zea mays
  Clone ID: MRT4577_140931C.1
caacagcctttctgttggatgttctgaagccaaacttgccagagcatgcttttcttcggaccaaggttttggagataaacttagtgacttacccaaatgttgctgatgccattcttgctaatggtatgttcagtcattacgaccgccctcgtattgctcagctatgtgaaaaggccggtttgtacttgcgagccctccagcattactcagagttgcctgatatcaagcgtgccattgtaaatactcatgccattgagccacgatggaatctaatgtctccgaaaatcagttgatatgcacgacaactttgaccgaaaaggtcttgaccagatgcctgcgaagtgtaaaatgatcctgatgtcgcgttgctgtcgcttacccaaatgttgcagatgccattcttgcgaatggcatgttcagtcattatgaccgtcctcgtattgctcagctctgtgaaaaggctggattatacttgcgtgccctccagcattattcagagttgcctgatatcaagcgtgtcattgtaaatactcatgccattgagccccaggcacttgttgagttctttggcaccctttcaagggagtgggcactagagtgcatgaaggaccttctactggtaaatctgaggggaaatcttcagattgttgtgcaggctgcgaaagaatattctgaacttctaggagttgatgcttgcataaaattatttgaacaactcaaagcttatgagggcccgacagcaacggcagccgaatttgctttccgtgttgaagaagatgctgtttggagtcaggccgccgccccccaggggcggctcgctccctccagtgcacgaactgggcccgccaggaagggagagcctgggagaaggaggggagagcccttgtgggtcggcagaacatgtatgcgcagctgcttcctctcgctttgccggcgccgccaatgcctggcatgggtggtcctccacctccgatgggtggaatgggcatgcctcccatgggcgggatgggtatgccgccgatgggccctggtccgatgccagcattcggaatgggaggctactgagtggtggttttgcagggagcttagaacctgctgtgcctactcaccttgcaagcctgaggggccggctccttgcagaggcagggggctttgctgtttgggaagccgttccaaggtgctgtggatgctgctcgcaaggctaacagtgccaaaacatggaaggaggtctgttttgcttgtgttgacgccgaggagttccgtcttgcacaaatttgtggtctcaatagggttattcaagccgaggtccttgaaggtgtcggcgaggactaccaggagtgcggatgctgcagcatccgcattaatgttttttgttccagacactatctatatacaaacaatatccttcgtccgattgagggctatgtacaaaaagtcaatcctggtaatgctcccttggtagttgggcaacttctggatgatgaatgcccggaagatttcatcaagggtttgattctctctgttcgttctctgcttcctgttgaaccactagttgatgaatgcgagaagaggaaccgcctacggttgcttactcaattcttggagcatctagtgagtgaaggtagccaagatgtgcatgatcagtttgatgaataatggaactctttcgacagcaacaataaccctgagcatttccttactaccaacccattttacgactctcgtgttgtgggtaaatattgtgaaaagcgggatcctacacttgctgttgttgcttatagacgtgggcaatgtgacgacgagcttattaatgtcactaacaaaaactcattattcaagctacaagctaggtatgtggttgagagaatggatggtgatctgtgggataaagttcttcagcctgagaatgaatatagaaggcaactcattgaccaagtggtttcgactgcattacctgagagcaagagccctgagcaagtgtctgctgctgttaaggctttcatgactgctgacctgcctcatgaactgattgagcttcttgaaaagattgttcttcagaattctgctttcagtggaaatttcaatctgcagaacctgctcatcttgactgctatcaaggcagatccatccagagtcatggactatgtcaacagacttgataactttgatgggcctgctgttggtgaagttgctgtcgaggcacagctgtacgaggaggcttttgctatatttaagaagttcaacttaaatgtgcaggctgttgatgttctcttggataacatccgaagcatagacagggctgaggagtttgccttccgtgttgaagaagacgctgtttggagccaggttgctaaagcccagttacgtgaaggtctggtcagtgaagcaattgagtccttcattcgtgcagatgatgctgcacacttccttgatgtcatccgtgcggctgaggaagccaatgtgtacaatgatttagtgaagtaccttctgatggtaaggcaaaaggcacgggaacctaaagtcgatggagaactcatctttgcatatgctaagattgacaggctcagtgacattgaggaattcattcttatgccaaatgttgccaaccttcaaaatgttggtgaccgtctatatgatgaagaactatatgaagctgcaaagatcatctatgctttcatctcaaactgggctaagctggctgttaccctggttaagctgaagcagttccaaggtgctgtggatgctgctcgcaaggctaacagtgctaaaacatggaaggaggtctgctttgcttgtgttgacgccgaggagttccgtcttgcacaaatatgtggtctcaatattattgttcaggttgatgacttggaagaagtcagtgagtactaccagaacagaggatgcttcagtgaacttattgctctcatggagagtggtcttggacttgaacgtgcacacatgggcatcttcacagaattgggagttctatatgctagataccgctctgagaagcttatggagcacatcaaacttttctccacccgtctcaatattcctaagcttattcgagcttgtgatgaacagcagcactggaaagaacttacctacctgtacatacagtatgatgaatttgacaatgctgccaccacaattatgaaccactctccagatgcatgggatcatatgcagttcaaggatgtttgcgttaaagttgcaaatgttgagctatattacaaggcagttcacttctatttgcaagagcatcctgatctcatcaatgatatgctgaatgtgcttgcacttcgtttagatcataccagagttgtagacataatgcgcaaggctggtcaattgcatcttgtgaaaccatatatggttgcagttcagagtaacaatgtctctgctgtgaatgaagccttgaatgagctttatgttgaagaggaagactatgagagactccgtgaatcagttgacatgcatgacaactttgaccaaataggtcttgcccagaagcttgagaagcatgaattgctggagatgaggaggattgctgcctacatttacaagaaggctggcaggtggaagcaatccattgctctatcaaagaaagataacatgtacaaggattgtatggagacatgctcacaatctggtgaccgtgaactgtcagaggacttgcttgtctatttcatcgagcagggtaagaaagaatgctttgcttcttgcctcttcatttgctacgacctgatccggccggatgtcgctcttgagcttgcatggatgaacaacatgatggactttgccttcccgtacctgttgcagttcattcgtgaatacactagcaaggtggatgatttagtgaaggacaagattgagtcgcagaaggaagaaagagccaaagagaaggaggagaaagaccttgtggctcagcagaacatgtatgcacagctgcttcctctcgctttgcccgccccgccaatgcctggcatgggtggccctccacctccgatgggcggaatgggcatgcctccgatgggtatgccgccgatgccagcatttgggatgccaccgatgggaagctactgatttggttttgcagcataagtggaacttcattggagttgtagatggttgacagtttggaatcaatattcttcattgtaccaggaaactttttggcgagtgagtgaaatcagtcttacccgtagtttgagaagtgcaacctgtgatatgtttacgatgggatcggaaataggatgattaggttgtttcagcatgagctgttgaaagctggtaccatatgtatagtgtgataaaatctttgtagacatttttcttgtataatacttgttggcacagtgatatatatatatatatatcgggatgggcatgccgccgatgggccctggtccgatgccagcattcgggatgccaccaatgggaagctactgagatgtttttttttggcagagagcttagatgatgatttgatatgttcctgtgtaagcagaggcggaaacctcattggagttgtagatggttacattttggaattaatattctttatggtaccaggaaatttttggcgagtgaaatcttggccagagtcatcggataggacggggatgattaggttggttgagcatgagctggtgaaagctggtaccatttgtatagtgtgatgaaatctttgtagacattttgcttgtgtaataataatacttgttcgcacagcgaaggacaaacaaatgtatgctgacttgtgacgtcctgttcattgcaatttgttagtatgtgttttcttgaagaacaaaaaaaaaaaaaaaaaaaaaaaaaaaaaaaaaaaaaaaaaaaaaaaaaaaaaaaaaaaaaaaaaaaaaaaaaaaaaaaaaataaaaaaaaaaaaaaacctaaatacaattaactaacaaaaaaatatacaacgtaatgaactaggaaaaccctgctaaaaacccaacttaatcac

SEQ ID NO: 44875 - DNA, 673 bp, Zea mays
  Clone ID: MRT4577_140932C.1
ggatgaataacatggtgcccacgcgtccggtggactttgccttcccgtacctgttgcagttcatccgggattacactagcaaggtggacgatttagtgaaggacaaaatcgagtcacagaatgaagaaagagccaaagagaaggaggagaaagatcttgtggctcagcagaacatgtatgcgcaactgcttcctcttgctctgcctgctccgccaatgcccggcatgggtggccctccacctccgatgggcggaatgggcatgcctccgatgggcgggatgggcatgcccgccgatgggccctggtccgatgccagcattcgggatgccaccaatgggaagctactgagatgagatgtttttttgttgttgttgcagagagcttagatgatgatttgatatgttcctgtgtaagcagaggcggaaacctcattggagttgtagatggttacattttggaattaatattctttatggtaccaggaaatttttggcgagtgaatgattaggttggttgagcatgagctggtgaaagctggtaccatttgtatagtgtgatgaaatctttgtagacattttgcttgtgtaataataatacttgttcgcacaaaaaaaaaaaaaaaaaaaaaaaaaaaaaaaaaaaaaaaaaaaaaaaaaaaaaaaaaaaagggcga

SEQ ID NO: 44876 - DNA, 750 bp, Zea mays
  Clone ID: MRT4577_140933C.1
ctgtccaagtagcatagagagtccatctggcacttggccaacttctgaagcagttgagcaacaaattgtggttccatcactccatgctatgccagattttgcccgagtatacagcttcctaggaagcatatttgatcctgatacaagtgggcatttgcagaggttaaaagtgatggatccaattgatattcaaacggtactactacttatgagaaatctttcttgggaccttaggagtcctgactttgagcaacatctatggtggtggggaccatgttaaacctgaaggcatggaaaatcatggatctcctcagagtggccatcttccattcctggtaacaagtgaatgagagcacactggcaatttgtggtcgaagctttggttgtttccacgagacacattcttgtgtgttctcagcaatcgagttgtggacggctggtctggcaatttatgaatgccatgtctgccaatctgtatagcttccaataatggtctgaccctagactagttttgttttccacgttcatgtagatagctagttttgtgtgctcatgcaattttttactgggtggagcctagatcgatatgtttttgttgtatcacttgtgcacgcgtgtatgtaagtatgtggaaccttgtaatgcttgaggtacttgagagtcttcggttaagacaaaaaaaataagcaaaataaacacgagatccccatcgtcgactatataatgagaagttttttttagttgggcccc

SEQ ID NO: 44877 - DNA, 228 bp, Zea mays
  Clone ID: MRT4577_140934C.1
gccgggctctcttttccgccctccacccctcgcgagctctccacccctccacacgaggcgctcctcggcggtggagaacataacagaagagataccagcactatgtatcctgcatattgatgggagcccatagataaatcatttaataggcagatgtgactagcagccaccgccgccagtacatatacagcccaccaagcaaataccatataagggggaccatgccac

SEQ ID NO: 44878 - DNA, 510 bp, Zea mays
  unsure (1)..(510): unsure at all n locations
  Clone ID: MRT4577_140935C.1
gctctctctctctctctctctctctctctctctctctctctctctctctctctcgcgcgggcggaaggcagacaggaggaagcacgagcgagagagagagcgaccgcgagggggagggacagccagagaggggtgcagggaggggggatgaagcgcgcgccggacgcaaggacagagagaaatactgagagagacagacagccagcacgcacacacacacacaaaacgagcgagcgggaggagaaggggagaaagcgcgggctgacgaacgagcgaactcacacacacagagtgcggcgcactgacgggccgccaggcgggcaacaagccgggcgagccgcgtgaacgaacgggccgacgcgcggggagaggcaggcgcgctcccgcgcgcgcgcacactgcctcgctcagtcactgagtgggcgcgntcggacgggcgcgtccggagtgagaggcgcagctcactggcaggcggagagacgggcacggacagcaggcagagagcgcgcg

SEQ ID NO: 44879 - DNA, 205 bp, Zea mays
  Clone ID: MRT4577_140936C.1
gactcatctctacagaccaaggtggaaaaataggagagtaacggtaccagttctcctccgcctttcttatctatcctgatccaaaccctgcgaggtggacaacatttcattccccacggcatccgggaaggcctacgtcgtccacatgaccaccgaataagtcgccaagccgtccccgatcccgacctaccccaaatgagctaac

SEQ ID NO: 44880 - DNA, 371 bp, Zea mays
  Clone ID: MRT4577_140937C.1
atatttttttttttttttattctgcaatacgggtatgtttataagaacaggcggggctttcgacactcaacaggttgcaaaaaacccggagaaccccgtcattaaaaaaagggcccactcatatctttgcacctgatgcgaaaaaattcaacgctgattcaggaaagaatgattcatttacaacttatcaagccaaatatatagctatctatggatgacaaccacgcacaacaaataagcaagtcagcaacccatctcacgaaccaggagaacgacaggcacaaggtggtcggaaatgctaaagggtgcccttaaagacggggggaggcctatccccaagacgacttcaggaacgatggaaacaaacaaac

SEQ ID NO: 44881 - DNA, 541 bp, Zea mays
  unsure (1)..(541): unsure at all n locations
  Clone ID: MRT4577_140938C.1
tttttttttttgaatccacanaatgntnaatagatcctgggtccatattccccagatgtnaacatgtcntgcatttccgttccacacattacagcaggcggnttaggncatttctttctttttaagcnnntnnaagctacagatttacagtgctagcncatgtgttgttgaagtcggctggtttcatctttccaccgggccacctctgacccctatgttcngcncacngccttccttcgttttctctccctctctttcctcctatgtttcctgtttctggctgttcgttccccttttccttcctatntttgcntgttccttcttttggcttcttgctttcctcnccttttcttcctattttcntggtttgattccggggggctgccccttctctctctttttgtngcncncncttgggnccttaccttttgccttgccttgtttttgtccttcattctagtgtgccctggtggcttttatcctttctccttttcggttcttgtttgtcgttggcttcttccttcttgggcctgttgctcac

SEQ ID NO: 44882 - DNA, 259 bp, Zea mays
  Clone ID: MRT4577_140939C.1
acctcgaggccggccgggccgggattcctctctcccgcgacccgtaccccggctcccggttcaacacaaatccctctcgcctcatccccaccagctcaaagccgtcctatcgtcctgtcgagagaagccatgccggctcgtgccaggacgattgacgctgttgacactgacaaggcgacgacccggagctcctacggtgtcctgcagaatcaccgcaggaggatctttcccttcactacgctgtatgctgcaccaagca

SEQ ID NO: 44883 - DNA, 347 bp, Zea mays
  Clone ID: MRT4577_14093C.1
ctagctcgcatacagactaataatctctttttcacttcactaacaccaactagcaactctgtctctgttacaataatgcccgctcgctcctactcctcccagccgcagctgatacacccggccgcggtcctggcagcgacgctgctgctgctgtcggcgtagcccgacacagcctctacccatgtgacctacagccaggtgacatcatccatagcgccatgcctagcgaacacgatgagcaacacgacatcgacctccgaagcgagctgcaacggtctgcgctcgctcaacaaccgcgcgtcgtctgctgcgcaccgacacgccacctgcaactgcctcaatagcat

SEQ ID NO: 44884 - DNA, 1056 bp, Zea mays
  unsure (1)..(1056): unsure at all n locations
  Clone ID: MRT4577_140940C.1
aaaaaaaaacgaaaaaaaaacggtaacctcgggccgggccgggctctagaaccctagcgcccgtcctgccgccgctgcagccgccatcgcacggccatgggtatcgatctcgtagccggcggccgcaacaagaagaccaagcgcacggcgcccaagtccgacgatgtctacctcaagctcctcgtcaagctctaccgcttccttgtgcgcaggacaaagagcaacttcaacgccgtgatcctcaagcgcctcttcatgagcaagaccaaccgcccgccgctctcgatgcgccgcctcgtcaggttcatggaggggaagggtgatcagatcgccgtgattgtgggcaccgtgaccgacgacaagaggatcagcgaggtgccggcgatgaaggtctgcgcgctcaggttcactgagacagcgagggccaggatcatcaatgctggcggagagtgcctcaccttcgaccagctcgcgctccgtgccccgcttgggcaaaacacggttctgctgaggggtcctaagaacgctagggaagctgtcaggcacttcgggcctgcaccaggagtgcctcacagccacaccaagccttatgttcgctcgaagggtaggaagtttgagaaggcgagaggaaggaggaacagcaggggcttcaaggtctaagtggccactgccttgccaatctagtgccgttttgctcgtgtcagctcaatattaccgttttggtgtcatagttgtaatgttttagttgtcggaatctcgtgtcattatcggatatcgaaccaatcaaatttcgctccttttttgtttttgccatgagacttgcccgtcacgaagatgctcacatatcattgtgggccgtaactatgtgaaagtctagctgcccttttgctttgctcgtctatcttcacttgtcagctgttcattttaatccagcgccttcacaattttttaacagtgaggccgcctgaaacgaactatactgatacagtgacattatagtccgttattttggttgcacagcncaaaaaaaaaaaaaaaaaaagggcggcgctcgcg

SEQ ID NO: 44885 - DNA, 668 bp, Zea mays
  unsure (1)..(668): unsure at all n locations
  Clone ID: MRT4577_140941C.1
gcagcccaaacgggcggtaaactccgtccaaggctaaatacaggcaagcacaatttctgcagtattaaatgtcctgagtgtctcgctagtcgccgcctcggccactcggaggctcgatgcctcccccgggtgccccattcggcccctccgtagtccaatgaccactgaccaggaaggttgtcaggctcagcgctcagcctgtgtgtgcacaggcagtagcacagtgcctgtgtgtgctgcgcaggcaagcacaatttctgcagtgtttttgctgatcaatactttgttttaccctttattttcacttcattcaggaagattgttttgattttttgtataaaatgggatgcaaagtactccagcaataagcaatttgaaacctaggctcttcgtgacatattgaagccagaaggacttctcaaggaagcttgccctgttttctacatcgaagtcgaagcttctttgggacttctctgtgaaggttgctatactctcacatagatgcctacaatacctaatgatgtgaatgagttaaagaatacttacaagctatgttgaaaagttcatccagagatcctggntagttntataacttttgcacagggcacatattttttgttctgctgtggatatacatgaattgtcactctctttatttctaaaaccac

SEQ ID NO: 44886 - DNA, 221 bp, Zea mays
  Clone ID: MRT4577_140942C.1
tctagctcacttgatggtggccgcccttttttttttttttgggtgggttttttttgattgttttaccggaaaggccaaaaggggttgcaagattacaggagtaaaggagggagggtggtatggaacccttgcagataggaaagatatagtggtcaacgggaaaagctacgctaaactcatacaggagacaagctctgaaacggtggaccctatataagact

SEQ ID NO: 44887 - DNA, 501 bp, Zea mays
  Clone ID: MRT4577_140943C.1
aattcggcacgaggcctgcttgccccctgttgaccccttgggtacttcttgaacccctcgagcactggctgccaagctgactcgcctccaagtcttcgcgaacgccttggtgccacccttctcctcccaccccaatgaactgacagcacctcctttccaggtactgttcaccagggcaagggaaatgccttcagcgccatcaagcctgcttgcggagtttgactgcccctgtttgactagtgacaaggagaaagtaatgcacccctttgaagcaattcttcgtgctgctcaggaagccaattgtgcctccccccaatgggtttgcaccttgcttctcaggccaaggccctggtgtctgggattacattcgggtgaatgtaagtgacctggctgtggaggactgagtgtttctgagtacttggcattcaaggaacaactggtggatggacaatccaaagcaacttttgtgcttgagcttgattttgagcccttaatgccttc

SEQ ID NO: 44888 - DNA, 550 bp, Zea mays
  Clone ID: MRT4577_140944C.1
gccaccgtttgaatccatcgctatggcacgctcctggtcctggctccgcggcgccaccaggcagccagccaccaccctcagctccgcgccttgctcatgccgccgtccgccgttcccaggatcccagctcctgccgtcggccgccgcgcgtgaccaagcctcgccgcgacgctgcctcccctatccggccgcccgagctcgtccgcgcctgcgcctgagtgtctcgctagtcgccgcctcggccactcggaggctcgatgcctcccccgggtgccccattcggcccctccgtagtccaatgaccactgaccaggaaggttgtcaggctcagcgctcagcctgtgtgtgcacaggcagtagcacagtgcctgtgtgtgctgcgcaggcaagcacaatttctgcagtattaaatgtcctgatggactgcaggctggcagtgtttttgctgatcaatactttgttttaccctttattttcacttcattcaggaagattgttttgattttttgtataaaatgggatgcaaagtactccagcaataagcaatttg

SEQ ID NO: 44889 - DNA, 452 bp, Zea mays
  unsure (1)..(452): unsure at all n locations
  Clone ID: MRT4577_140945C.1
tcgagcggccgcccgggcaggtaaaaaaaaaaaaaaaaacaaaaaaaaaaaacaagaacaaacaccagactaaggaccaaactatgggcaaaatccttgacactgccctcccccctgcggcgtgcagtcccgcgggcctcccgtcggcccaccccccccccgatttcccgggccggtggcccctccactgggccgcggtggtgacagcgctgaaccctgggggaacccccatgcgcgttccccctgggtagcccctttccccctgtcggcccctggtgctataatgcccgtggcccgggaccatgccccccctccctacccctttctccaaccgtgaatggcgccctgccctggccccctgggcccgcccctttaaaagcggcctanagcccggggcaccgcgagcgttacccctgcccgtgccctttaacctggcgccccccgctttcccc

SEQ ID NO: 44890 - DNA, 347 bp, Zea mays
  Clone ID: MRT4577_140946C.1
attatcattatgattattgaaaacacaaacaacctatacaaaagccatggcctccctgcaagaaagcttgccgacgagcccaacgcttttacattcattcacgaaagcagacctcaggtgaaaggaagacgaaattcaggagcgaaagcaaggcgcagagcgatgttgaggcaattcggattgccagtaatcaaaaagatccgaaatatgtatatatcaaaatatacagaaaggaaacaagaacacgccccgttttgacagaggaagagacttctcgatagaaccaggagcggccattcaaagcaaagcagagcaacaaatatcagcagcaggaaatttaacaaaac

SEQ ID NO: 44891 - DNA, 265 bp, Zea mays
  Clone ID: MRT4577_140947C.1
cattgtcagaactaaggttggaaatgccctttaaaggacttggtgaggcatatgctaggacaatagagctgctttagaaagaaattgagacatgttttgtcaggacagatataagtttaatgcaggcttttgaacagatgttttaaaacaaatttgaccttaccaactatttttttcttctagccaaatcattgtacaggagtttcatatatgataaaaagtgttttgttattgtttttgctttcttggcaggggagaaccccta

SEQ ID NO: 44892 - DNA, 706 bp, Zea mays
  Clone ID: MRT4577_140948C.1
cccaaacctctgtcgaaagtttcacctccggtcgctggtttcctccaatctccgtggtagttcagtgcgagcgggcggcggggtttgagctcgatggtcacttccggcgaacaatcggctgcggtcggcgagcaaggggaaggcggcggtcgtttccccggcggctgatgctcctcccaccatctctgctccgcgacgggcaaaaccatcttcagatgtcagcaagagcatgtgtttagacctttctgtgaaggataattctgccaaacccccacggaggcactcaatacaaaccaagccaggagctagcccaaggccaacaccttctggaactgtgactccggtgtctggggttcggtcaaagaggtcggaaagccaggggaggtttgataccccgacatcagaagtgtccatgtccatctcaaggcgcaagttcagcacgctttcttcaatctcgtactggatgacacagatcaggctggcagaggctgcttccaagcactcggtttctctgggcttctttaagcttgctcttgaatcagaatgtgagcctttggaccggatgagggaagaactcaagtcctacgtagcacggcatggcctggcgacagaattggaggacccagttaaggacattctccagggttatgatattttggatgattttgggaagctggaagatctctgcagagccctcacagcaacc

SEQ ID NO: 44893 - DNA, 1605 bp, Zea mays
  unsure (1)..(1605): unsure at all n locations
  Clone ID: MRT4577_140949C.1
gttatcccgcgggggcacgcgggtatgcacaccatctgtgactctgtgagtggctgcggcgccggtatttatacgctcctctttcgccaaatacggagaatcggagaccccaaacctctgtcgaaagtttcacctccggtcgctggtttcctccaatctccgtggtagttcagcgcgagcgggcggcggggtttgagctcgatggccacttccggcgaacaatcggctggcggcgggtctgcggcgagggcgtcgaagctgcggtacccgctgcggtcggcgagcaaggggaaggcggcggtcgtttccccggcggctgatgctcctcccaccatctctgctccgcgacgggcaaaaccatcttcagatgtcagcaagagcatgtgtttagacctttctgtgaaggataattctgccaaacctccacggaggcactcaatacaaaccaagccaggagctagcccaaggccaacaccttctggaactgtgactccggtgtctggggttcggtcaaagagatcggaaagccaggggaggtttgataccccgacatcagaagtgtccatgtccatctcaaggcgcaagttcagcacgctttcttcaatctcgtactggatgacacagatcaggctggcagaggctgcttccaagcactcggtttctctgggcttctttaagcttgctcttgaatcagaatgtgagcctttggaccggatgagggaagaactcaagtcctacgtagcacggcatggcctagcgacagaattggaggacccagttaaggacattcttcaggtttatgatattttggatgattttgagaagctgaagatctctgcagagccctcacagcaaccaaaaaagtctgacaaggctgctcgtactgtcacaaatgtgtcaccgaatggtaacctgaagccaaggtcactgaactctgatgctactgaaagcaaggaagctgtgaagaaagagggcattcagaaagtaaatcctggtgcaagggtcagaggctcctgtaacaggaatccagtcaaaaacaccaccgcaaaggaagcagttgccaagaacaccggtaaggaaaccaagaaaggggccaagggtcagcaggaagttagcgaggctccgtcagcccttccaaatcaggaatctgctgatgttgtgaaggagatcacccatgaagataaagagaacatgggcgatattgaaatggcagtggatgttgccgtagcccaagatatctagaacagccggaccaacttcagattcgatccccttttttttctatcgctgaagatgaagtgttagcgtgtggttgcttattttggttttcaattgttaatatgttattagtagagcttgtctgtgtgattgcttgctggctggaccttgaacggtcttcaagagcgtgtcataagttgatgattgctttcattcctctgtcaagtttgcggctttgcatgtgctaatccgtgcaactgaatatagttgaatttatcttcttttcgtggttcctccgggcaaaaaaaaaagagcgtgtcataagttgatgattgcttttattcctctgtcaagtttncggctttgcatgtgctatcgtgcactgaa

SEQ ID NO: 44894 - DNA, 236 bp, Zea mays
  Clone ID: MRT4577_14094C.1
aaggcacctgatagtttatctctcatttctgaaatcagcatctaaagcaactttacgacattatcacaacctccatctgctaactcttccaacatgatctaattcaaatcaaataccacaaatacctctttatactaacatcacatatgaacatcataatcaaattcaatcattattctataactctctactcatttaaaataactctatacaaactctatccttctaatacccct

SEQ ID NO: 44895 - DNA, 1451 bp, Zea mays
  Clone ID: MRT4577_140950C.1
cattggggcctcgagaggccggccggcggccccaacgatcctaaccccaaacctctctcggaagttcctctcgcgtggccggtttcctcaacctccgtgtcggctcgatagtttcgcgagcgggcggggcgggggtctgagctcgatggccacttctggcgagcaatcggctggcggtgggtctgcggcgagggcgtcgaagctgcgctacccgctgcggtcggcgagcaaggggaaggccgcggccgtttcctcggcggcggatgcgcctcccaccaccatctctgctccgcgtcgggcaaagccatcttcagatgtcagcaagagcatgtgtttagacctttctgtgaaggataagtctgtcaagcctccacggaggcactcaatacaaaccaagccaggagctagcccaaggccaataccttctggaactgtgactccggtgtctggggttcggtcaaagagatcggacagccaggggaggtttgatactccgacatcagaagtgtccatgtccatgtcaaggcgcaagttcagcacgctttcttcaatctcgtactggatgacacagatcaggcttgcagaggctgcttccaaacactcagtttctctgggcttctttaagcttgctcttgaatcagaatgtgagcctttggaccggatgagggaagaactcaagtcctatgtagcccgccattgcctagcgacagaattggaggacccagtcaaggacattcttcaggtttatgatattgtggacgattttgagaagctgaagatctctgcagagccctcagagcaaccaaaaaagtctgaaaaggctgctcgtactgtctccaatgtgtcagccaattgtaatctgaagccaaggtcactaaactctggtgctactgaaagtaaggaagctgggaagaaagagggcattcagaaagcgaaacctgatgcaagggtcagaggctccaataacaggaatccagtaaaatgcaccaccgcaaaggaagtagttgctaagaacactggtaagaaaaccaagaaagaggccaagggtcaggaggaagttagcaatggagatagcgatgcatcctcagcccttccagatcaggaatctgttgatgttgtgaaggagatcacccatgaagataaagagaacatgggcgacaatgaaatggctatggatgttgccatagcgcaaggtatctagaacagccggaccaacttcagattcaatcgttttttattgctgaagatgaagtattagtgtgtggttgcttattttggttttcattgttaatatgatagtagagcttgtctgtgtcactgtgtgattgctgaaccatatacgctcctgaagagtgagtgtgtcataagttgatgattgcctgtattcctttttcaagtttgcagctttgcatgtggtaatcgtgcatctgaatatagtcggatttatcttt

SEQ ID NO: 44896 - DNA, 431 bp, Zea mays
  Clone ID: MRT4577_140951C.1
gcccccaaaaccttcccagaaaggcgacggagtcaggttcgaatcgaaatcggggtcaccgcggcggcggcggcggcggcgggtctactcatcagagactacagagcagggggtctcacgctccggcggcgggacgatggccatggcgccgtcctcctcttcctccggtggcggcggcggcgacggcgccaacgccgccgacgcgatggctctcgtgcaggggtacacggccgaggagctcgccatcgcgggggagttcctcaccacctggctccccttcctctctgccggcctctgtccctcctgcgcctcctcgctccgcggccgcgtcgactccctgatcacgcgaggccgcgcagctgaagaatcgccgccggtcgatcagattgagccgtcagggtgggactcggatccagcgggcccgcagaacc

SEQ ID NO: 44897 - DNA, 387 bp, Zea mays
  Clone ID: MRT4577_140952C.1
gatcagctttcgactctgttccgagcacaccaaggcagagatcagcttttgactctgttccgagcacgccgacgccgaaaccactggctggactccttttcaaggacaccaatgcagagatcactgctggcatgtaggccaagtagagccaaatcacgtaccgtccgcagaatgtatggctaagagcccaaaggatacatgcacccatgagtgccgaggactccaatgagcacctgaagacttacgccgaggactagggaaacaagggtcgatgcactacaaaccgtgttccaatacttgctaaggtgattcatgacaacttcagtactgttgaggggctgatgacaactgtagatgccatcactgccacacaaaagactgcagacg

SEQ ID NO: 44898 - DNA, 393 bp, Zea mays
  unsure (1)..(393): unsure at all n locations
  Clone ID: MRT4577_140953C.1
ctcctnngcccgcaattttaccccctggtttaagaaatattgattggggctttttttggcccttggggggaacgccattggggtctttttccacaaaaaaaagcccccccccccaacccaatttttaccctccgcaaaggcccaactttgtcccaggggggggggttccccccggggaacttgcccccatttcaaagttttttggcccggggccggggattgcccccaaccgggagtaaaaattttccctccccccccagggggggggggaatataaatttttttggggggacccccccccattttccaaaagaattggttccccacccttggttttgggattgggccaagacccggggggtttccccgggtggggggttcgaaaatggcccc

SEQ ID NO: 44899 - DNA, 437 bp, Zea mays
  Clone ID: MRT4577_140954C.1
tatttcttctctcccagccgcaattcacttccggccgccaatgagcttggctcctggccgaccgcaccctgctcatacatcctctctctctttctcttcatttctacttcagccgtacaagcatttgcactagcctctcccagctgcaaccgctaggagctggccgacggtgctctctttggccgcttggcaagttgcgctccttctctctgttattgtgcaccgagctgctctttgttgattttttttcatttctacttgccgcactattactcgaccgccaaggagaactagacatttgcactgtgcaattgaactcgaatctagtcctcatttactcgaatcccttacgatgtgattaaatgtatgagatggatatcttgtagtgggatcgagttttggaggtaaaaaaaaatcatagatccaggccccgtgat

SEQ ID NO: 44900 - DNA, 937 bp, Zea mays
  unsure (1)..(937): unsure at all n locations
  Clone ID: MRT4577_140955C.1
ccggccgggatataatctttctctcgagcgtcgttgcgtctttgttgtagtctaaccctagcgcgcgccgccacacctgccgttgctaccgccccgtacctcgcttgctttcccgtcgccgaaatgacgaagcgcaccaagaaggctggaattgttggcaaatatggaaccaggtatggcgctagcttgcgtaagcaaatcaagaagatggaggtatctcagcactccaagtacttctgcgagttttgtgggaagtttgctgtgaagaggaaagcagttggaatttggggatgcaaggactgtgggaaggtcaaggctggcggtgcttacaccatgaagtagctttttgctgactctcatcttgtgttccataaccgtaatattttgttaagcatggcccaattctgttttctgtatttgcagcactgctagtgcagtcactgtcaggagcacgattcgtcgcttgagagagcagactgaagcatgatttagcttgctacatcagggttctcctagttgctgttgtcgggaatgttgagctcctctagttggatcacgagactcgctaaaagttgggtgctaagatttgtagttggttaccgttgcgaatttctcaagtgatattatcctatgcttgtctcaatgactcaaatttggttgtggtttctatgcttttggctgtgtcaatggtttgccattgttgttgaaattcaacccttaatgctgcctctatataataaaaagttttttattggtctggtttagaaagcaagattatatacgcttctttctacttggcagcttcacaatgtagaatccaccagtgtaagtgcaactgtgcaagtatggtcatctgcacataaactgtcgggttttcttattttttcggagaactactagggatggtctggtanttgaaaacttcagttcggaaaaa

SEQ ID NO: 44901 - DNA, 738 bp, Zea mays
  Clone ID: MRT4577_140956C.1
ccggccgggagattcttcattccaaacctcacacatcctctccccagaaatttcaggccagtctcacttcgtctcactctcacacgagatcgatcgctttcgttgtcacatattactactccgattcaatcaatcaaaatcgtcaagatgaagtcttctctcctcaccgttttcggccttgttgctgccgccgctgctcagagctccggcgacctcccccagtgtggtcaaacttgtgctggcaacatggtcagcgctgccaagtccaaggagcttggatgtgacgctggtgatgttagctgcctgtgcaccaaccaggacttcatctacggtctccgtgactgctccgctgctatctgcaactctgagcaggccgctgctgttgtcgcctacggccttgcgctctgccgccaagctggtgttcagattactactggtagtgctggctccgtctcggcctctgctactggcactggtgccgtccgaactgtcctgagcacccttgttgagagtgacactactatcacctccgccgtttccaccattagcggcactgccactggcggcaacgaggatgacctctctgtcagcacctacactagtgttttcaccaactctgcaggtgatgaggttaccagcaccatcaaggagatcctcggcggtgtcgccctgaccacctacacctctggtggatcccacatcattgagcctatcgagactgcttctgcctctgcctct

SEQ ID NO: 44902 - DNA, 220 bp, Zea mays
  Clone ID: MRT4577_140957C.1
tcttgaccttgcaaggccttggtccacgagtctcgcgtcactctctcagccaaggtcctctccggccactactcttgcttccgcggcttcctgcttcgccgctcctctctcgccccctctatccctcctgagctatggtcgtctctctcttatgtaccatgtgcgtatttgattaaattaactaagcgatgtaccacaaccatatatatatgcaggagac

SEQ ID NO: 44903 - DNA, 230 bp, Zea mays
  Clone ID: MRT4577_140958C.1
gagctctcttgtcggcggccgcccttccttttttttttttttggatacaaacaatttttgatttttcaaaccgaagggcgcggcatagaaacataggtgcagtgattctaaaggggacacaaggcaccccccccggtctaggctgggtgaaaactttctcaccctcccttaagttttggaaatggatcattcgaggggcaggtattacgaattaaaaaccccgcaaggtt

SEQ ID NO: 44904 - DNA, 503 bp, Zea mays
  Clone ID: MRT4577_140959C.1
agttacaatccgttgagaaatgagcagctaacccaaggggaccaacaaaagcgaggacaagagggagccggcggggtggccacccagaaagccggcgggcacccggcggggaggaaggaggaggacgacaaagcaggaccggggggggcccccccccaacccaaaaggaaaagggccagcaaccaccctaaggacacaaaaaaaagacaacaggggaacttgcaaaggccccaccccaaaaaggcaacagaaacggcgtaagaagaacaccctgaaagccaaaagggcggaacacgaaagcccgggcggggaaaaaaacagcatccgggaacccactccacagtgaaagagtgagcaagacgcaggaaagattgggaaaaaaaccaaaccggggaggaaaaaaaaacactgatatatgcccccgcaaaggaaaatgaggagaccaaaaaaggtgaggaggctttggctgtcgttcataggccaacccaccaaatacagggaga

SEQ ID NO: 44905 - DNA, 756 bp, Zea mays
  Clone ID: MRT4577_14095C.1
cggaagcggctgactcggcgtcattacgacgccgtttcgctatcgcgttcccatctccagttcgtttatagccggcgaagaattccttcgttactttacttccaagcggagtccagggcaaaatttcacagtagtgcgcagctttagttcaatataccctagcgcctctcttcccccacagggctctttcccgtatgaacggggcccatatcgccgccgcctcgtcggaggccggcgggtcgtcctggtcggcctcgtcttccggcgtctcggtggcggcggcaggtggccgataggggtggggtgagagccgatggcggcgatgtgcacgatcttgcgctgcctctcgggatgtccttcgcggcggtgcttgcccaggttctaaatagatgcgctggttctgaagggggattacgacctgatgtcctctcaaagatgtgtacctcggcagtgaaggagtcattaacaaatatttatggtgacagatttcagagcttcatgagtaacttttagaaagcttttggtagtacattgagaaccattcaccttatcaatgaaacacctgtttttgagcaagatgtggagcaatgttcttacaaagatgatgattctgtacctcaaatcaagttgggtggtgctgattcattacctgaaataaaggttggtggtgctgattcacaaaggcagatacatgatgtgcagactgacatgccctcgagttcaatgaatagccagattgttcttataacaggcatc

SEQ ID NO: 44906 - DNA, 212 bp, Zea mays
  Clone ID: MRT4577_140960C.1
cagaactactgcgaatgagcttgagtaatccaaaattcagggaagaagactggtgctaccaggaatacaatgacccacagacacaacatgcgtaggatgctacaaagcgctgaattgcagaagcgatggattacacagctgtggcggcagtactgcctaaggatgcgtgacacagtgacatgtgccctaaccagaccccgactgcgaaagag

SEQ ID NO: 44907 - DNA, 149 bp, Zea mays
  Clone ID: MRT4577_140961C.1
tctgagccagcctcggcgactcgaaggtgaggctctgcggcgccatccagctttccaacctgcttcggcatcggcatcggcgtctccattgccggctccgtcagcatgcaggcgatccggagggccggctgcttccactaaagagagga

SEQ ID NO: 44908 - DNA, 409 bp, Zea mays
  unsure (1)..(409): unsure at all n locations
  Clone ID: MRT4577_140962C.1
ctggaattctgcanaatnnctnacactggcgggcgctcggcctgcctntagagggcccgggggggcctcatatgacccgaatcacaatttactggccgaaggtgtacatcgcacggacagcctataacccaggcgttacccttgttactggccctagcatagatcttcgttttcccaattggggggggggggtacacaccccccctgaatccttttccaaaaanntcttcctcctgaccccctaacctacacctactccttnatntcatacacaccttcttntttctttntttcccttctatctacctactnnccccatcctntacatatntcctcactcacctctcactcttcctacccctttactttctncnaattctattcatnnnanccctataatccataccca

SEQ ID NO: 44909 - DNA, 135 bp, Zea mays
  Clone ID: MRT4577_140963C.1
gatctagacatcgtgcggtcgattactaatgagctcgtcgacctcttattcgactccgtatcggaacctctgggacgcccagctgtccctatacggaatcagattagagcttgacgatctcattaagctagctgc

SEQ ID NO: 44910 - DNA, 327 bp, Zea mays
  unsure (1)..(327): unsure at all n locations
  Clone ID: MRT4577_140964C.1
aaaaaaaatagaaaaaaaaaaaaaaaaaaaaaaaaataaataattaaaaccaaagaaaaaaacaacaaaaacganatttacattaaaaacaatttcactacctccccacaagatcaatataattcacatgcccaaaaaatacaacacaactactataaaaatctattgataacttaataaactctacttgtataaaatccatcttaacaaaatatcctgaacaaccacaatttcaaaaaaaaaaaaaatatgccaacccatatacaacatccaagcttacttacacttgcattcaacgtcatacataatctatactgataccaaaat

SEQ ID NO: 44911 - DNA, 459 bp, Zea mays
  Clone ID: MRT4577_140965C.1
cccacgcgtccgcccactcgtccgtccacacgtacggccacgcgtccggagagcgcagaatcattgatggagccttgttgaaaaatcatggacgtattcttccgagctatccagagcatgttaccattgtactcggatgataatcagggtcatggttatcatgtatccgttgatgggctgctaatgtacaatgattcatggaacaatatttgttgacaaagattgcatcctatgcttaaatacaccacacatcaggttcatctgctggcctatacggatttcaaggcttaaccttactgtgtggggaatggattgacaggaaaaggatctcttcagtgaaacattattttctcacaacatgcttgtagtggaggacttgccatggacgatggacctgatcatctattatattagagtcgagccactgcatgatctgttttagggatgaccgtggatctg

SEQ ID NO: 44912 - DNA, 384 bp, Zea mays
  Clone ID: MRT4577_140966C.1
gcgtcactgacaccgagaaaaggtggagacgggcagggcagctgggtgcctgggcttcggctgcaagttgatgagcgagcgagcacgatggatgatcagacgcacgcagcaatggtgtggtgtggtgtggggtggcaaataaaggtggtgtttttttttactccctgaatttggccaaagtggatgaggagaaggcggcggcgatgggatggtggcggaggaggaggaggaaggaaggaaagaaagggactgcatgtccatgaagcacaacaatgtactacggactacggttaaagcaggaggaggactgcactgcactgcgcgccaccacgtgtgttgtgttgtgtcattgtgtgttgcttctgcttgctgcacgctgcgcca

SEQ ID NO: 44913 - DNA, 211 bp, Zea mays
  Clone ID: MRT4577_140967C.1
tccactcgttcggccacatcgagaacacgatcgagcacacaagcacgaatacttgttgaggaggaaccactaaccaggaagccgtgcaagcattatgggaatccgtcaagaagggcagcgcgggcaccggtccacggggcattttttccaataccggaaaccaattcggggggtttaagacaggacccgggggatgagggacgggacggga

SEQ ID NO: 44914 - DNA, 230 bp, Zea mays
  Clone ID: MRT4577_140968C.1
ggccatgaattatattattcaagtgacttgaatgaatataaatgaggcttgaaatagttaagccagcaaatatttgttgatgagatcaacattcaacaccgtggggcatttgtcttaaacactatttaacgcttgctggtattctaggcactatctttgtttatgtttccagctccattacttgttttgtgtgtgcatcaaactaagccctgatatgtttattgtaaatc

SEQ ID NO: 44915 - DNA, 351 bp, Zea mays
  unsure (1)..(351): unsure at all n locations
  Clone ID: MRT4577_140969C.1
tnctttcantacaggggggggaaaaaaaaaaaataccaaaaaaaaaaaaaaaaaaaaaaaaaaaaaaaaaacaaaaaaaaaaaaaaaaaaaaaggaccgcgtcgggcatcggttcctggtctgggctatactgctatcccctcccccaagccggcaccagcccaccaccagcaggggaaccccccgccctcgttcctcccccgccggggagagaactacaaaaagggggtggcccacggcggcggggggtccgatgaggtcggccactcgacgttcgggggccgctaggatcggaactcccttcttaaggaacggatggcggagcagatgatcccctcctgaggggggggg

SEQ ID NO: 44916 - DNA, 645 bp, Zea mays
  Clone ID: MRT4577_14096C.1
ggccggccgggccgggcttccgcatttgcttcagcggctaactcggcgtcattacgacgccgtttcgctatcgcgttcccatctccagttcgtttcatagccggcgaagaattccttcgttactttacttccaagcggagtccagggcaaaatttcacagtagtgcgcagcttcagttcaatataccctagcgcctctcttcccccacagggctctttcccgtatgaacggggcccatatcgccgccgcctcgccggaggccggcgggtcgtcctcgtcggcctcgtcttccggcgtctcggcgtccgggcgctcctggctgctcaagggggtgcacctgcggcggcgccgccggtggcggcggcaggtggccgttaggggaggggtgagagccgatggcggcgatgtgcaggatcttgcgctgcctctcgggatgtccttcgcggcggtgcttgcccaggttctaaatagatgtgctggttctgaagggggattacgacctgatgtcctctcaaagcactataccgatgcagtcagtgataagtttaccaatattgatgaatcttctgctcatgacagcatgtaccacctgccataatatcacttttcacaaatgaaaaggagaatcatgttcatgaacgcgat

SEQ ID NO: 44917 - DNA, 379 bp, Zea mays
  Clone ID: MRT4577_140970C.1
tgttgcacgcgtccgcggacgcgtggggcggggggagagaaaacaacacagcgcgctacacaccaagagcaagaaaagggcagcaagcgaggacaacgaacgagaaggcaccacgcaacatggagcagcaaaccagggcacagcacctccggcacccgaggcaacagagagacactgatggcgacccgaacgccgcagccccacggctacccagcggaccggaccaagccgacagaggggacccaaacgacgccgaacgtggggaccctcaacagccgcacgcagaggacatcgccccccatgaatcaagcccggcgccgggctgccggccaccaaaaaccagcgagcgccgacccaacaagaccgagaacccaggcca

SEQ ID NO: 44918 - DNA, 358 bp, Zea mays
  Clone ID: MRT4577_140971C.1
gagtctactagtcggcggccgcccttcattttttttgttgtttttatttttacttgctttttctttacatttttttatgtttaaggttttttcaccttaactagtgccagtaacaggcccgggggggaataccgttttaatgttgaaagcgagcaaaaaaccccagctgcttcatatgccccacacggtctacacctccaactatttaacttttgggggaaccactgcaagagtatcttgttcacatcgtgaactatcaactcttaggaagcttaaactacagccttcacactcgttaaataacttcaaaccatcagcccgaccgtaagcagcccgtgatttgtttctgggggaaaaa

SEQ ID NO: 44919 - DNA, 298 bp, Zea mays
  Clone ID: MRT4577_140972C.1
gacacagcaggcaacagaccgaggcagcccagcgagcgagcgagcaaaggcaacccacagcgccgccccccacaccggcgcggacgacggcgacagaccgcgacaagcgcaagaggcgcccgagcccgaggccgagagccgacaaggcgaggagcagagccgcccaccccaggcgcacgagccaacgaaggcacggccacaacgacgcaacaacggggctacgggacgaggccacgagcgcggagacaacaacgaccgcgccggcgctggcggacaagcagatgccgacgcgaggaca

SEQ ID NO: 44920 - DNA, 1125 bp, Zea mays
  unsure (1)..(1125): unsure at all n locations
  Clone ID: MRT4577_140973C.1
caggccaggccactctcccccctcccgaatctccctccttcctctccccccctcgttcgttccttcgctcgctcgcaccccgatctccgtcgcagcccgggcgtggcttccggcggggcgggcggaggaatcgaggcgataccggcgaggtacaagatggctctcaccagaattggtcttgctggcctcgccgtcatggggcagaaccttgccctcaacattgcagagaaaggcttccccatctctgtctacaacaggaccacctccaaggtcgatgagactgttcagcgcgccaagctagaaggaaaccttcctctctacggtttccatgaccctgcatccttcgtcaactccattcagaagccacgtgtcgtcatcatgcttgtcaaggccggcgctcctgttgaccagaccatcgcaacgctcgcagcacacctggagcagggcgactgcatcgttgatggaggaaacgagtggtatgagaacacggaaaggagggagaaggcgatggaggagcgtggactcctctacctcgggatgggtgtttccggaggagaggagggtgcccgccatggcccctccatgatgcctggaggctcactggaggcataccagtacattgaagacattcttctcaaggtgtctgctcaggtccctgacagcggcccgtgtgtcacatacattgggaagggtggatccggaaactttgtcaagatggttcacaatggcattgagtacggtgacatgcaactcattgctgaggcgtacgacgttctcaagtcggttgggaagctcacaaacggtgagctgcagcaggttttcgccgagtggaacaagggtgaactcctcagtttcttggttgagatcactgctgatatcttcagcatcaaggatgaccagggtgagggctacttggtcgacaaggtcctggacaagaccgggatgaagggaaccgggaagtggacagtgcagcaggctgctgagctctctgtggctgctcctaccattgaggcgttcttggattccaggttcctcagcgngctgaaggatgagcgtgtcgcggcttccaagatcttccagggtgactactccagtggcgaaactgtcgacaaggcacagctgatc

SEQ ID NO: 44921 - DNA, 1206 bp, Zea mays
  Clone ID: MRT4577_140974C.1
gcacgagccgcaacctgcacagccatgcccgggcaagaactcaggacggtgaatggctctcagatgctcctggtgttgctggtgctctcgtggctgccgcatgggggcgccctgtctctggccgaggcgagccgcgcaagtttcccgggaccctcagagttgcactccgaagactccagattccgagagttgcggaaacgctacgaggacctgctaaccaggctgcgggccaaccagagctgggaagattcgaacaccgacctcgtcccggcccctgcagtccggatactcacgccagaagtgcggctgggatccggcggccacctgcacctgcgtatctctcgggccgcccttcccgaggggctccccgaggcctcccgccttcaccgggctctgttccggctgtccccgacggcgtcaaggtcgtgggacgtgacacgaccgctgcggcgtcagctcagccttgcaagaccccaggcgcccgcgctgcacctgcgactgtcgccgccgccgtcgcagtcggaccaactgctggcagaatcttcgtccgcacggccccagctggagttgcacttgcggccgcaagccgccagggggcgccgcagagcgcgtgcgcgcaacggggaccactgtccgctcgggcccgggcgttgctgccgtctgcacacggtccgcgcgtcgctggaagacctgggctgggccgattgggtgctgtcgccacgggaggtgcaagtgaccatgtgcatcggcgcgtgcccgagccagttccgggcggcaaacatgcacgcgcagatcaagacgagcctgcaccgcctgaagcccgacacggtgccagcgccctgctgcgtgcccgccagctacaatcccatggtgctcattcaaaagaccgacaccggggtgtcgctccagacctatgatgacttgttagccaaagactgccactgcatatgagcagtcctggtccttccactgtgcacctgcgcggaggacgcgacctcagttgtcctgccctgtggaatgggctcaaggttcctgagacacccgattcctgcccaaacagctgtatttatataagtctgttatttattattaatttattggggtgaccttcttggggactcgggggctggtctgatggaactgtgtatttatttaaaactctggtgataaaaataaagctgtctgaactcttagaaaaaaaaaaaa

SEQ ID NO: 44922 - DNA, 391 bp, Zea mays
  Clone ID: MRT4577_140975C.1
gcaaagcccagccgcttcacacgcatgttaggaatggcacaagctgtcgcatgaggcaacatacctttatggtcgttgctgctagaacaataaacagccctatctttggctcctgcatatgaacaaaccattaagcacaaccactgcagaaactggagctacctctgatcatccaagtagctctggcctacctttctacctactctcagcagcagcagtttcttacatgcaaccaactgtgtacactgaaccctgctgcttataagcagcaacaactattaccatttagccagctagctactgcctactgtcagcaacaacaacttcttacatttaaccaattgggcgcactgaaccccggtgcttattagcagcaccaatactactacca

SEQ ID NO: 44923 - DNA, 741 bp, Zea mays
  Clone ID: MRT4577_140976C.1
agcgccggcgaggtgttcgcgctggcccgggcgcaggtggactacgtgctgggcagcaacccgcgcgggatgagctacctggtgggctacggcgcccggttccccgccagggtgcaccaccgcgccgcctccatcgtgccgtacaagcacagcaaggagttcatcggctgcgcgcagggcttcgacgactggttcgtccgcaagggcgccaaccccaacgtcgtcgtcggcgccatcgtcggcgggcccgaccgccgggaccgcttcagggaccacagggagaactacatgcagaccgaggcgtgcacgtacaacacggcgcccatggtcggcatgttcgccatgctcaacaggctggcccgggacgaggcgggtgtaaatagatagccatatatatacagcggggggcttgtacaatttttatttggccctattcttttgttcattcttttctacggaggaaagtagaagtgaagtgaaggcactctcttcacaggaaattatttgtatacgattaaaaaaaagataggaggagggatttggcaaagcaaatgtaaattccctccccgtaaatatcagagagagagagagagaatacgaagaatgtcttatatagttatataaatcaaatcaccttgcctcccaaatcatcactgcagctcatgcccgcaatgatcacagaatcttgtaaagaaatttcagcatggcaaggcacctataatcaagtatgttgttctgaag

SEQ ID NO: 44924 - DNA, 791 bp, Zea mays
  unsure (1)..(791): unsure at all n locations
  Clone ID: MRT4577_140977C.1
cctcgagccggcggggagaggtattatcgtggtgggcgagaggagagaatctgagggagggaacagagcagctccccacccacccaccccaaatccccacgatgctcgccgtcgccagggacggcgccgacctcatcctctccctcccggaggacgtgctggcgctcatctcggcgcacctccgaccccgcgacctcctcgcgctgtccgccgcgtcccgccgcctccgccgcgcgctctcggccgacaaggcgtggctggcgcagtgccgccgcctgctgccctcgcagccgcacctgctcgcgtggcgcgccgccgccgcgggctcctccctcgccgtctgccgcttcctccactccgccgcgccgctgctcggcctctgggcgcaccagaaccccgagctcggcaacctcgtcgctgctgtcccgggcttcctctccgtcgtcgccgcccgcgccataccgcaggagctctccccgcgcctccgctgggcgcccgtcttcgagctccttgccgacgcccacggccgccccgcgctcctcttcctccacggccaccaccacgcccacctcttcccaggcctgctcgcctccctgcagccccacgccaacgtcatctttctcgaggcgcacatcgccagggatccgttcgcttcctcctcctcctccagcccacaccgcttcgcccgcctctccttcggcgaccgccgccgcctgctcgactccctcgtcgccgcctgtcgggtcacgctgccgnccgacctcgtcgacgccccgctcttcgcgtgctcc

SEQ ID NO: 44925 - DNA, 705 bp, Zea mays
  Clone ID: MRT4577_140978C.1
ccggccgggaacgacctgcagccaaccatctaccagcgactcagcgagcgagagcagcacacactgcacgcagctagctaggagcagcagcagcggcggcgatggcggcctccatgatctcctcgtcagctctggcggtggcgcctcagggcctgccgcccctcggccgccgcgcctcctccttcgccgtcgtctgctcccggccgggaaataaaaaaaaacagccgggcaggcaccatcgacatcaccaagcaaatcattcaccatgggtaaagttcacggatctctcgcccgtgccggcaaggtcaagtctcagactcccaaggtcgagaagcaagagaagtccaaggtccccaagggccgtgctctcaagcgcctcaagtacacccgtcgattcgtcaacgttaccctcactggtggcaagagaaagatgaaccccaaccccggctcttaaacgattggttaaaaacgacaatatgtgcggaatcgggaatgttggcttgcggaccacaacaatggttgacttcactcagtaatgggatgatggattgggtcgggtcgcatggaataggctgagcccccttgagaattaaaaaaggaaatggcaaagaagcgctacgaccctactcggcgtccggtgtcagttgtcaaatgcaacaacatttgttcgaaaaaaaaaaaaaaaaaacccgcggccgcgcggcc

SEQ ID NO: 44926 - DNA, 535 bp, Zea mays
  Clone ID: MRT4577_140979C.1
ccggccgggatcaccaagcaaatcattcaccatgggtaaagttcacggatctctcgcccgtgccggcaaggtcaagtctcagactcccaaggtacgacgactcgaataaacaccaaccgagaaccccgacgaacaaacgatcactaaccatcggtccaacaggtcgagaagcaagagaagtccaaggtccccaagggccgtgctctcaagcgcctcaagtacacccgtcgattcgtcaacgttaccctcactggtggcaagagaaagatgaaccccaaccccggctcttaaacgattggttaaaaacgacaatatgtgcggaatcgggaatgttggcttgcggaccacaacaatggttgacttcactcagtaatgggatgatggattgggtcgggtcgcatggaataggctgagcccccttgagaattaaaaaaggaaatggcaaagaagcgccacgaccctactcggcgtccggtgtcagttgtcaaatgcaacaacatttgttcgcaaaaaaaaaaaaaaaaaacccgcggcc

SEQ ID NO: 44927 - DNA, 351 bp, Zea mays
  Clone ID: MRT4577_14097C.1
ggggaaaaccacccaaaaaaaattttgggttcctttcctttttcagaaacaaatttggaaaccaagggaaaaagaattggggtttaatgccaaccaatttggaaaaaatgggggggggccttaaaaaacggctataaaaaaataaacgggggggggaaagggctattaatgaaaggggggggcgccccaacccaaatttttgaaaaaccaggggcaaaagggccagggcaccctctttagggaacccaacgggttgggggggcccaagttgtcctttatacccacctttctggggaaaaaaaaacccggccgggccctttccccccgcaactggagaaaattctttggggg

SEQ ID NO: 44928 - DNA, 454 bp, Zea mays
  Clone ID: MRT4577_140980C.1
ggggcctaaatcccggggcaaaattttaattaggccccggaacccggaccaaaggcggggcccggggggcttcaaaacaaaaaaaaagggggttccccgcccccgtgaataaaaaagcccatttcccaagggctaaacggcccacccaagggggggggggggggccccccttttttaacccaaaaaaatattttttctttcccccaaggccctaaaaaaaaaagccccccccccccccatttaaaacccccggggttatggggcctccccccctgaggcccaaatgcgggggggggcccgcattggatttgttgggacccccccccggggagttccccaacaaaaaaaaaccctagggcccggcaggacaaaaaaaaaagggcccgatttaccggcttttaggggggcccccgcttgttgcccccccttttggatcccccggaaaaaataaccc

SEQ ID NO: 44929 - DNA, 243 bp, Zea mays
  Clone ID: MRT4577_140981C.1
ctttgaacacgtcttattgctctccccgtggcctcgatcacaagcagtctccttgggtagtcagggcacgccccttatctggaaccgcttcatctctcagtgtgggaccgttggaaaacatcaatgcgatgcaagtgcacgaatgcagcaactagcactgagcataggactgctctcgcatggcgatcgaagctctgcttcccgtgccaggggacaatagcatcatgcctcctgctcggttca

SEQ ID NO: 44930 - DNA, 305 bp, Zea mays
  unsure (1)..(305): unsure at all n locations
  Clone ID: MRT4577_140982C.1
tcatcntcnncagnatccatngcnnngatcacggtccttaacctnctacttctaccnacgcctantgtacncnangtnaatnacactacgccccatgnctancaacgtgtaaatangatgacagtttgagcacacagaaccgaccccatgtcctccccngactnatcgnccttaccacgntactccctacctatctcccctttgatgctactaagttataaancaacancaggtgcgtaatttctcagtnnatcccacnatgnggatgggaaaaagatccgntaggagacngagcatncggnnac

SEQ ID NO: 44931 - DNA, 568 bp, Zea mays
  Clone ID: MRT4577_140983C.1
ttttttttttatagtttttttttttcactataaaacggactgagctgtactgaaaaccaatcttaggattccaagtttacatctgcagcttagaggggaagagaagcaacattaaaaatgaaacaaattctcctaacaccagccaactggtttctgcacaaatcacctatgctggccctggggtaccatccatgctggtgtcctcagggagcgccgtactggttttattctgttctgggagtgactgccagcttgctgtattatcatcagccctgctgcctggttttgcatctattgaattcgacccaacaccaacatctgttcttgcatccatgtaaacaactccacctgattcttcgtaatttcttgcattaagatcaggatcaccttccaggccaccagaagacggattctgagttggatgatttccctcatcgttggcttctcctgacaatgtagaatctccatggtctgccttttgtttttttgcagcgcctggctctgcgggatcagagagatccctccttggtctctttttgctctttgtagatgatgtgccatcatcctc

SEQ ID NO: 44932 - DNA, 471 bp, Zea mays
  Clone ID: MRT4577_140984C.1
cttaacggcgctttttttttttttttttttttaaaactaaaatgtctttttattgggagcccaactagcaaaaactttattattgaactataactcaaagaaatctaaaggggcaccaccaatgatgggttgtggagaacgctgctgggtttgtcaaacagttggtgaatggcacatgtgcgttagaggggcagcgttaggcgccggctggtgaacggaacaactgggtgtaaaagacaggctcacaccactctggctgaatggagagtgtgtgtgaaataagcggaatcaatgctgccagtggtgaatggaagaaatgtggggaggcagcagtagctggtaatggagtgtgtgtgcaaatagaacaagtaagcactagttggtgaaggaaaactgtgtgtgaagagccaaggtgctaccaattgtgagtgtggccctgagtttggccaaaagcccaaggtactgagtata

SEQ ID NO: 44933 - DNA, 152 bp, Zea mays
  Clone ID: MRT4577_140985C.1
caagaacctgatatctatcatcaaataagatggatgggaagtacaatgggcatgccttggattgacaatcttggcaaatatgaccatggtttaccaattttggtccttgccagtggactttgttggcttgcgttctgaataatctcacatga

SEQ ID NO: 44934 - DNA, 1162 bp, Zea mays
  unsure (1)..(1162): unsure at all n locations
  Clone ID: MRT4577_140986C.1
aaggggaaaatcgtagaatcaacttttattcagatcgagccagtcaacaaaacaaaatacgtgcagctcaaacgcacgctcataatggcgagaagttaattgttcaaagcaatcatgcgcgctgcagcagcgttcacgcatgctcgctcgctccacatcaccggccgggctgataacatcaccaccgtttgtaaatcttaatagctccggtagggaaaacggcgtcggcgattctcatttagttaactgaacggaattcaaaaaaatgataagcaccaccttctaaatgttgatgctccagtcgtaattttggtacatgactttcagttgagtgctggcgagcagttccaagagctgctctgactctgcgggctcaagatagttcgcagcatgctttagcacttccatctcgttcttaccaaaatctgtgctataccatttcaaaatcttgcttgcagatgcaattttggcttcaggatcaacaatcagtcctccattcctcacgaaatcacgtgcagcttccatcaattctttatcgatatcccctggtgagtaacacctaagtgcaggtccagatttggtgccacatatcaaagcaaagtgaacaagaggttcatggtatggaagggccaccttggatcttcggtctttctgcccgaaaggtttggcaatgttgtatggtggcctttggttgccacgtagaatgccattttggattgctgacagtgaataagcacatccaccaatgatatacttaaaatctccaaaaaacttttttctgtccaatggtccagcaggatggccacatgtcactaatgcatggatagccatcatattgtagagatttatgaagaaagcaagtttttcttcacgtgataaataatcaatttccaccctctggagctcctcaactgttctaatatatcttttaaattcctcagaaccttggatgctttggtagtcaacatgtctaccatcggctgatacataagcttcaaaaatggcacaggatagcaacctcagccttgatgctacttcagcaatgggctttggtgcaacatcgatgatgcccctagggatgttgtaacattgagtcataactatgggatcatgatccaggaaacgatatatgtggtttccattttcnaaagcggacgctggg

SEQ ID NO: 44935 - DNA, 309 bp, Zea mays
  Clone ID: MRT4577_140987C.1
ccgatggattcatgttgttttttattttttttgtttgtcgtgtgtggtgatttctttttttttacttgtgcactagtgcttgttttttcttttcttgaaaaaggttttttttttggccaattgtttttatttggggggggaggaacctcgcggcaagggcccctttaagggcccggtgggggcatcagggggggggccggggggggcccaagcctggaattaaccagggctgtaatgggttcatcttccaatttcggttgaaaacttacttggcaacaatagaggtcgatgtcagggggggggggggaa

SEQ ID NO: 44936 - DNA, 454 bp, Zea mays
  Clone ID: MRT4577_140988C.1
ccttcgcgcgcgacgatgtgaaatgccatctactgtgggcctactgccccataggagccagtggcgcacggatcaggagcggcggtattagtcaacgtcttggagcgacgctgccagtgcatcctgcactcgtctgatggagagcgccgcaacctaggtcaagaaccagggtcagaagcagggtctgctgagccttctgcacggaggggctcgtgctaggtcatcaaccagaatcaggactggcaagctcacgtgcttcgcggagcagtagttcattgactgcagcaacgccggcaccacctgttgcagcagcggagacaagcgcaacgcctgcactgtccatgcgaaccgccatgggaatgcggacctggggggctcacccgtgcctgctgaggagggagcctggtactacccggctcgggacagcatttggctgtgattgaatttcgtatac

SEQ ID NO: 44937 - DNA, 103 bp, Zea mays
  Clone ID: MRT4577_140989C.1
cccacgcgtttgttttcgcatccggccaagtggacataataagggtcaaggggtctagacgccggagggccatgactatggctctactgtcctctatttacac

SEQ ID NO: 44938 - DNA, 512 bp, Zea mays
  unsure (1)..(512): unsure at all n locations
  Clone ID: MRT4577_14098C.1
gcacgaggatcatttgctcgagcaggctgagaacaattaatccactaatggggcatgcgtgactgacatgaagaggaaaggagactattcagtactcttagtnantaggcagcggntcatatgggcatgnatacggacaacacganttccgttgtcgcgaaacattcatntcgtggaatacctctgagcgctcatgtcatggtatagtggaacttacgncagtcgtgacatcgtgtacacganaantatcccgcgcggagtcagggatctctgggagtntggcgagggcacacgtcagccttaatgcaacatggctgttagagcacatcccttggcataattctcttgggcgaccgctcatcctttggcgtgttctcgtagtttgcctgcccgttgtgcaaaaccgataaggggatctaagtcgaaacgaacacagcccttcgtaacagatcacggcgtaaccactatanagtgggtgctcgttttcagttactttatcccgcacggcccca

SEQ ID NO: 44939 - DNA, 366 bp, Zea mays
  unsure (1)..(366): unsure at all n locations
  Clone ID: MRT4577_140990C.1
cagacagcaatgcaacagacgtggcacccaaatgtgcgttataccgtancattgcagacattgaagtgcccctntnaatggaaaccatcacgttagcaaatcccacaaactgaggttaaaaggtacccagctatgcctgggtagcattttttatgttgcatgagaannnngtgcattccgggcttgagaggtggatgcaacttcctatttcccagctcggcgacagcaaaaccagagatcactcccacgctttaagggcaccacccctcccaattggtttgatgataggctgcttacagttgcgcgcactgcactctctgggctccgtccggaatctcgtcgttctactaggacgccttctgggca

SEQ ID NO: 44940 - DNA, 443 bp, Zea mays
  Clone ID: MRT4577_140991C.1
ctgctggttctgtctactggattccggcttcgacacctgagtccttctgtataaatcttgctcgaattccccgtttactttcatcatttgcgaatcgagtaatcgacgggggacctcgagatgccggaattcatgagatcagcatactcaaggcggttggccggacccaacacagcgttccccagccaagccaagcaaggggtgttttgagctgaaccaacgcgccatatcctcacggagactattctagagtttttcaataccaatgtcgaccagcaacatgatcatgcccacttgcccaagacgcccatcaagatcattccggtaaccagtgagataccgcccgctgcaacatgccccaacggagcgctgaacaatgtcgcttcttcgataacccaatcgcgtgcccacatgtcgacaacgccaacccacacatggatacc

SEQ ID NO: 44941 - DNA, 470 bp, Zea mays
  unsure (1)..(470): unsure at all n locations
  Clone ID: MRT4577_140992C.1
cagaagggaacaaacanaaaaggccngaaagcagcacggccannagggggacccancnagccnagcngggcgaggacancgccgggaggggggggggncncgccgnattacttctgggcctcgggggggctctggatctgggctgcagggtcaagcccgtcgaggggggcgaagagcttgccggggagggcctggaggtccttcttctcctccttgggggccttggaggagatgacggccttgagggcatagcgnagggaggaggccctgaggcggagggcggtcatgacggacggccagtgcttctgggcgaagagcggctggaggtcgaggatgaccggggccgactcctggggcccggaccggcgcctcgggcgggggccagcgggtggcgggtagaaccgggatcttcagggggcgggtccgaagttcccgtgggccggggtcgggagggcgttccgccgccgggg

SEQ ID NO: 44942 - DNA, 279 bp, Zea mays
  Clone ID: MRT4577_140993C.1
gtggggaattcctcccgggaaaacccccggtttggaccccgggccaacaaaaaaaattgggcaaaattttaccagaaaaaaagaactgaccccggggtaaaatggaaaaaacaatcccaaattccaaaaaaaaatcgccaccaaatgggtcaaagggttgggaaacaggatgccaccatagaatactaggctttaaaggggtattaaaaaaaacaaatttttaggggaaaccttctgacccgctcctagggaacccggggggcttcctggggaggaaaa

SEQ ID NO: 44943 - DNA, 258 bp, Zea mays
  Clone ID: MRT4577_140994C.1
gcgatgcctcaggtgcgccgtcaccactgacgtcgccaacgcgctcaagcacgcgctctcggtctggtccaccggctcctccaacggcgtcggcagccccaagactggcccgacggcgacgcccgcgacgattcccgacaccgttcgggagcacatgcgcatctacatgcgcatctacgagaccatcgacgccaggatcctcaggagggtcgtcagcatcgttggcagacagcttggcactatcgtcttatccatggt

SEQ ID NO: 44944 - DNA, 246 bp, Zea mays
  Clone ID: MRT4577_140995C.1
tggaattcggcacgagggtctaatacccgctctcctgtgaccgtgacagcgctgggcacacctgccgccacatctcctctgtcgcatagcagaccgcgtctactctctagtggtacaccagcgcgcgcggcgcgtgtacagcgtgtgcgctgtgcgctctcgcggccctcacccgcgctcttcttggtggctgtaaccactcgctgtttaccctatactgccgttctccacccacggaggagatta

SEQ ID NO: 44945 - DNA, 330 bp, Zea mays
  unsure (1)..(330): unsure at all n locations
  Clone ID: MRT4577_140996C.1
ggtggacggacggcgtccgctaacactgaacattgtacgcctcttggacgtatcgtccctgcatatgcattacaagttggattgacgtggctacatggcaanctgtggcttaatctgtagaaccctgtctgagaaataggagatttgcttgctgctcctttaacctgtaatatagatgtcanctgaccattgccttcaagaatcatgacgctgaaaggttactctatctatttatgttgacctagttgcacaatctgttgtgtctaccaggcgatgatgagtgtgaagaggcatttacgtggccctggagcaatccctatagggaggcct

SEQ ID NO: 44946 - DNA, 342 bp, Zea mays
  Clone ID: MRT4577_140997C.1
gtgagaccaactagcaacataaaacgcactgtagtgtaccaacaatggcaacaaaaatggggtgcgtgccttatgctccttggtctttctgcaattgctgctagcgccaccattgcccagcaatgctcacaatgtgctattgcttctcttgccacaatgtacctatcaccagcggcgtcttcgtcatgggaaaacacacttctacctccgtacatgatccaacaagcactcgcaggtggcgtcagagctttataacacctgatcgtccaacagtcatcactattattacaacagctacctttggagcatatattagcacaaaacatcgggcagcaactacta

SEQ ID NO: 44947 - DNA, 361 bp, Zea mays
  Clone ID: MRT4577_140998C.1
ttacaaatgataatatgtggattttatttaaccccaccacaaatccccaaaaaagttcatactcttaaccaaaccaaccaaaacatttaattcataaaattctaaaccatacaattctacccccccacaaaaatgccaaaatttttggaacctcataaaaaaataaaccccattgatttcactcccatatttatcgaaactaacataaaaatatgatcaggtaaacaacccaccataaattttaaccccatattggctcggattttacccttataacccaagggttttattctcaaaaactaaaatttttaccccccaaccttgaaaatcctccaccaattaaccacttgccaaattttaa

SEQ ID NO: 44948 - DNA, 225 bp, Zea mays
  unsure (1)..(225): unsure at all n locations
  Clone ID: MRT4577_140999C.1
ctgatgatgtcttatgagccaatattgattgattatgaattttccacgtgcacttgagaagaatgtatatgtcttattattggctgtaaagttagagatatatatatatattcataagagctattttatcaattgcgttgtctaggagcagtcttcttccannnatngtnaacttcatccgtcttanactaagaggggcatgtttgtctcatattactagtgtat

SEQ ID NO: 44949 - DNA, 679 bp, Zea mays
  unsure (1)..(679): unsure at all n locations
  Clone ID: MRT4577_14099C.1
gcacctnactacaagggnctnggcatcaagggcgtnnactggnaagnncgccggggctacctacnncgcatcgnacgccnngccgctgcgcnnnagcgccggccccgccgctcnncccaccgcggnnagctcggnagggtggnncgtgggtgtcnnngcccaggcccagtccgtctcggcgccccgacgctggnaggggtgtcctcgggggcggcggccgatnngccgcgggtggggcgcgtgcgccgcgngcccagctgcggcgggggcggctgctccgcgccgctnngtcgccgcgccgnngtggctcatgcggnnctccgcgaccgcgtacgtnngtccgccatgcctgcnnggctggcgtccctcccccgnnccgtcgggtacgggtcgccnnggccaggccctacctgcnnggcacggcgnngccttcgcgccggccgnngcgcagctcaagggagtaccgtaagataaggtgctggtgggagatctacaggttccatacctcgcggggcggcggggcctgggcccccatcgccgttcacttaccgggtcagcaaccggcgcccggtggcgcctggccggccgcccacacttacggcttacccgacggcttgcttggcttgtagcttggagccggccggatgcaagccatggtattttattgcttttttgcttt

SEQ ID NO: 44950 - DNA, 1769 bp, Zea mays
  Clone ID: MRT4577_1409C.1
cttttctcgcagcttttctcgcactcgtactccctcttgcgctccggctaggaggctgctccctccgccgctccgccttcgtcgcgcggccatcgtttccggctctgtccccggatatctcttcgccaccgcttcctgcgccgcggcgccgccacaaccgaaggcgacccagtcgcagtcgccttcaacactatggtgactcctcccactgtcgaggaggaggacgaggagatgctcgtgccccgccaggaggcggtcgacaccgacgcagcgcagcccatggaaggggtggtggtcgcacagactgaggtggtgagcacggcggagagccagcctgtggaagatccgcagacatcacggttcacttggacaattgagaacttcaccaggttcagtgagaagaagcactatttagaggtttttgttgttggcggattcaaatggagtgtgctgattttccccaaggggaacaatgtggaccacttctcaatgtacttggatgttgctgactcaaccagccttccgtatggttggagccgctatgctcagtttagtcttgctgttgtaaaccaaatccagccagagtttacgatacgcaaagagacccaacatcaatttaatgctcgtgagagtgattggggtttcacatcttttatgcctttgagtgagctctatgatgcaagtagaggttacctcgtgaatgatactgttgttgtggaggccgaggttgctgtccgcagaatggttgactattggacatatgactcaaaaaaggaaactggttatgtgggccggaaacgtgggggagctacctgttatatgaactcccttctacagacactataccatataccctacttcaggaaggctgtatatcatatgccaaccactgaaaatgacataccatcaggaagcattcccttggcgctgcagagccttttctacaagctccagtacagtgacagtagtgtagctacaaaagagctgacaaaatcttttggttgggacacatatgattctttcatgcagcatgatgtacaagagctcaacagagttctgtctgagaaacttgaggacaaaatgaagggaactgtcgtagaaggaacaattgagcaattatttgaaggtcaccacatcaattacattgagtgtataaatgttgagcataaatctaaccgcaaggaatccttttatgatcttcagcttgacgtcaaaggctgtcgtgacatttattcgtcgtttgataaatatgttgaagttgaacgtctagagggtgataacaagtatcacgcagagaatcatggtctacaggatgcaaaaaagggcgttcttttccttgatttcccccctgttttgcaactccagctgaagcgctttgagtatgattatatgagagatagcatggttaagattaatgatcgctatgagttccctctgcaacttgatctggatagagatggtggcaaatacattgctccaaatgcagatcgaagtacacgaaacctttacactcttcacaggtataaatttgatgatgaacgtgtaacaaaagaagatgctaagaaggctcttgaagaacaatatgggggtgatgaagagttaccccaaataaaccctggtttcaacaacgctccatttaaattcacgaagtattcaaacgcgtatatgcttgtttatattcgtgaaagtgccaaggagaaaattatgtgtactgttgatgaaaaagacattgctgagcatttaagggtaaggttgtaaaaaaaaaaaaa

SEQ ID NO: 44951 - DNA, 196 bp, Zea mays
  Clone ID: MRT4577_140C.1
ttgtttaccagactaccgaaattataggcggagcgtcatcagagggaggggcgttcaatcgctccactaaaccaaggcagccttcgaccgcgaatgcatactcccacgagaacctgtctgcctaggacttacacattgactatgcagactctctcgacgaccactactgcgtaaactgcgtcatgctccagttaca

SEQ ID NO: 44952 - DNA, 375 bp, Zea mays
  Clone ID: MRT4577_141000C.1
gcatcctccatactctacccacctttaccattttgcccaccgctcaaacaatcaccgagcacggcgccctcctgacaagggagtcgccagcaatggcgacggcgctgaacacttactgtatgagccctagcataggtgctgcggcgcacctaatgccagcacagtcaaccagattcaccttccaggcctcttaccctcgtcctaccaactcaagcagcaacgacatgatccacccgcagagacattactatgagctgcacacaatactcaccactgactaccacatgcacgatatacctctctcccacccctaccttgtggctagcatgcacgtgatcaccatcctcttccgtgacctgcaccacctgtacacta

SEQ ID NO: 44953 - DNA, 418 bp, Zea mays
  Clone ID: MRT4577_141001C.1
ctgtaaccgacgacggaacgggtagctcatctgcggcgagctatgagcgatcggccgagtcaggtgatgcttcacaggacgctgacactgaacacacactctccaagcttcagactacttcagtggatgacctgccatatactgtacaatagggaacaagatcaaacgatgatcgcgtaacaggtctactagacgagaaacttcacaatgaggtaagattctatgaccacatgcagcgtcaaatttacaagcgcaggctcaagttattacatactattcatgttgaatccagtgatttcgatcttgagattcactatgcctttcatgatgaacctcatatactactagcttagatagtcatgacgatagctaggactattatagtgaaggcctgcaatcacactgatcattgctagat

SEQ ID NO: 44954 - DNA, 196 bp, Zea mays
  Clone ID: MRT4577_141002C.1
cctggatctttgtcaacctgactgtgcgattctgtatcttgggaaaagagtccttttatgacacattccatactgtggctgacatgatgtatttctgccagatgctggcagttgtggaaactatcaatgcagcaattggagtcactacgtcaccggtgctgccttctctgatccagcttcttggaagaaattttat

SEQ ID NO: 44955 - DNA, 447 bp, Zea mays
  Clone ID: MRT4577_141003C.1
gggacacaaaatgggcccccaaaaaaaagcttcgggggggaaaaaacgggaagaggggcaggtggggggtcaaaaagcattaagcaacacccttagcccacagccccacaaaagacgataacatagcaaaaagccccaggggaacgggaattttgggcctttttagggacaaaaaagttttggacaaagaactaccccggcaaaaacggaaaataaaacatccttaaaaaacgggaactttttggcacgcaactggatggggtggggcactaaaaaaaagggattttttcgacccattacgggaaaaattgggaaaaaagaggggatttttttggcccggtccccccaggatggggaccaaaaaaattttaatctaaagccccctttgaaaaggaagaccctggcccaagcccaaaaaacctgggaaaggggcttttcgggggcccc

SEQ ID NO: 44956 - DNA, 218 bp, Zea mays
  Clone ID: MRT4577_141004C.1
gtggccggcattttggatggtttttggggcatcatcatacatagtttgttttacattgttggagatcattgacttatgatgtacatgatatggattgaaggacccattacataaccaccattgaacatttacaccaaagtaacccatagccacattcctaagttgttgactcatcactatgtaagatatgtgtaattggggtcaatgtggggttaatt

SEQ ID NO: 44957 - DNA, 602 bp, Zea mays
  Clone ID: MRT4577_141005C.1
gattcgcttcgaggagccattgacagaatcctcttttgcctttgttgccagcatccagatccaggtcgatttggttttcttcagatagggaaggtgattgactctctctctatttctgcatcgcacaaatgcctcgatccagtatgcattgattggtccagagagggaaggtgattggttttcctcaggaatggaaggtgattgatccggtatggattgaatagaggctttccttcttggtgggttttaatccagatcggcatgagcaatacgagccccgagtagattttcagattagccggttctcgctgccatcgccatcggagccatcgaggatgggcaggtggggcttcagcaggaagcgcaaggagaggaaatgggggagcagccgcggccatgaaccaggcgacaagggtccgacccagggtctcaggcaccgcgcgtcgccggcgaggatcatgaagctgtacccgcacctcaccgccgggcagcgggagatgatagagggcgccggcttcgggggcctgctgaggctccagtgccccaccgtccccgccaggctctccacctggctcctccggcggttcgtcaccgactcctcc

SEQ ID NO: 44958 - DNA, 610 bp, Zea mays
  Clone ID: MRT4577_141006C.1
cattgggtacctcgaggccggccgggagaatgttccggacgccacaccaccccgaccggaacctccacaacaatgaacaccgatgtgcgtagaccccgcgcgccgagctacttcttttctgacaactccctccgatgcgaggaggggcctaccggcgcgccgctggctgcggacaaggtgtacatcatgggtcatagcgccagcagaaagagcaggctgcgcacgcaggtcacctacaacgtgaagctgatacacgccagagggcgagcgtggagctgctcgtgcacgacgacgtgcacatcctgcagcaaggcgaggaagactgtatcgacctgccctactcctgccgcgcggggtcctgctcctcctgcgccggcaagagtctctccggctccgtgaaccagaccgaccagagctacctcgacgacgggcacagcacctgcggctgggtgctcagctgccacgcctacacgacctctgacggcggcatcgatacgcacaaggaagacgagctcaccgaggcataaacattcatggccatctatgcctatctctatctctgtggataggtgtgtgtaatttgagaacgaacggacacatactggactgc

SEQ ID NO: 44959 - DNA, 290 bp, Zea mays
  Clone ID: MRT4577_141007C.1
tttttctacctcaagatacagaatggatttagcgaactacatgtgcaatatccgaccttgacggatacataaaggttatcaattttcagggtgaaaagcagtcagatcctctttcaggtgcccatgtacagatgatagaccatacccccttaaatgggcctggccctaggtgctcacgcaagctcacagtgcgattgcaacaacaggattttatgctgcttatagagctgcaggcacaccaaagtgatcgcaccgggttatgccctctacagttgcaccggcaagcacaa

SEQ ID NO: 44960 - DNA, 1064 bp, Zea mays
  Clone ID: MRT4577_141008C.1
ttgggcgccaggcttgctatagctggtccatggcaccatacatgtaagcacgcacacaggcacacacacacacgcacgcaatgatctaggtatctagcagcagcttatcatgtcgtcatcatgcatgcatggccgacggaggtggtcatcttatctgggagggtgtgtgtcttggcaatgggaagctgcatgcgcctcttgggcgtcggcgcgtcggcgcctagctgtagggcggcgtgccatagagctgcctcctgccgctcacaccatgctgttgacgaggactgatggtggccatggcctctcggcgtcggtggcggcggcgccggcgccaagttttacctctctactaaggttatggtgcaacttgtatcctttggcaattgttctcatctatctgggtctgtctgttggctgcccggtgacggtatacggtgatgttctaatagtactcaattggtcttggatcggagttcatgctacggctaggcttgctatagctggtccatggcaccatacatgtaagcacgcacacaggcacacacacacacgcacgaaatgatctacgtatctagcagcagcttatcatgtcgtcatcatgcatgcatggccgacggaggtcgtcatcttatctgggagcgtgtgtgtcttggcaatgggaagctgcatgcgcctctcgggcgtcggcgcgtcggcgcctagctgtagggcggcgtgccatagagctgcctcctgccgctcacaccatgctgttgacgaggactgatggtggccatggcctctcggcgtcggtggcggcggcgccggcgccgagttttacctctctactaaggtagggcaacttgtatcctttggcaattgttctcatctatctgggtctgtctgttggctgcccggtgacggtatacggtgatgttctaatagtactcaattggtcttggatcggagttcatgctacggctcctctgttatatattacacggctgacggctccttattaatgtgtacgttgatgatgtcattaataatatgaaaaaaaaaaaaaaaggcgccgctcgcgatct

SEQ ID NO: 44961 - DNA, 1081 bp, Zea mays
  Clone ID: MRT4577_141009C.1
ggggcggccgcccctcgcttgccacgcgtcctggtccacggacgcatgggcggacgcgtgggcggacgcacgggggctgacgcagcaacgttattagtatctagtattagaacatcacgtcgtcctttggcaattgttctcatctatctgggtctatctgttggctgccgggtgagggtatacggggatgttctaatagtaggcagtcggccctggggccccatgctacgggtcgtcgggccaaaaatccacgcccctccccctcaccttattcatttgatgagggatgatggcatccataacatgtagccgtcggtggcggggggggcggcgcagagttttacctctctactaaggtagggcaacctgtatcctttggcaattgttctcatctatctgggtctgtctgttggctgcccggtgacggttacggtcatgttcaatagtactcaattggtcgcgcgtggcactgttctagatggctaggcttgctatagctggtccatggcaccatacatgtaagcacgcacacaggcgcacacacacgcacgcaatgatctacgtatctagcagcagcttatcatgtcgtcatcatgcatgcatggacgacggcggtcgtcatcttatctgggagcgtgtgtgtcttggcaatgggaagctgcatgcgcctctcggccggacggcgcgtagctgtagggcggcgtgccatagagctgcctcctgccgctcaccttgctgttgaggacgactgatggtggccatggccactcggcgtcggtggcggcggcgccgagttttacctctctactaaggtagggcaacttgtatcctttggcaattgttctcatctatctgggtctatctgttggctgcccggtgacggtatacggtgatgttctaatagtactcaattggtcttggagttcatgctacggctcctctgttatatattacacggctgacggctcctccttattaatgtgtactttgatgatgtcattaataatatgaatctgatgatattgaataaaaaaaaaaaaaaaaggggccgctcgcgatcttttttttttttacataacac

SEQ ID NO: 44962 - DNA, 354 bp, Zea mays
  Clone ID: MRT4577_14100C.1
aaaggacaaaagcggagctcgagggccgcttttttttttttttttttatgggggtttttgtggttttttttttttttttttttttttttttgaatttccaggttgaaccagactggatttgaaatccaaatataccaaaattttttaaatgctttcaaaagcattaaaaagaaggaacactggctgacactgacaatccttgagaggggggggaaaaatattaccaaagcatcccaaaaaaacctacaaagcaaagaaaagccaagctaaaccgacagccatgggctgattggtcacgagcaagagaacaaacgggcacataacgtaccgaaacaaactggaacaaaagggcaa

SEQ ID NO: 44963 - DNA, 534 bp, Zea mays
  Clone ID: MRT4577_141010C.1
atgtcaaagatcatgtgggcactccttttatttgaacagacccatgcagattaaatagtacattagcaattcagttcgacatccgactgcttgaaaaaaatgcatggtttgcatcatttattctttttgactgaaaacgtaccatgcatagaaagttgagaagacatgtgccatgaagaatgatctgggggagctgccatatcgtgttcactctactagacgcagtggttgcaagcaattatgataagactagcttaattttctgtattgcctcccaaaatcgcttgagctccaacatgaccatttaaatgttggcctttttcacacagacaaaatatttgtccttggcctccatcttgcagcgaggattccacaatactgtatctgaccaatttgaattggtattggctaatctgtaacccaatccattggccaggatgagccatcttgttgcaccaatgcagacgcagcttacgaatcctggaaaagttacctcttaccttgtacagcgaatggaagctgaaagcccacata

SEQ ID NO: 44964 - DNA, 1374 bp, Zea mays
  unsure (1)..(1374): unsure at all n locations
  Clone ID: MRT4577_141011C.1
aattcggcacgaggtaggggcgggcgccgggcggctccctccgtccacagccacagccatcgccacctccaccaccacctccttctcctcctcctcccgcctctcatcattgcaaaacctcggttcattttcctgtcgcgatctagggtttccggtcgccgcggcgccaatggcggactcgcgccgcacctggtcctgggacgtgtcggggttcgagccgccgcagccggcgacgacgcaggcagcgtcggcaccgaccgctatgccgcgggctccgccgacggccatgatgccccgcccctccgctggggctccccgcgcctcggccggcgcagtgcccgttgccgaccagctggaccagctcgtggacagcgtccagcttgctagagaggactgcttggagcttagacaggaagctagcgacctccttgagtattctgatgcaaaattgggccgtgtcacccgttatcttggatttcttgccgacagaactcgaaaattagatcaagctgcccttgggactgctcgaggcagcaccggtttgattcatgagaagaaaaggcttttcaatgacctattgaccttgaaaggcaatgtcaaagtgttttgtcgttgtagaccactatttgaagatgagggtccatcagtactagagtttccggatgattttagtatccgtgtaaacacaggagatgaatctttaaccaatcctaagaaggattatgagtttgatagggtatatggaccccacatcgggcaaggtgaacttttccttgatgttcaaccatttgtgcaatctgccctggatgggtacaatatttctatatttgcgtatggtcaaagccgttctggcaaaacacatacactggaaggatctagtcacgatcgtggtttatatctgcggagctttgaagaactgtttgatctttcaaactcggatactacttctacagcacattttaacttttattttactgcctgtgagctctacaatgatcaggttagggatttgctatcagaatctagtagcactgtcccaaaagttcgaatgggggtccaagaatcctttgtggagcttgttcaagagaaggttgaaaatccactagagttttctgcggcactaaagatagcacttcaaaaccgatcagtaaattcgccaaaggccatggtttctcacctgatcattaccattcatatacactacagaaactatgtaacaggggagcatctatacagtaagctttctctagtggatttgccagcaagtgaatgcttgcttgaangagatgccaacagggacaatgtaacagatttcttgcatgtctcaaagtcactttttctgtgntgngtgatgcatttgcctctttaaagcgc

SEQ ID NO: 44965 - DNA, 395 bp, Zea mays
  unsure (1)..(395): unsure at all n locations
  Clone ID: MRT4577_141012C.1
cattgggtacctcgaggccggccgggaaccttcattatatccgcctcgtcccacttgatactgtgcatgaagccaactgcctctgctaacaggctcctgatccggtcgcattcaccttcattggcacgttcttattccctcaccttcacctcgctcgcagcaagtcgcgccatcgttcctcgtcaacaaacctacttccatcgctcgagctcgttagtgatctcgtatcgaccgcactcgtctacctgctgcaagatcgacaccatggccagctcgtccaaaccaggtccctcgggcaccgagcccaagacaccggtcttcatccaggaggtgacgcctgagatcaccacngttcgactaccccnttcagtcganttcggcatcctggccccatc

SEQ ID NO: 44966 - DNA, 295 bp, Zea mays
  Clone ID: MRT4577_141013C.1
atttaagccaccaactggccatcaacggggcgtggtccgtccgcccggccggcagtccccgcacgccggttggtccccacttactggcatgggcctggctcgccgcgcgacgctcccgtcgatccctgccgcgctcctctggtagtcacagctaggcaggcggccccccttgccgtgtggcgggctcgggttggcccacacgccggcgcggagcgggttggtggatcaaggtgaccatggggttcgttacggcgggcgcgtgcgggaaggcctcccggaggaggtctgtcagtta

SEQ ID NO: 44967 - DNA, 365 bp, Zea mays
  Clone ID: MRT4577_141014C.1
aaccccggaaaaaaaaacttgggggtgaacattttttatttatatcaactggcctaagggaggtttttgtcggcaagggcgatacaaggacatttgttgggttatgtgttggcgcggtacttttccggtttttaagcattactttataaccaagccagacagagggggcaaagcttcaggttacaagcgaagcaaagccctttggggcatgttcccacaacaaaccaccaccaatgtacaacacttttttacctaaactggcgggtcaacgaacagggaccgctttttttcttattttttttaaaagcacagactggtcaccagcttttttcccaggcacaatgataattgggggtgttttacag

SEQ ID NO: 44968 - DNA, 439 bp, Zea mays
  Clone ID: MRT4577_141015C.1
gggaacaaaaaaaaaggcctggcttgctcacgggtggggagaggttttaccaaccaccaaagcccaaggggggcgctcctaattaacgagatctcctttaacaaaggggcagacgtggcatcctttttttgccccttattaaaaaacgggaccacccgcgccgggttgatccattcccaggctcatagggaccgggggtaattaaaccaaaaacaccctcccttctatggacggggcggaacaatggggggcttaaaaggaccctcccaacgtgccaaaaatggtacttgggagacggtcgcttaaggggggggcccaatttttgaacgggtagaaataaaagcccccggggcacaacctttttttccggtatagacaggggctacgctggaaactgatttaaccgatcacgaacaccttgatccaaaagagcgttcaa

SEQ ID NO: 44969 - DNA, 196 bp, Zea mays
  Clone ID: MRT4577_141016C.1
caccaacattgcgtatactctaatcgagacctacactaattgcaactggagggctactacatacatgtggcgactcaacttattaatcccagtcataattatctttgaccagcaataccacaagcttttatagcacttttccatggtcgtgcaaaggcttggcgtatacactgacaaacaccacacattcattttt

SEQ ID NO: 44970 - DNA, 423 bp, Zea mays
  Clone ID: MRT4577_141017C.1
ccttagtagaacacgctcttcgctcggttattagtaccgaaaacggagaaaaaaaaaatacatcgaatttcagtgatttcggaacgagctgagaaagtaaaacattgagtgtgaccgattttaccattctaagttccaaacgatggaaccgcttgttattattattttttgaacccaatgattattagcagtgagcggtagttcgtagttccattccatcgaatatctacacaaagagcctagaactaatgtacgtacgaattacatacagtccagtcacccgccgacggtcggtcggtcactcaccaacgccgtacagctcagctgggtccccagcagctgaggtacatggccttgcggagcgactcgtcggcgccggcctgcctgcgcccgtcggcgcaggccgcccgcgccccggccagc

SEQ ID NO: 44971 - DNA, 180 bp, Zea mays
  Clone ID: MRT4577_141018C.1
aactacgaacgccagcaaacaaacagcgcctgaatgcaccctatagcgcaggaggcgccggaacccctccacccgaacccataaaacccaaacgcacggcgaggcgaggcgagggcaacaggccctgggcgccggcagaccaacgaccgcacgccatggccggcggcggggagagggagg

SEQ ID NO: 44972 - DNA, 325 bp, Zea mays
  Clone ID: MRT4577_141019C.1
tgactgcacatgcccgcatactgtaagctcggatactgtagagcgcgtcgcccctttttttttttttttttttttttttacctgaaacttcgagattaagaactgaaaatcgagctattagctcaattttccttctcaggttcgtcgtcgtcgtctggggacatcattatttatttcaactagctacacaagccacgctagcaacttagcatggtccatgacagacgggctcacgcatgacaagcacttggcatcctagccctccatcaggattcaagagatgtggcctcggctctagaggttctcgacgggatccctgatgatc

SEQ ID NO: 44973 - DNA, 414 bp, Zea mays
  Clone ID: MRT4577_14101C.1
acccacgcgtccgcccacgcgtccgcccacgcgtccgcggacgcgtgggggcagcgctcggaggtggccctctgtcgggtggactggtggacacatccgcgcccatggccaaccgcggtgccgcggccggcaagctcactgtcacggagaccttctccaacctcagggagcatggcaaggtgcgtgcgtttgacacctcacgtccgtgcttcgcttcgtcgttacccttgggggccaattcacgcgagcacccacatttctcttggtgttcctgattgagtggcatggttggattgctggcgccatggtggccgatacccaatgttggtcccggttggttgcagggaataccgaattttggtcacatttagttgcaaggaaatggattacgtctttggaacaatatgtgtattc

SEQ ID NO: 44974 - DNA, 375 bp, Zea mays
  Clone ID: MRT4577_141020C.1
cctgggttcagaaatgctgcctgcctgtctgtctctccatctgtttggtgggggtagagctgatccagagcacagatctgtttcgtgcattggaagaccccacccaagcttggcagccgagctcgtgtatcctggggctcccttcatctccagggagtcccctccccggccctaccagcgcccgctgggctgagcccctaccccacaccaggccgtcctcccgggccctcccttggaaacctgccctgcctgagggcccctctgcccagcttgggcccagctgggctctgccaccctacctgttcagtgtcccgggcccgttgaggatgaggccgctagaggcctgaagatgagctggaaggagtgagaggggac

SEQ ID NO: 44975 - DNA, 173 bp, Zea mays
  Clone ID: MRT4577_141021C.1
ttaatcatagagaacgtagtacaaataggcatgtattctcatgtataaaagcgacgtaactattctataggccacgcattgtcataggcttgtgcttcctcgttacagagcttgaatgttcctggctctagcaccttggtgatgatgaagggtccttcccaacgaggagtgag

SEQ ID NO: 44976 - DNA, 1168 bp, Zea mays
  Clone ID: MRT4577_141022C.1
ccggccggggaaactttgctagctagctagctgaaaggctccggccgggcctggctggtacacacgcccagatccttgttgtgcacgtacgttccaaacttgctcatactactcagagcgcggcgacatgttcggctttctgaaacaacggaggcagaccccgtcagggttctcgtcgtcgtcagccgccgaggaggtcaccgccggcatcgatggctccggcctcgtcgcgatcgtcacgggcgcgtctagtgggatcggtgccgagacctgccgagttctggcactgcggggcgttcgcgttgtgatgggcgtgaggacaccgtctgccggtgagcgcgtcaaggaagagatcgtgaagaacgtccccgctgccggaatcgcattttctcctttcaccctttcggatgatggaattgagttacaatttgcaacaaattaccttggccattttctactcactaatcttttacttgaaaagatgaaaatcacggccatggagagtggaatagaaggtagggttgtgattgttgcttctgacagctacaagcacacgtatcgagagggaattcgttttgataaactcaatgatgcatcaggctataaaggcatcctggcttatggccaatcgaagctggccaatatattgcgttccaatgaactttcttgccgcttgaaggaagaagatgcaaaagtagtagtcaactcactgcatccgggagttgttgccaccaacatcacgcgccatctgggtatcataaaagatattctttctccaattgctaaacttgtactaaggggtgttgaacaaggtgcagccaccgtttgttatctggcattgcatcctcaggttgctggagtcaccggcaaatactttgtggatttcaatgctgttgaactaaaaccgcctgcaactgacaaggagttgtccaaaaagctctgggattttagtgtcagcctactccagtgatataactgccgattagttctcctacgccagctggtaaataaaggtcgatctgaatgagagatcatgtttcagtaatagaacaaggtgatccagcagtgtaatatctactactacttattgtttgactagatatggatgccatatgtttgtaatttgaataaattgattggatacatttctgcactaaaaaaaaaaaaa

SEQ ID NO: 44977 - DNA, 486 bp, Zea mays
  Clone ID: MRT4577_141023C.1
aaaaaaaaatgtgcatctcaacactcaatagtatcacatctttagacatgtccgacattgccacaattcaaacaagtgcagaaatgtatccaatcaatttattcaaattacaaacatatggcatccatatctagtcaaacaataagtagtagtagatattacactgctggatcaccttgttctattactgaaacatgatctctcattcagatcgacctttatttaccagctggcgtaggagaactaatcggcagttatatcactggagtaggctgacactaaaatcccagagctttttggacaactccttgtcagttgcaggcggttttagttcaacagcattgaaatccacaaagtatttgccggtgactccagcaacctgaggatgcaatgccagataacaaacggtggctgcaccctgcaaaacgatcagtaataagcagtggtagagtttgaataataataaataaatacctcttcttaagt

SEQ ID NO: 44978 - DNA, 141 bp, Zea mays
  Clone ID: MRT4577_141024C.1
gatccataccataacctcgcacagcaggacgcattacaagaaccaacaaaatattcacacatgacacaacgcggtggctggcacgcacacggccggcttaaacatttctgtccagaacagcgcggtgttagcgccgtcgtc

SEQ ID NO: 44979 - DNA, 827 bp, Zea mays
  unsure (1)..(827): unsure at all n locations
  Clone ID: MRT4577_141025C.1
cattgggtacctcgaggccggccgggaaaccgggacttccttgtccagtccatgtcgtagctattatgacatgggaatgggatggatgctgaaactttgctagctagctagctgaaaggctccggccgggcctggctggtacacacgcccagatccttgttgtgcacgtacgttccaaacttgctcatactactcagagcgcggcgacatgttcggctttctgaaacaacggaggcagaccccgtcagggttctcgtcgtcgtcagccgccgaggaggtcaccgccggcatcgatggctccggcctcgtcgcgatcgtcacgggcgcgtctagtgggatcggtgccgagacctgccgagttctggcgctgcggggcgttcgcgttgtgatgggcgtgaggacaccgtctgccggtgagcgcgtcaaggaagagatcgtgaagaacgtccccgctgccgggtatcgacgtcctccaacttgatgttagcagcatgtcatccgtcaagagattcgctgacaacttcaacggactaaatctcccactcaacattctcattaataatgcaggaatcgcattttctcctttcaccctttcggatgatggaattgagttacaatttgcaacaaattaccttggccattttctactcactaatcttttacttgaaaagatgaaaatcacggnncatggaagtggataanaaagggagggttttgtgattgttgcttctgacagctacnagacacgtatcgaggaggggattcgttttgataaactcaatgatgcatcaggctataaaggcatcctggcttatggcncatcgagc

SEQ ID NO: 44980 - DNA, 325 bp, Zea mays
  Clone ID: MRT4577_141026C.1
gaccgacgcgtccacccacgcagtccgaaaaaaaaaaaaaaaaaaaaaaaaaaaaaaaaagaaaaaaaaacaaaaaagaaaaataaaaaaatataaataaaaaaaaaaatagggaggctgctctagaggttggttacttcatttctcaggcatgcaaggttataacgtgttccttcttttaagttttcttattttaattggctgtcgttttacattcatatctcttgttaaggtcctgccgttttaaacctaaggccctttgttttaaacctttttttcggtaacacccttgttttttccaaaggttagcccctttgtttcttcc

SEQ ID NO: 44981 - DNA, 561 bp, Zea mays
  Clone ID: MRT4577_141027C.1
gccggccgggctgcgctctacaacccatgggtatcagtctgtgattctcgccacaagcgtagcgccaccggtgctagacgtgctcaatacagaaagaagagaaagttcgaattgggtcgtcaatctgccaacactaaattaggtagcaagcgtatccacttggttcgtgttcgtggtggtaacttcaagcgtcgtgcccttcgtttagaaaacggtaacttctcttggggttccgaaggcatctctcgcaagactcgtgtcttgactgttgtctacaatgcctccaacaacgaattggtccgtaccaacactcttgttaagggtgtcgtcatccaaattgatgccactcctttccgtcaatggtacgaatctcactacgctctccctcttggtaagcaaaagtctggcgaggaagccgcttctgctgaaaagaaatcaaagagtgtcgaaaagaagattgccgctcgtgccgctactgctgctatcgaccctctcttgaacgaccaattcaacgctggtcgtctctatgctgtcatttgcttctcgtcctggtcaatcccg

SEQ ID NO: 44982 - DNA, 309 bp, Zea mays
  Clone ID: MRT4577_141028C.1
tctcacggtagatcaatttggtgaaaggaggggttgcacacaatgtgggtggtgacaaccacaaccattggaaacgagcacaggctgtgaggatcaaaagtctgatagtgccaacgatcgacatggacaacatctgtttccatctcgaggaaaaaacacgcggtaaaatggtataccgcagcataaacatgattatactggaccgcggacggtgctatgacccccagaaaaggctctggcggaccatcgacggtgaggaaaccgctagcttctatatatcctaagctggggcaaaacgttgctgaaggg

SEQ ID NO: 44983 - DNA, 1214 bp, Zea mays
  Clone ID: MRT4577_141029C.1
tgttttttttttttttttgagtactatttatcttgaattgaaccaaatagtaattctgtatatacattcacaccatcgagcattgctcggcgtgcaaggctttacacacatgacaaaaattgcaaaccaaccaactcggcacacacagacacagagatgaatcgcaaacaactcacacacaagctaaccactaataagcatcactacactgccactgaactctaagcatgatcgccagagccccgccaaacgaaaaccaccagctacgacctgagcttgagtgattccaggccgtggatccccttcttcaggatcccatggaccggccaaccaccactcctcaccttcgatctctccaccgcaccaccgtctcgctcgcacgcgtcgttctctgccacgcaaacgcctttgcccttcccgccgacgtgcgctctcgcgccggccgcgcgcctgccgaagctttcgaacaggtcgggcgagtgctgcagcacctcgctcgccgacgagtaccccatcagccggtgaagcttgccgtctctgcccatccttccgtcgtcggcggtgttgaaggaagagttcctcgacacgtacagcggctgcccgtcctcggtgctgctgctggtcgagtggccgatgccgaacgagagcccgtactcttcggagtaggacacggcgggacctgcccgctcgaagccggcgccggcagcctggtggccgccggatctcgtcgtacccgtcagtgctgcactcatcgccctcgaatggcgaccgcggcttcttcctcccggcggggtccctgtacgagtaggaaaggagctcggagcaggcgccgcaccgcagccggcgtgctcctctgctcggcacggcgaagtcggcgggcagctggaccaggctgacgcagctggagcagatgacgaacggagcgccgcttaggacgggcaggcagtggtttctgggcggaggacgacgcttaacctgctcgaccggtgccctgtgcatcgctgcaggttcttgcttgcatggtctgtatctgtcacagggtggctgctggcagctatggtggcagcacccatcacggcaaggtctcgtatccgtctgcacgttgtggtggaagtggaacggataaaccccgtgccggcgatcccgcagcgacgccagtccacgagaagcagcagcaccctggccagacttgctcgggcgagacacgtacccgc

SEQ ID NO: 44984 - DNA, 242 bp, Zea mays
  Clone ID: MRT4577_14102C.1
atacattagggttctctatattacacaaaatatcaaatcattttcaaatttcatacaatccaactccaacactatattgttttatattataaaaaaacccttccaaatatataatatcccctaaaccttaataaaacatacaacgttatttgctcagaaccaaactcttcaagtataccaatatcacacccaccctttttatatataacatttttactccaagtcacgcaaagcacccacac

SEQ ID NO: 44985 - DNA, 141 bp, Zea mays
  Clone ID: MRT4577_141030C.1
gcacaagaacctatccttcttgctgggttacaaaaacaatgctccctccaaccactccatcatgttgctctaccaaggccatgacaccgacattgatctcgcaaacattgagcagatgaattctttcaacacgaccttcat

SEQ ID NO: 44986 - DNA, 224 bp, Zea mays
  unsure (1)..(224): unsure at all n locations
  Clone ID: MRT4577_141031C.1
cccgggnttcgcagtacagccctttcagtctggnaatgggctctttttggcctttggaggagtgggactggggttaggtccaactttgtgcgtgaactagggtagggatcgttgtgggatggatgggcttgttggtattcttgtcctttcagttctttgggttgtgtttttattatgttctggttctgtgttttgtgtttttgttttttggggaaggagggggg

SEQ ID NO: 44987 - DNA, 474 bp, Zea mays
  Clone ID: MRT4577_141032C.1
ctacagcaagggtgtcttcacggggccttgcgggacgaatctaaaccacgcggtcctggtcgtaggctacggaactacgtccaacggtatcaactactggatcgttaagaactcgtggggcaaaggctggggcgagaatggctacatccggatgaagcgtaacgtgggtaccaaagcaggtctctgcggcatatataggatgcccatgtaccctatcaagaataagtaattgaccggccatgtccggtgccacactgccacctactactactccagccagcagatgcatgcttagttgcttatgtatgtacacaaactctactcataagaaataaataaataaacaagtaagtaacaatcgagtaaataataactagtgtagagtttatgtgtacgtgtgtgtggtttgaataaagcagtgtgtgttgttcgaataaatataatatttcttctattgcaagctcattacagtat

SEQ ID NO: 44988 - DNA, 442 bp, Zea mays
  unsure (1)..(442): unsure at all n locations
  Clone ID: MRT4577_141033C.1
attctttttataatttcctttaaannaaaacnnaccacagggggacatttttaattttttttgggtacattcccattcaaaggggggattatgaaactaaacctatttttaccacccactccttaattggaaaacaaattttaattggggacaaagggggtgttctccatgaacaaaacaaatgaaattaccggggggtgagacccactggaagaaaaaaagttctaaagtttgcattttggcccctgaaaaaatttaattattccccgaatcgaacaagaaaacacttttttggatcgcagggatcaaacaaagttaaaaccttgagaaacctggttttgccccctcgggagaaagaacctctccagggggctcacggggggagccaccaaaggggggatattaactaacttttttgcgcccggttttttaaagggggggt

SEQ ID NO: 44989 - DNA, 170 bp, Zea mays
  Clone ID: MRT4577_141034C.1
ataccacttaccatttgacgtctgttaagttatatatatataagcagcaagtggcgttatttacagctacgtacagaccaagggatattgataacacaaagcgtactagagtataagattttttgttgttaggttacaattggatacctattactgatgacattattgcc

SEQ ID NO: 44990 - DNA, 319 bp, Zea mays
  Clone ID: MRT4577_141035C.1
gcagaaagcatgccagtggttatttggctgctagcagcaaattacaggcctagtataatttacaagtgccttgcatgctatataggggaaggtgccgatagaatgaatgaactgagaaatggctattcattagcgttgcaatactaccatgtttgacggagtgccaaatttggtgagagaaaaacatggacacctgcttacaatgtgaattggattcacaaatgaggaagcctgcccgaatcggggagctttttgactaccctacccagatcaacttcctttagacctgaaaggaggctaaggtcaggaattgcgattt

SEQ ID NO: 44991 - DNA, 850 bp, Zea mays
  Clone ID: MRT4577_141036C.1
gccgcggccgggagcctacatttcttcaccgctagcgaagcgacacagccgccgccgtttcctcgtctcccatcttcatcttcctcgcagcgccgggactccatcttccgcttcctcccttactcgcgctcggcacgcaggcgacgggagcggcgctcaggctcgggctctcagcggcgacttcagcggcttcccctcccgcatcgcgccctcgcctccggtcctccgcacatcggccggtgatcctgctttaagatgtcagaagcactcgagaaagataaagaaattgatgaagaggaagaggagtatgtattgctagagttggacaattgtctttattcagacatgtcgccaggtgctccgttcgtactctccggtttggatacattgacgcctaccttgataataggtgacagtcttaagatgatcggagaatatgaagaaactattggcacctgctatctattctctgaaactgaagctgaaccgaaacctacaagtaatgagatggcaccttctgaagaaaacacagacaaacaagttagcagcagtaaggaagcgccgtcgaaggaggtgaaccatctcgccagcgttcaaaagatcctcaaatttcggccaatcaatgcggagcattcgcagcatcgagcatatcagcacaaggacaaggaattctagaaaaaaattgtagctggctatctgccgttatcttcttcattggccatccaaacgaggtggtttgtacactttgctttgttctatacataatctgatctattgtatcgatctgtcggtaattgtttctcagcattccccaaggaaatcatacaccaagcgggagaatttttttgtc

SEQ ID NO: 44992 - DNA, 302 bp, Zea mays
  Clone ID: MRT4577_141037C.1
aaacaaaaacattttggtttttcctccctgtttcccaagggcctcaacaaaatggggggccctcccaaacccctcaaattgctttatcttagggggggctttggtgcggaccccccaatttgtatgggcccatccccgctaaattttcaggacatcccccctcccaacttatgggaaacgggtttaaaaacccggaaggggcccgggcactctttttttaaattctttccaaaattgggttcttttgtgcggggtgcccatcaaacagcaaaccacggggtggatcccaatgtttttttttt

SEQ ID NO: 44993 - DNA, 337 bp, Zea mays
  Clone ID: MRT4577_141038C.1
aaaatatattattggggaccaaataaaaaaaggttccagcagaagcaaccggggcaaccaaaagggggggagacacacggacctaaacacaaagacggaccccaaacatgcaaagagggagagcaaaaagaagaacccaaaaacagggttgcccaaacggacaccacacaataccaacccaaagaaaaaagctggctcgccgcaaaaaatggaaaaccccccccccaacccagaaaaccaaaaaccctatgcccggaagcccaacgaaccaagcgggaaccggaggggttgaaattgcggccgggaccgcaactccaaacgtgggggggcaaggggg

SEQ ID NO: 44994 - DNA, 534 bp, Zea mays
  Clone ID: MRT4577_141039C.1
tccaccgcggtggcggccgccctttttttttttttttttttttttggagacctaacacaactgaaattaaactcagatacaacacccgaggccaaagtaacaaaaagatccaacaggttgacctcgtgaactgggcaaacaaacaaacataatctaatttataaactataaagcccataacaccctactctgcgagaaagaacaaagacaacggtagtggctctatttttcctacgccccaccacaatcacaaacagctaacataatgccacaaacatggactcacgagtgcttcatttgggctgcgggaaaagcaaggataggcacaaggttctcttcactcacaggctcacagtttttgactgaattcgacatgtttgccggcatgttcatgagtggctagcgcacttatgatggacacatatatgctcaaatctttggaggactgggctattctgacaaactacatgatacaaatattaacatgaccatgttcacaaattacaaataataaatgttcagacctggctcgtt

SEQ ID NO: 44995 - DNA, 290 bp, Zea mays
  unsure (1)..(290): unsure at all n locations
  Clone ID: MRT4577_14103C.1
gcttggtttgttttttttttttttccattattgttgttgtgtgacgacaatggctccaacaactcgccaccaatgacgacagttgctactgtgactagctcctacacaagctgcaggcggttgtcttatttttattctgtgggtctaagaaaaggtggggggggggggttttttttttttggccatcntccaccacccaacnaagggcctgagtgtgatcatttttacgtcgcctctctcttggcagacaccctcccacgccgccattctaccttttgacctttcactta

SEQ ID NO: 44996 - DNA, 5034 bp, Zea mays
  Clone ID: MRT4577_141040C.1
gcctgggcccgtaccagaacgattgcgtaacccttctttccggctgttcaccaaccccacagcagccccggaccgcacccaatgtacgaacacctccccgcgttcccgatcgcaccggccgccgtcggcgactgccgcggcatccccttcgacccttcctttctcccgcgcctcctcctctccgccagctcctgcacctcccccttcctcgccgagcgcgcagtctccgccctccacgcgaccggtctcaagctcggcgcgctcccctcctccctcccggcctcgaacgccctcatctacgcctactcccgagcggacctcatcccctccgccctccgcgtctgctccctcctcagccacccctcaaccgcctcctaaaccaccgtcctctccgcgctctcccgccacggccgtccccacgaggcgatctccctcttcgcgacctccgcgtccgcggtagccccccacggcgagctactctcctgccttgtctcttgctgccgacgcgcgtccgtcgtagtccgcgcgcgggcgacgcacgcctacaggatcaagaacggggctcttctggctttttacagctcgggagatgcggcgctggtcgccttgtacccgaggcgcggaaatgggggtgcggctagatggtagtttggatgcatggttggcattgaacataatgccctggaaatctatgttcagtgcgatcgaattttccggaaatgtcgaggacttgtatgtaattttgtatgggttgtactccgtgcctataaataggtgaacagtaccagcgtactgttcacttggacttggcattttcttttgcgtcacacttgtactttcaactccgtccaagccgaaggtacatttctgaattgatattgtctctaattctataataagaaaatatttccagactgaatgtgtccatgatctagggatggttatcgtagagctaccaatgaagaatgctcagttaatggatatgatgaaaggagaatttgagaagcatggaaatggaggataggcccttgaatttataccagtgagtaagccgtttgtgatgaacattgtcatacatagagcttcgcaccacaaaaatgattggtttcactctggtacgatttatgatgagtatgtatcatattttggcaattagtaagctgttagactatgatagacttgggttcatggttcttgcattgaggacttgcttgcacgtgctgggaggtttctggaggccttgcaatttaacggccagatgtaagtgagaccaaatgcagttgtctggggtgctttgctgtctgcaagtaggatgcatcacaacgtggaatttgcaaagattgcatttgaacaactggttcaggtggagcctgagaatgctgggatttttgtgacaatgtcatacatatatccaaaggctggggtggtagaagatgcaaagagagttaggatgatgattgatagtgtagaattagcgaaaccttctggaaaaagctgcgtggaaattttgtagtaaactataaaactccacggatttgtcagggtttcacatcttcaaatcgaaaaggattgcaacagggcagaccaaatcatgcgattagtgatatgaagagatttgaagtgcctgcatgttttgatgcaaccaggaagctgactgaagatgaatatcagcaaatgttaccacaacagatataataaaacttatccagcaacatatactgatctccttattacttcacatgaaatggtggcaaaataaaacgtatccaggatgaggatggagtcaattcgaaactgctgccgttccctgcatgcataactcatctcccaggacttatccgacaacaaagaattgaaatggaggaagggcttcatatacttgtagccaaggggtggtgacttgtaaacacaattacgcctcatgcatataatgtcatctagttcttagtgatgtgcattcgtgggtgttctcggttctagtgagagctaactcactgagtcaccggcgagtctctacatagaagtctgtccatatttgcgaaggaagacttgttcgcctcgttgtctagacgttgctcatgttccagcctccggcattgggacgctccggcctcaagtgtgcttggctaagagccttaatagatgaaaggtattttatcagtgatacagtagtggggatccttatctgaacctcgtggataaataaattaattttttttattcacatacaagctctatattaagaatatccctactgtttcgatggttaaaatgacttggcatatgaatttaggtcacacttgtattgttatctccttcgaagtcgaacttaaatttgaaattccatatcggatctcgttagatgtgctgagaaacactacttaattaaagagttagaatcctagtatgagcgaggtttaggctgaggtcaaaaaagatctcaccctgttccctggtcgtgtggacaggagatggactaacctatggagacggatcctcgtgtaggggctaggaaggttcaaagcacgagtaaagatctggcatatagggggcggtggaccaactttcgtgacctttctcggtcggggatccgattaagcttcttcttcatttaataccgtaggggcggtctttcccctaccagccgagtttttgattcttatcttcaatgtttcttcttcagttagtaacaaatttgttgagttgcggcttgaaaggatggcagacaagaagatcaaagggactgattcatcttgcattatctcttccacaaaatatttgcaaagttcagtagggcctaagctaattgaaggtactaatgaagatgattcaggaggcctaagctaattgaaggtactaatgaagatgatctcaataacctccagaaaacagtaagtcacagtgccaattttgtggcatcgatgcagcaagaacatcctataagccttgtattggctgagaacaaaagcaatttgcaagaaattttagttgaacagaagattcctacaggtgtttctatcaatctttcaccaaaaatggatagcagtgaagtgccacgcaaggcttatagcagtgaagtagatgacccaaacacaatgaaatcaaacacatctagttgcatgtttgaggcatcaaagcagcaagaatgccctataagcctcattttgcttgacaagaaacgcgatttgcaagaagtttgtgttgaacagaatgttccttgtggtgattatgttgccctttcaccaaaagcaaacagtagggaattaacatcagccaatgaggttcctgatggttttttaactttctctagaaaggcttatgaatcaaaggaagcccaaggtgattatatcacattggaagcttcagaagtaaatatatgtgcagcttcacactccatgcttaggttaattttaggtgtccaggttgaggcttcttgattgattctggtaaggttacttatgaaacaccacctgccatcatgaaaagggtgaaagaagatagaccactgatcgcctacagatttcataagcgccaaatgagcctaggagacacacggcactgagcagatcataacaccagcaagtacttaagaatgcataaaaccattgttcatactacgactcccattgaatcagtgaaggttactgcttcaaagttgggtgacagcatcaactagaaaactcacaggacacacgcagcacaggtaacttagaactgctatcccgtcctcataaatactttttatatgtattaaactgtaatagctctgcgacatacactcatttgtttctataagcaagaaagtgaccatatagtgcttgggtttgataaactaaagaacgaaatttcagaatgtaaacatcaaactgaagctgcaaaattatcagtattaaatgagctgcagagaacaaagaaagattctcgagatggagcccgctaaaaactgtagatggaaaagcttccgcaagatgatgtggtgcggtggtgccaagtgctgctattaattatgcagtaaaggggattaggtattcacaattgtggttttgtggtgatttcatggatatttaatagtgtgtcacatcaaaatttttaatgacatggtataacctttaagatgattgagttttatgagataaaattattttcatagggatgaaatcatgttaactcgtttccaaggtcttagaaacagtatgaaacctctattaaaagtgatttgttttatcttcacacatcttactaatttcaattagctattgagttgtaacatttaattgatatgttagcctatacaatattcttagtgaaatattatattgagagacattgttttattcataacgtttttaatgatgtagcagcgttggaaagagtgctatgaaattcttattgtaaatagcctttaggacaggaccacaggagcagttcagcacatgctaccacactcactggtactgttttgatctcctgattgcttcacgagaaatgaaggcaaaacaaagcttctcaagatggagtccactgaaaactgtagatggaatgtttttttaaaggaactgtaaatggaaaagcttccgcaagatgatgtggtagtttcagggaaagatgctgttggggaccttcggcgtccgaaggtcctcaaaaacaggatttaacagtatttctgcagtacaatgtgtgaacaggtatcctcggactaaagtcggcattgcaatagaccggaataatacgaaggttgacacagagccgaaggtgcgagcaggaaagcttcggcgcgacagcaaagagtgaaaccgacttaaagatgaaaaggctattcagacctcgatagactactatagagttattatcaaatgtaaagggcatgaatgtaattttgtaagggctgtgtcctgtgtctataaataggtgaacagtatccccgtactgttcacgctgacttgacattcacttttttgcgtcacgcttgtattgtcatcccttctcgactaaaggtacacttgtaattcaataatatttccgtttatgcttgat

SEQ ID NO: 44997 - DNA, 244 bp, Zea mays
  Clone ID: MRT4577_141041C.1
ggccctaatggccccaaatcataaaggttctacaagcccacacgtgctgttgaacggggggatcctttttaactttttttgggaaagttgaaatgcgggggtttgaccaaaagcccgtgaggacttattgcttactttttactgcacggcatgggtttttcttcttttttttttatcgggggcttttcgacagtttctattagacttttttgctggaacttaaaaatggtctttgtatttttta

SEQ ID NO: 44998 - DNA, 267 bp, Zea mays
  Clone ID: MRT4577_141042C.1
ttcaactcgactttagagtttttaccctgcgatgatcattgatgtttgtgaaaattggtgacggggacatttcttttcttgagtcaagggagaagaaagtacggatagaaagtgcctcttctctttagccttccttgtttgcggttgcttgacagagtcaatgacaaatgattccacttagaggaaaagtgggactacagcttgcatcgtcgttttccccctcccttatcaacagctaaatacctggactagccagccaagtgcttg

SEQ ID NO: 44999 - DNA, 708 bp, Zea mays
  Clone ID: MRT4577_141043C.1
agcgacaaatgttaccgtacagtacacaaaaccaagccattgccatcatcatctctcgaatgctcccgtcccgtcgcatatggaaaacgcactgctgccgtcgcgtcgtctctcctgcggcacactatgtgcccatggatgaatgaatgacctgaaacgatttctcgatcgtatgtacacgaacgaacccaggcctcttcaagtcgctggtttctctctactttgcttttaccacgcaccacctgttcaccccacccacccacacagagtgagcggccgctatttgcaggggcctagcggggtagtagatctgcccgcctgcttccgtactgtctgcccgttggtttcaggagcaggagcggggtgaataacttcaggcaacggcgagctgtagccgctagccccatctgctgccggtggtggaccagatacgacctggtcgggctcgtgtctgggaggaggaggaggaggaggagcctctgccgcccttgacgagtgcccaccaccgctggcgaacaggcatcggcacgggtccgatctcgacggttcgggggagcttggtgggcttattatcactatgctggacagatgataatgatgatgaggaggaggaggaggatggggtgcagcgtgttcgctttcaggggtagtactagtatcaggcacgagcagcgacattctacagaccgggcacgtcgagttctgcgc

SEQ ID NO: 45000 - DNA, 350 bp, Zea mays
  Clone ID: MRT4577_141044C.1
agttgcatcatccatgcatatagaagtacttccgatgacataatctgttcaatacatatatctagaaatatatgcgcgaaatcatctcacgtctcaaatccagctcattactactaaatcatcccacaagtttttagtagtgctactacaacattatctcaaatagaagtctagttataagtaggatgcaagggcattatctctccatcaggccatgaggtgaacatctaaccatcattggatgaaccaacgatagtgagatccgccttcacaacgcagctcgatcccacaacatagcctcccgccgggtccttcagattcttgagtccaaggaaatcagcccatcccca

SEQ ID NO: 45001 - DNA, 338 bp, Zea mays
  Clone ID: MRT4577_141045C.1
gtgtctactagtcggcggccgccctacattttgttgtggactatgacaagtcctatggtttagcggcgcgcctaagcggggactgaccaccagcctgaacacatcggcggcgactgtctacttgcgccggaccttggtcactacggcgtcgcgcgcgaccaacacggaaaataacgccagggcggctaccaggaaaccactaacgtcttctgggcggacgaggagggcacaaagacatgctccagcgtatttccgacggtagcgccgagaccgacgtggcggttgactgtgaggagagggcgactcaattgctgctgcggccgcgtggtgccaacgcc

SEQ ID NO: 45002 - DNA, 316 bp, Zea mays
  Clone ID: MRT4577_141046C.1
cgagatggaaggtcctgaacaggtacgagaagacgctgctaagctacgaagctctctatatgagtatgttccatcaatactgcgtgttgaaaaacttgggttttggctcaaatgcgacgatccatctcatttttattctgtcgtgaactctggctatttttcttcttctctaatatatatatggggattttaatgatcaaatttctgagctctatcttgtctagtccttgatcagactatttcagtgatgtgtgccactcttaatttggacgcagagcaacccttgcgccatatgcctgggtgccatgggcgccga

SEQ ID NO: 45003 - DNA, 1733 bp, Zea mays
  Clone ID: MRT4577_141047C.1
accaaaaccgggaattcggcaggagtacccacttcatcaccaaggccgtcgtctctccccacgccggccgaacggatggcggcggcgccgactgcggatgccatggacgtcgacgcgccggctaggacgctgactacctctccggccaccaagttgcgctcccctcacgacctcctcgcagagacacgcgcctccatcgagaaagtcgcagcccggatactcgccatcaagaaagacggcgcccccaagtcggagctccgcgagctcgtcactcagatgtctctgcacctcgtcacgctacgccaagtgaacagagagatactgatggaggaggacaaggtcaaggcggagacggaggccgcgaaggcgccggtggactccacgacgctgcagctgcataacctgttgtacgagaagaaccactacgtgaaggccataagagcgtgtcttgactttcagacgaagtatccggggatagagcttgtgcccgaggaggagttccagcgttccgcgcccgcagacatccttgagaagaccctcgctgccgacgcctcccacgacctcatgctcaagcgcctcaactttgagctcgtccagaggaaagagttatgcaagctacatgagaaattaggacaacagaggggcagcttgctggagacaattgctaatcagaaaaagtttctttcaagcctgccatcacatttgaaatcattgaagaaagcatcactgccagtgcagcaacagttggggatgcaacataccaagaaactaaagcagcaccatgctgctgagttacttcctactccgctttatatagcatacactcagctgctagggcagaaagaagcatttggagagaatattgaagtagagatcgcgggaagcacaaaggatgcccaaatatttgctcaacaacaagccaagaaggaaaacagcactctttcaagtggcgacaacagaatggatgatgatgtgattgatgatgaagaagatgctcagagaagaagatcaagatccaaaaagaatgtggtgaaggaagctaataatccagcagtggcctatcaacttcacccacttaaaattatacttcatgtatatgatactgaagattctggtagcaaacgccgtaaactcatcaccctgaggtttgaatacttggcaaagttgaatgttgtttgtgtcggaattgaagattcagagggtctggacagtaatatcttgtccaacctatttccagatgacactggtttagatctgcctcaccagatggctaagatttatgttggggaggttccaaacttcagcgacaaggattcaaggccatacaagtgggcacaacatttaggtggtatcgactttttgcctgaagtgcctccatctgttggggatgattctagcagagcattaaacactgctgatttgtcatctgggcttgctctgtaccgtcagcagaaccgtgcacagactattttgcagaggatccgcttgcggaaagttgcacagatggctcttatgtgagtcactggtctatgttttttgctgtttgggacatcgatgaaaaaaaccggatggcagattagcctgagagtgaccgtgtaatttgactgacgattttgagctaatgatgcttttgcttcattgcacatgtcattctgagttatggcaatactatgaatcatttaccaggcagaaaaaaaaaaaaaaaacaaaaaaaaaaaaaaaaaaaagcggcc

SEQ ID NO: 45004 - DNA, 171 bp, Zea mays
  unsure (1)..(171): unsure at all n locations
  Clone ID: MRT4577_141048C.1
gggtctctnatctctcctctggntcggtccnngctctccggagaattgttgctgggattgctcgggggcctcgccgccggcccggngatgggactggncgaggcggcttcggcgcacctgcacttttacatgcacgacgngacgggcggcccgcccccaacgccggagcaa

SEQ ID NO: 45005 - DNA, 817 bp, Zea mays
  Clone ID: MRT4577_141049C.1
ccggccggacgagcgaaccacgcacggacggccaccagccgctgcgtgcgttcgctttcccccgaaacgtgacccgagccgagctgcagagagagaaaggagaagccgccatgaagcagctgcagctgcctcctagtcgttccagttaaatccgtgctcgcccagccacgactacgagccccagccccagtttttctcctcccgcccccgttccccgtcccgactcccgagtcccgacccaacccatatcagagattccttccgttggtggcgctggcgttcccgtgagtcggcccgcgcgcgaaggcggccgtgaccgaccgtccggagcttcatgcgccaggggcggcggctccaccccgtcgtttgatgggcaacgcatgcggcggcgcccttagatccaagtaccagcacagcttcaagcacgccgcgtcgtcgcagcgccacgcctcctccgagtacagcgccagcgccgtggccgacgactcgcccaggaagccgccacaggcgcccgccaccacggacgcccacgcgccgccgcccgccaccgccaccgccaccgccgccatgaggcgcggcggggccggcgcgcctccggacctggggtccgtgctcggtcaccccacccccaacctccgcgacctctacgcgctcggcaggaagctcgggcaggggcagttcggcaccaccttcctctgcaccgagctcgccacgggggtcgactacgcctgcaagtccatctccaagcgcaagctcatcaccatggaggacgtctacgacgtgcgccgcgagatccagatcatggcacacctctccg

SEQ ID NO: 45006 - DNA, 365 bp, Zea mays
  Clone ID: MRT4577_14104C.1
aaacaaaactttgtttgaaaaaaagttccatgggaagtccccaagggcgaaaagggggtcaacaaagatgttcgaccacaaaacttcttttttcagccccttcttaggcatttatttttttggaaaagtcacttgggaggggctcccctaaaaggccttattttagatcccccaggggttaactcctttggggggctagcttcagggctgctttttttgggatttgtttttttgcacaaacgaagggccctccagccactcatgggggggggcataagttgttccagttccgagctccaccttgggggccttttttgttttttttgaggggtggtgaacctggccatttgccctttatccaaagg

SEQ ID NO: 45007 - DNA, 345 bp, Zea mays
  Clone ID: MRT4577_141050C.1
ccaaaccatgcgaattttttttttttactttttcaactagtttcaggcggttaaaaaaatatctttggacaaggcggcaaaaccgggagcaggtttgtataaaagtttaagggcagcacatgcacccagcaaaatttgggcctgtaatgttcaacaaacccctagggtcccccgagcaaagtttgagacattccggggaaaaaaaaattaatttgggaagcacttttttccgggggggaagaaaaaaacttgttcgaataacaaggcttggagtttttaatttaaggggggggtgttaatgggggggattaggaaaacaccgcggggggggaattcccaccttgg

SEQ ID NO: 45008 - DNA, 465 bp, Zea mays
  Clone ID: MRT4577_141051C.1
aggtcgacggtatcgataagctttgcaagcgatcgtcggaatgtaaggcttaggctagtagctaacgactttaacccttttaaaatcatgagtacttcgtacaatacttggcttgtagtgcttgttctttacaatttgcctccatggatttgcatgaagcaatcttcttttatattatctatgattatccctggagagaaaggtcccggaaatgatgttgacatttatttgcagccacttattgaagagttaaaatagttatggtcgggtgttgagacatatgatgtattgagaaaggagaacttcaatttacgtgcagctttgttgtggacaattaatgatttcccgacttatgccaatttatttggttggagtaccaaaggacgttatgcttgtgcttattgtgctgcgcaaacatgtttgaaatggttatataatgggaagaagttctcttatatgggggca

SEQ ID NO: 45009 - DNA, 269 bp, Zea mays
  Clone ID: MRT4577_141055C.1
accaccgtcgacccacgcttcctaaaaacttattcttaacccatttcaacatttatctaattattccaacatatgcgactccagtgcaattattaagggcccttcgataacacctcataaatattgcattactcaacttacaatctaaattacaaactataatcctatactaactcatcaatttcaatttttaaccaaaattatccacccaaatgttcattataacacattttaaatttgctttgatatattaaacatttcatagatcc

SEQ ID NO: 45010 - DNA, 398 bp, Zea mays
  Clone ID: MRT4577_141057C.1
aaagaaaaacaccgcggcgctcgcacacgaaagctcaaaattcttctagcccaatcacacccccatcaattgcataaccgagctgctcatcagatgttttcgggttgaaaaaagcccacaggacacaactacccaccaaccaaacgcaaaaggcaaccctcgcaaagaacactgaccatgtaccgcaccaaccacctcaagcaatttcatccctgcatactcatattgacaggcatttgcacacatcatcacaaattaacactatcacacatcctcttaccaaacatggatatacacacacacctaagtccatgtagccatcctctcaacacaacagaagatcacaaaactactgaaagccatgacacattgacgctttcacctaaacaaaatggaaa

SEQ ID NO: 45011 - DNA, 284 bp, Zea mays
  Clone ID: MRT4577_141058C.1
attgttaaactgtttgacaaaaaaatgaatgtccaactgaataatcagctatattagtacaataaataaaacagttcatggagaggaaaaaacaaaagagaacatatttttttgtgctgccttttccccctttttgttggaaggaattgttacacagggtcagatgatggtctttatcagtgagtacatgtaccccgttgataatctgtcaaattgacatttgttattgaagatttcatcatcatcaacttatttttaatgaatctttcaatgtgatcataaaa

SEQ ID NO: 45012 - DNA, 675 bp, Zea mays
  Clone ID: MRT4577_141059C.1
atggcttccatcgtcggcgctgaggtggtggcggctgaagaagtcctcgtcgccgacaggatcaccgccaccatccgcgctccgggcctccggctctttggctttgatagcttgtccttgcccctcgagcggagacgtgggcgagggcattgttgcagcggcgtccgccctgaggccatcgccgctgcagtttggccacatggagcggaggttgttgtcgctgctgctggagcgggtggaggtgggccacctggagccttatcgccccgcgggccctctaatgtggggggttgttcgtacccgcggggacggaaccggagttccgcttgtaatggcaccttgagtgccggtggctattcattgtggctgtcggggcctgaacatgaccgacgccggagtcgagttgccgaggccacgagccgggctgatgtcctcgggggacagctggctgaggcttcggggtggtcggccgagctgtctgggccggattcctggagaagaccctggcagcgatggcccaggcacagtgctgatgtcgtccttcgaagtggatatcctccgaccgcgttgccgtccgaggctaggtcaggcttcgccgaaggtgttgttgacaccgagggtgctgctgctcccctccgtcgaggtcggagccttcaggatcgatttatcttgtag

SEQ ID NO: 45013 - DNA, 168 bp, Zea mays
  Clone ID: MRT4577_14105C.1
gtgctcaccaatttcatcggtgccgagtacccactgcttctgtcacctaaggctacttcttccaaaagcgacgacacagatggagtatgctccatacgggggaatggactctaaaccaaattggcaagatcattgtacagggagggctgactgactcatggtgggctc

SEQ ID NO: 45014 - DNA, 922 bp, Zea mays
  unsure (1)..(922): unsure at all n locations
  Clone ID: MRT4577_141060C.1
taaaaacaaaagcgagtttcttttaacaagagttttaacgaaccctgccggttaagtatgcgcacgacgccattcagcctagatgaatcggttctagagccctttttctcgtcactgcggcggcgccggccaacctgcttccgtcacgccctacctctccctccccacgccggccaatcttctactcatcgtggctctagctgctcctcttgccaccacactatcttccaccacagccacctacaatccactcccccatcagccaatccgctcgatccggagaccacaatggcgcctgggcttaaagctgcagcaaaatcaaccaaaccatcagaagtgccactaacagaatatgacaaattgagagccgagaatttgatgaggaataaccaaaagttgcaaagattcgatgttactaaactagcgtcaatactaaccatacttctgcaaagagcaaaggtgacactcgtgaaaaatctggatctttgtatgaggtctatgaaggtgaaggttctgaagatgaggaagtcaatcagtgtgcaacaagacaaagaaacaaattaaagagggtcttggcacatgtgcaacaagatgaacctacaagagtgactaggtagaatacaagggatttggctttaactttcagtccagaactgcaacaagtcaaaaccttaggcctctctactgccacatccacccctccacagggccagaacaactccagtgatcaagttccatgattatagctacatcaaggcgagtagcgtttcacctattcatgattaatgttcatctggctagattagcgacatcattttcatagttccatgattaatgttcttatggctacattatacacataaacctatatgtngtgttgcaaatagcaacgaaagattgacgctaatagattaatatgact

SEQ ID NO: 45015 - DNA, 1042 bp, Zea mays
  Clone ID: MRT4577_141061C.1
attcctgaaagccccattccccacgcacgtccccatgtaaatcggagctagaggctaccgctccctccccacgccggccactctcctgctcgcacatcggccaatccgctcgatccactcccccatcgatccctcttctgctcgcaatcggccagtctgctcgatccactccctcgtcggctcatctgctcgatctggagaccaccatggcgcctgggcgtaaaactacagcaaaatcaaccaaaccaacagaagtgccactaacagaatatgagaaattgagagctgagaatttgatgaggaataaccaaaagttgcaaagacttggtgtcactacactagcgtcaatacttaaccatacttctgcaaagagcaaggttgacactcatgaaaaatctggatctttgtatgaggtccaggaaggtgaaggttctgaagatgaggaagtcaatcagtgtgcaacaaaacggagaaacagattaaagagggtcttggcacctgcgcaacaagatgaacctacaagatttactaggcagaatacaagggatttggctttaactttcagtccagaactgcaacaagtcgaaaccttaggcctctctactatcacatccacccctcaacaggaccagaacaactctagtgatcaaggtgcacttgaggcaaccatagatccaaatggaaaaaggaatagaagtatgggcagagaactggataggataagtagagatttatgcactaacatcctcatacacattgctgaaggaaagatacggccagaagcacctatgcaagctgccaaacttgcatcagagggcgggattatacttaggcagcaaatgccgatcctccggcattggaaagagtacaagaaggataagtcaattgttacaaactatattggcaaagttgctgcccaattcaccatggacaccaacaataatgcaatcaaagccgcatgtgccgatttgctcaaggtggacaacgacagatgaagtaccagctgaaaaaaatatttcaatgggatacccagcaatcaagt

SEQ ID NO: 45016 - DNA, 666 bp, Zea mays
  Clone ID: MRT4577_141062C.1
gggcatcttactccttccctgcagcggcgtgttcctctgctcctccccagcgtccctcgccgagcaccctctgccccggctcctccttcctggccgcgcgtcctgtgcctgctcgtgcccagcctgtgcttcctctctaccgccgctcgcaaggctccctccctcagcttgccggtcgtgagtccctggtgccgtgcgcgcgcgtccctgggcccagtttggtgctcaccccgccatggagctagcgctgaccgcgccctctccagccatggcgcgctcgaccggagctctgcttccccagctcctctgcgcgcgccgtcttccagccgccctcgccccacctctcccctctgccgtcgtctagctcggacccgccccagccgcgagctcgccgagcttcctctcccatggccggcgatgcttcagcccctgcgcgcgcggttctctatccctgctcgctggcgctccgtccctgatgcggctccttcctgctccgcgccatggcggctcccagtccctggtcgctccttcggccgagtactctgttttttcttctcctagttctctgaactcgccgagcaacctccatggccggatctccctgctcctcgctgctcggcccaagctctcagccatggccgtcgagatcccctgctcccatggccg

SEQ ID NO: 45017 - DNA, 274 bp, Zea mays
  unsure (1)..(274): unsure at all n locations
  Clone ID: MRT4577_141063C.1
gctggatccgacagtatggcacttggaaggccacgtgccgtctcaacatgcgacctcgccacacaacgcacanaatgggactgtaccgatcctggtgaaacacgtcgcaatatggacatgagcttgccggaagaagttctagcgtggtaattacgtcaaactctggaatgctatctaaggagtctatcgatacgttcatatgatttcaggctctgatgcttcatccagagcacttgaacatcctgcggatacatatgataccatgtctatacag

SEQ ID NO: 45018 - DNA, 171 bp, Zea mays
  unsure (1)..(171): unsure at all n locations
  Clone ID: MRT4577_141064C.1
ccgggtgtctttttgtgtttaacttatctgctaccgtctctgtanncgaattcctaagttgctagttcttttgtgctttgttccgactatacgcagtgaggtttcaccttttggtggctgntccttctcttccttcttgttccttncctcctttttcttttgtcgcttatg

SEQ ID NO: 45019 - DNA, 522 bp, Zea mays
  Clone ID: MRT4577_141065C.1
gaagagttttttttttttttttttatatcgcctcttctatcttcttcatcttacagcaggagatcaaaaggtacagtgtacaccatcacgagttcacgactccgggaagcgtaactgccgccatgaaatcgggtcggcggagcggcaccttcaagtcccgggaatgatgtttcatgatgaaccagcctgcacccgtggtggcaaaagcctgtgcccaggagctacgtagtgccaccatcctcgcctcgcctcgccgcaccagtcgcccggtacgacccgcaccatcatggcgcccgcgaatgccgagagggaacgggcgcgcggtcgaccagccgtctcccgtccatctccgcggccataattgtgccctgcgcggcagtgaagaagattgcaattttccctgactccctggcggatttgtcgccgcgtccatccgtcggcgtcccgatgccgatacggtttgttctcggatcctcggctagggtctcgtctcggtggggacggggcaccctgcgttgcgtg

SEQ ID NO: 45020 - DNA, 232 bp, Zea mays
  Clone ID: MRT4577_141066C.1
aacaggtggtaacaacgcagagtacgcgggcacttaccgtggaagctaagttttcaacttacgtgccattacctctgttgggatgttcgaagcaacttgtaaacttgacacttccgttgtgataataatctggttccatgtaagcattttttatactttaataacaagtagtgtggtgcaaaaaataaaaaaaaaaaaaaaaaaaaaagtactctgcgttgttaccactggt

SEQ ID NO: 45021 - DNA, 357 bp, Zea mays
  Clone ID: MRT4577_141067C.1
aggtgcaacatcgaggttaattccaccacccctcccctcaccaaacctgccaagccatctctctccccctccctctctctgcccgtgtgtgtgcgcttctcgggactacggcctggcctctgctcccggagtaaatagaactggtgaatcaccggcgccgcaggaggagggagtgcggaggcaggaggcagggagacgtgggatggaagcgagaggagcacgctgagccgcagagaagctgccgccgaggaagaagaagaagaagaagagagagagcactgacagcaagcagttcgtcaagctcgtcttcgccatgaaactcatgaagctccgctccagccggacgccttccagcac

SEQ ID NO: 45022 - DNA, 2042 bp, Zea mays
  Clone ID: MRT4577_141068C.1
ccgggataacagcacctctcgagtctcgacacatagcagctgcttgcctctgcacacgcgctcagtaaggcacatcaggcatccccataagtcataggatcgagctcctgcgcggctccgctgcgtggatccggccatgggctgtccaccgcggctcctctgctgcctcttcctgtcgctgtcgctggcagcggtggtcgcgcgcgccgccacgcggcaccaggagtgggagatcagctaccagttcaagagccccgactgcgtgcggaagctggcggtgaccatcaacggggagacgcccgggccgacgatccgcgcgacgcagggggacaccgtggtggtccgggtgaagaactccctgctgaccgagaacgtggccatccactggcacggcatccggcagcgcggcacgccgtgggccgacggcacggagggcgtgacgcagtgccccatcctccccggggacaccttcacctacgccttcgtggtggaccgcccgggcacgtacatgtaccacgcgcactacgggatgcagcgctccgcggggctcaacgggctcatcgtggtggccgcggcgcccggcgggcccgacgccgagccgtttcgctacgacggcgagcacgacgtgctgctcaacgactggtggcacaagagcacctacgagcaggccgccgggctcgcgtccgcgccgctcgtctgggtcggggagccgcagtcgctgctcatcaacggccgcggcaggttcgtcaactgctcggccgccggggcctgcgacgccgcgcacccggagtgcgccacgcccgtgttcgccgtcgtgcccggcaggacctacaggttccgcatcgccagcgtcacctcgctgtcggcgctcaactttgagatcgagggccacgaaatgacggtggtggaggcggacgggcactacgtgaagccgttcgtggtgaagaacctcaacatctactcgggcgagacctactccgtgctgatcaaggcggaccaggaccccaaccgcaagtactggctcgcctccaacgtggtcagccgcgagccgggcacgccggcgggcaccgccgtgctcagctactacggcgggcgcagcagcccgcgcaggtcgccgccgacggcgcctcccgcggggcccgcctggaacgacaccgcgtaccggttccggcagagcgtggcgacggtggcgcacccggcccacgtcgagcctccgccgccgcgcgccgaccgcaccatcctcctgctcaacacacagaacaagatcgacgcgcacatcaagtgggcgctcaacggcgtgtccttcacgctgccgcacacgccctacctggtggccatgaagcgggggctcctggacaccttcgaccagagcccgccgccggagacgtacgcgcaccgggggtacgacgtctacgccgtcccgcccaaccccaacgccaccaccagcgacgggctgtaccgcctgcggttcggctccgtcgtcgacgtggtgctgcagaacgccaacatgctggcgcccaacaagagcgagacgcacccgtggcacctgcacggccacgacttctgggtgctgggctacggcatcggccgcttcgacccggcggtgcacccggcgtcctacaacctcagggaccccattctcaagaacaccgtcgcggtgcacccctacggctggacggcgctgcggttcagggccgacaaccccggcgtctgggcgttccattgccacatcgagtcccatttcttcatggggatgggggatcgccttcgaggaaggcgtcgaccgcgtcgctccgctcccgccacagatcatggggtgcgggaaaaccaggggtggccactaactgatgttgttcagaagctgaactgaaccaccgtgttgatccatttcgttcttttgtttcttattattacaatccatctaataagatttgtatgggcattttttttatcacaatcctatacgattcgggaacaatgccatgtgcatctttttacaggcactgcacggtactcgaccggtgatctttatcggggttagg

SEQ ID NO: 45023 - DNA, 592 bp, Zea mays
  unsure (1)..(592): unsure at all n locations
  Clone ID: MRT4577_141069C.1
aattcggcacgaggtcataatcgactgggctggccgtcgctggctcgctgctacttcggccccttcgccagcgacgataaccccccagttatccgagggaaaattttctatgtgctgattggaatggcgagtacagcatgctttgtaattgtcagtaagaatgatatcccaatctacgaggcagaagttggatctgcacccaaagtatgtaccttgaacttcatgtgcttcctgtataataggttcaaatcataattagctatctggcatatctatatcattgcatttttttctgtaagatgtgcaccatgtcactctgttgatatgataaagaaactctggtgtggaaataccaaatagtcaatggattgacttactccctctgtcctaaaattgttgacgttataggattcaaaatttatctcaaaatagttgtcattctcactttccaatgcacctttttctttttcccaatacatattttccttctccaatactacacctctatcactattcctctctacccctcttgttgctttctgtgcaccacacatttttacttgtcctaaattctcgtgcnaaaacttaaaac

SEQ ID NO: 45024 - DNA, 250 bp, Zea mays
  Clone ID: MRT4577_14106C.1
gttctcctgtgggttggtttggttgttgttcgggtctctctcggttttgctcttttggctgttgtcttcgtcgttgttgtgttggccctgccgggtttctttggttgtgcgctcttggctgctttttggggctcctctccttttggtctggtgtcggtggttgttgtctcctcctgtggctgtttgcctcgtcgtgctgggtgtcttgctggtgggctgctggtttcttcctggggccggcctttctctc

SEQ ID NO: 45025 - DNA, 625 bp, Zea mays
  Clone ID: MRT4577_141070C.1
gcgcacgcacgcaggcaacccaaacccctgaccccgaggataggattttgctcgtcccccaaatctctccggccatggcctccttcccgctggcatccgccgcccgttccctccccaccctagggtctcacctcccggcagccgcgaccacccgcagcgtctccatcccggcctcccctgtccctgcggcgaagaacgccacctcctgcagcttcagcaccaggagctgcaggccaaccgttcgacggaacgccgcagagacctacgtcccaggctccggcaagtacatcgcgccggactacctcgtgaagaaggtgtcggccaaggagctggaggagctcgtcaggggggagaggaaggtgccgctcatcgtggatttctacgccacctggtgcgggccgtgcgtgctcatggcgcaggacatcgagatgctcgccgtcgagtacgaggacagcgccttgtttgtcaaggtggacacggacgaggaatatgagttcgcaagggatatgcaggtaaggggactgccaacgctgtatttcttcagtccggatcagggcaaggacgccattaggaccgaggggctaattcctatcgaaatggtcagaaacatcatcgaaaacgagct

SEQ ID NO: 45026 - DNA, 455 bp, Zea mays
  unsure (1)..(455): unsure at all n locations
  Clone ID: MRT4577_141071C.1
ttctattttacccaccggggctccacacgaggagaggtctactcccgtgcgggaggctcaaccgccccgccggcgcctattccgattccgatctcgtnnaccaataacaccattcctttttttctgaatatctatatntataaagatctttttctttaagtaactgcaacaagttccaatatccttattttaacaatcataactcaatagattcttatgatttcctaattcctaatactattttgtttaacattaacttattttatttattcaatacaacatttatttatttatatattctcttataacttctatttttaatatttttaattttatttatttgttaatatatttatctatattaaataatctttaatattatattaattatataataattattatatatattaataatttttatattttaatatttttatttattataattaatt

SEQ ID NO: 45027 - DNA, 470 bp, Zea mays
  Clone ID: MRT4577_141072C.1
gggcggccggcctttttttttttttttttagagcaaactagttagtccaattatttgtgttgggcaattcaaccaccaaagatggttaggaactagatgtaagcctaattccctttcagcagcgcacctcggccatgcgcagtgcgtctgcctgcctacacaggaccatgcggctcatgcacagggaggaccatgcaggctccccacacggatccatgcggccaacccaccggccaaggcactggccgctgcgagcccttggccgcatgtgcccaggtgcacttcggcgcgggtgaggcacgaccccggtcagtccaatgaacacggcacggtcgttgcgagcccttggccgctcgcgaccaggcgcggtccggcaagaaccgaccacggcgagggacagcctcggttacgcgcggttgagccccagtgcgggcaagccccggccgccgagcgccccggcgcgggcacgc

SEQ ID NO: 45028 - DNA, 233 bp, Zea mays
  Clone ID: MRT4577_141073C.1
gtcaacacacctggacagacttttgacacagaccactgtcctgtgggcccaacagacttagctcccagccactaacggttcctcaagctcattagactcccctaacaggaattcaccacccacataacatcatccacacttccccatctccctttcccaaagacagagttatctgaaccccatctagacactcactgcgattctcccgtgtgctactgtatatgccatttctc

SEQ ID NO: 45029 - DNA, 347 bp, Zea mays
  Clone ID: MRT4577_141074C.1
aaattcaaacttttttcaaaaaaaagggtttttgtttggaatgaccttaaggaaaaaacccccgggggggggaagtaatttccaaaaaaaacacttttcattaagggaaacggggggtttacatggccaattattaaccagcccgattttaagtacaacaaaatccgggttttaaacaggtgtttccttaagaaaaaagaagcttttttcctccccccgggaaaagaagggtttaaagggctgcaaaagggccttatcaaaatttaggggggggtttaacaatggcgggggcattcctttcccaaagggggaaccgctttttgcgaacttttaccctggaaaagttt

SEQ ID NO: 45030 - DNA, 266 bp, Zea mays
  Clone ID: MRT4577_141075C.1
ggccccggcccggtatccccgggtcttcaccacgcgctgctcctagccataatgctagagttaacgtgtacggggcatcctgtggaatcgcttcgcgacatatctggcgagccaggtttccttctgggggctgaaccgggttacatgagagatgtctgaagaactcacacaatgcaccggaggttcaaaagcctgtgatgaattaactcgggggttaggatcactggaaaaatatcgaaaactatttcaaagaagggtatgactag

SEQ ID NO: 45031 - DNA, 198 bp, Zea mays
  Clone ID: MRT4577_141076C.1
cactcaaagtaaaaggcttggttttttctggaaaccgatggtttcagcttatgtccaggcccaacagtttctaaaaagggttccacatgcccacaaccgggagagcataaaggctccaccctttatggaacaaaaaatacccagggttgcaggcaccgggaccagtaaaaaagtctatttaggggaggaccagccttg

SEQ ID NO: 45032 - DNA, 407 bp, Zea mays
  Clone ID: MRT4577_141077C.1
attcggctcgagatagagtcccatagcttaggttctggaggcatacatgcatgcacagagacacttatggaggcatgtgtgctggctaatatctgagaatataccgttcaggatgatatactgcatcgccagacagaggcatcttcgatgatttacagtccaatcataatgaaagacatcggcacacacatcagtcctgaggatagtgtatcttctacaacagcgagactattcctgctccaggctgacttcaggacatcgtttaaaggaagcaaactgtcatatccctaaacctgacattcaggacgtgcaggatgatgaccaaggcactgtgacccgggggtccatgcgacatgtaacacgaagctctgataagaggccaccaaatattactgaatggaggaaga

SEQ ID NO: 45033 - DNA, 326 bp, Zea mays
  Clone ID: MRT4577_141078C.1
tttgggctgatttatgtgcctgtggatctgcgggtggatctgcgggtggatctgcgggaaaaaatacaaatagatataaaaatgggatatacggataaatatacgggatagatctacggaatgtatattaaatgtacggaaccgtctctgatgtttgaccgacttgagtgacgcgagagacctgcagattacgtttcactttagttattaccgacctttgttcgcgcggttaatcgggtatcgcaggacggtccccgtgtcctattggctaatcgggactacgtttagagttttcgggacgacattagccccctcggtagaacgga

SEQ ID NO: 45034 - DNA, 165 bp, Zea mays
  Clone ID: MRT4577_141079C.1
tcgtttaaacttgctgaccttatacttggggcgaatgtaaaaagttacaccacccgtattcatgccttatacataaaatctacgtgtaggacattaacctaatgttctgtaagatcattatctattcttgtggtgcttactgaaagagatgtgtcgagaacaaaa

SEQ ID NO: 45035 - DNA, 306 bp, Zea mays
  Clone ID: MRT4577_14107C.1
tccttagcagtggtaacaacgcagagtactttttttttttttttttttttttttttttggtttttttttttttttttttttttttttttttttttttttttttttttttcggggggagcaggcatccatgccaagaaaagacttcatatgcaacaaaagcaaagaaagggcggggaacccccatcgctgcaaaaggaatttaagggggggcaaacccaacgattataacaacaaagggttaacatttctaatccgacaatcgggggtccccccgcgacccctgcgttgttcccacggcttaagggg

SEQ ID NO: 45036 - DNA, 267 bp, Zea mays
  Clone ID: MRT4577_141080C.1
aaaaaaaaaacaataacaaaccatttgaaaaaaaaaaaatattgtaaaaccaaaaaaaacctcaaaattaaaaccaaaccccctcataaattttcaccaacccaataaaacccccaagtgacaaattaaaccaatgtcctaaccttaaaaacaagcttgaccccaaaaaaaaccaaagacccttaaaaaaccttatttcccaacccaacaacatagcccaaaaccatcttttaaacacgggaaaacccggtaataaattcatgccct

SEQ ID NO: 45037 - DNA, 288 bp, Zea mays
  Clone ID: MRT4577_141081C.1
accaaacagaagctctcccaaagggctatgagtctttctcggacacacggggacgattacggctagtcgggtaccggcggaggcgcttacgccagcttcccacggtttctgcaggcccttttacgtgaaagaggagccaatcacagagggtgtggccgctccacaccttaacaaggggggggaaaaaaaaaccttgcacccaataacaagaacacgggggtggctgggagcatgccggcctatccgttcgggggctcttaccacgccttgaaaaccgtgggagggacg

SEQ ID NO: 45038 - DNA, 330 bp, Zea mays
  Clone ID: MRT4577_141082C.1
gggtcgagacacgcgtctagattgatgtcctattatctgtgttccactgctttgagggcgagaacatggagattgcatcacatcctatgaagaacgactccatgctggctaatcttctcttctgttacgtggaatctgcagcgatgaaagagactgtgggagtgattgatcactgtgacaggcttcatcggtccacttgcttctggattgcgaatcatatatcgtctcaaattcgtgcttgtcgatcgattattcggtgattcacacaagccactgtagtgttatcaaaatttggcgtccgtgtccatgtaaccttcagcttttgcaaca

SEQ ID NO: 45039 - DNA, 400 bp, Zea mays
  Clone ID: MRT4577_141083C.1
gcgacgcgtgcagccatgtttgtagtcgtcctggccctggtgacggcgatcgcaagggctagcacaggcggtggcagggccgaagccgagtgcgatcccaagtccctggtggtgtgcaatcccgcattcatggacggagcgaaatcctcgtcaacattctgttccaccctgcgttcccaggacgtatgcttgtgcgtgtacgccaaagacccctactttgccaaatacatcaacaaccacaacattgcctaaagctttatctcgatcggcatatgcttacccaaatgcttagcaagcgctctgcgtcgttgctgctcttgctcttgctatagtgagcaacatattcagcttatgaatacattatgtggatcagtttagaaaaaaaggccccccccttttt

SEQ ID NO: 45040 - DNA, 333 bp, Zea mays
  Clone ID: MRT4577_141084C.1
tacacgcgtacttacacttgttcttactgtttctgtgacaactttgttgacgacgatctgggtgcatcatctaacggaccgacagatgcactacgagaggcacgacccaaagaacgacccatagcacacgcattggcacaacatcgaggcgggcgctgccgtgatcactgccctattcactgccaactatgaattcaacgagcacgacgacaagaacgcggccaaagacgcggcgaaggacgcagacgcggaccacgactccgaccgtaacaaggagtggcacaagaagcaccgatcgttctgctgatcaatctatcgattgaactatctact

SEQ ID NO: 45041 - DNA, 271 bp, Zea mays
  unsure (1)..(271): unsure at all n locations
  Clone ID: MRT4577_141085C.1
cgagtatcctctactccaaggtcatcaccaagtgtgtgggtcanaaatgaaccggttctgtaaacttcaataccttctcctccgagaactccatgctcgacgctatcgagaacatgaacggcagggagctcgacttcctttacatcaccgttaaccagacccagtcccgtggcggtggcggtggcggcggtggctactgcggcggtcgcggcggcggcggcggttattgtggcgggcgccgtgaccgcggttatggcggcggtggcggcta

SEQ ID NO: 45042 - DNA, 186 bp, Zea mays
  unsure (1)..(186): unsure at all n locations
  Clone ID: MRT4577_141086C.1
gggatcaggttgactgcaagcttgcgcaggacagcttaactctgacctgcggcggcgttgctggcgacangaaaatgtcactttggtcggtgcctcgccgactcgattagcaatatataatgtcaaattcctttgtgtaccaagcattcagatgtatgttatccaagatgttaattgaagagattt

SEQ ID NO: 45043 - DNA, 786 bp, Zea mays
  Clone ID: MRT4577_141087C.1
taggcacaaagaacttgttgtggcatatatatattatcttaacacatgcatgcatctatatatgtagttggtattaacaggtccaacttaactcaactcaaaggttttttttttttttttttcaactcaaaggattattattattatattattccagacaggaatgcatgatagaagcaacgaggaaggccatccatccgatccatgatccatgacaggtggttcgttgttgtacatgttgtgtgctagaacttgttgttgtaccagtacacgcccttgtgctcctccccgggctcaacgtagatgcactgcttggcctcgcgccatgtggccttgacgatgggcgtgtcgtcgaacatgtagtactctccaagaagcgggcgcatggccctggtggcctccatggcgtggtagtgcggcatgttggggaagatgtggtgcaggacgtgggtgtcggtgacgttgtgcagcacgcggttgaggaggccgtagtcgcggtccatggtggcgagcgcgccgcgcagccagtcccactcgctggagtcgtagtgcggcagcgccaggtgcgtgtggtgcaggttcgtgatgagcacgaacagcacgctgacgatgagcaccggcacgccgtagaggcgcaccaccgtccagaacccgaacgccacggagagcttgtagatggtgagcagcgcggccaggatgccggcgtcggaggcgagcaccgggacgcgctcctgggccgtgtagagcggcccggccggcctcgagggtcccaatcgcccataggag

SEQ ID NO: 45044 - DNA, 243 bp, Zea mays
  Clone ID: MRT4577_141088C.1
atacatataaaccttatccaattcccaaacaaaaaaactttcaatacaaaataactattaccaaaataatcccatctacggaaaactcttcaaataacattactttctaaaaaaacaacaaatcatactctttacaccttcaccatctccccaattacatcctatttagcatactatcacccttgacattcaaaaaattcttacaaattgactcattgtttctcatacctgcatgcaatattt

SEQ ID NO: 45045 - DNA, 796 bp, Zea mays
  Clone ID: MRT4577_141089C.1
attaattaattaatcgattaagcatcaaattgttctttcgtttgcctgcagggatttcctaaattcttatcatccacgcgttttttactgcacaaaaaacattatccaatcgaatgtgtcatcaaatatcctcttataaagtcataattagcttcttcaaaagtgctacttaagttttgtcattcttaattaatgcttttgaacaaaatatgaaatggacgctcattacaatttcatgtggtcctgacagttccaggcctagaagtacatatcttttgcaaagattgagatgttttttttccaaaacaagaaatagttgcaattttatgtggaccttcacataattgctttgtttaactgaataggctagggtatactcctatatatgcaagtcacccttatttcatctgtatttttgttctatataggcatatatttcgtctaacaccttgtctcaaatcaactgcgctctacacagccatgcatatataactattacattttagtttggaatctgaaaaaaacctattttttcactatcattatttgctctcatgattaatatgatcatgttattcatttataccgtatataattatgatagctaagtctttgcatgatttgtataattgtttccagtgctcctatttgtatatatatggtctataaggagagggggttacattaatttgtactataaggtgttttacaaaatggattttctcctaataatgtttggatttctgtccatctgaattcgagataaggcataccaaacatttacactgtggatcac

SEQ ID NO: 45046 - DNA, 287 bp, Zea mays
  unsure (1)..(287): unsure at all n locations
  Clone ID: MRT4577_14108C.1
ggcggtggatcggatggcgaaagagtagcatcagcatgcggcgcccagtagggggggccctcctngagcttgccaccatggctagaggatngaagaagcatttgaagaggctcaatgcgcccaaggcattggatgctggacaagcttgtcggttcttttgctcccaagatatattctggacctcacaagtttagggtgtgcctgccactgatccttttcattatgaacagtctcaagtatgctcttacataccgtgaggttatatcctacctgatgcaacaccttgt

SEQ ID NO: 45047 - DNA, 143 bp, Zea mays
  unsure (1)..(143): unsure at all n locations
  Clone ID: MRT4577_141090C.1
accctcggttgccggggtagtcgtagcactttatctggcccttggttcgagacgactagctggcaccgtcccaagttcgccatggcggnaggaaccggnnagccccaanccccancccactggcaaaagcgggccgggtggtg

SEQ ID NO: 45048 - DNA, 281 bp, Zea mays
  unsure (1)..(281): unsure at all n locations
  Clone ID: MRT4577_141091C.1
tctatatctcaacgccctcctttttttttttcttccttcaccttatctaacacggggctttaaaaaagaaccaaatctctttctcaaaacacttatcctttatttttaccaacccaatttcattttttttatcataacacacattagccatattttttttttttttatccatcacgnaaacccccaaaatcatctatttgtatcctattcattcaaactcccctttttaaagacgcttcttaccctactcttttatttttaacaaatctctatacctttat

SEQ ID NO: 45049 - DNA, 140 bp, Zea mays
  Clone ID: MRT4577_141092C.1
attctttttggagaaatgggcgcggaacctctacttgtttatttctgtaaatgcatgcaaatatgaatacgcttatgagacaatagcgctgatgagtgcttcaataagacagaaaaaggaacagtgtgaggattcaacat

SEQ ID NO: 45050 - DNA, 3788 bp, Zea mays
  Clone ID: MRT4577_141093C.1
gactgaggggggtgttattcatataattatcagcagaaaaaagcattgtattgcataaacgatagacccaacccagagatgcaacaaaacgcgcagacttgattgatgctagtcacaacccagtgactaaagctattagtggtgtatagcaacaacttcaaaacactttacttttgccgagcgcagactctccatgccttggatcaggcatccaaagaaatcactttagtgcccccctccttaagccccttttcaggagaagtcagtttttcggacagctcatttatctgcctacttatcttcttaccaccatctggcagcctcgacaacagcacaccgttggaaaggcaaaaaaaaaaaaaaaaaaaaaaaaaaaaaaaaaaaaaaaaaaaaaaaaaaaaaaaaaaaaaaaaaaaaaaaagtgcccgcggtgctagtgacggttgctctagatccgttcatcctgggggttttgtgaggtcgaaagcggcgagcgaattaaaaaatgctggacaagctgtgggacgacgtggtggccgggcctcgcccggagacgggcctcgagaagctccgcaaggccaccaccgcccgcccgctcgtcatcaacaaaaacgcggacggcgagctacaagcgggcgcgtcaacgcctccccgccaccgcacccctcctggacgtcgccggccgcattaacaccaagaacagaagagaggaagagacaccgcaaccgcattaccatgagagagagctaggggggcctggcctgctgcggcgcagcggccacgtccctccctccccagctctcctctcctcctccagtactccacaccgcacccctcctggacgtcgccggccgcattaacaccaagaacagaagagaggaagagacaccgcaaccgcattaccatgagagagagctaggggggcctggcctgctgcccctgcatcgtctgaccctgaagatggcggcagcagcatccatggcggcccgtagccgcgcgctcgttgcgagcaggaggaggatgggtggcccgccgcgtctcttggtcgtcagctgcgacgccaggacagcggatgcctactgctccctggccgcaaagattttgggacctcccacgaccttcaatgcagcgaagctcaaggtggagttcgccggggaggagctccggcctcctttccccagagcctacactctgacccactgcgacttgacggcgaacctgacgctgggcgtgatgagtagcgagcagctgcgcaagtcgacgctgcagagggacgacgtggtggcagagtggaaggaaaccgccggggagatgacgctgcaggtgcattgcttcgtcagcggcgccaacctcctgcaggagctggccgcaggtttcagatactacgtcttctccaaggagctaccgctggtcctcaaggcggtggttcatggcgacgccgctctgttcgccgacaggccggagctgatggaggccaaggtgtgggtgcacttccactccagctctcgcaagtacaaccggttagagtgctggggcccgctctgggaggctgccacaactaccaggaggaaccaccacctgctggagctggaccaactgcagagcgccatcaccaagaagaagactatctttaacgccctgctcgcccttctcctctgattttgattcagccgcctatacaatgaacggacggactatagagtgatcaagcaaacccaccaagcattctgcatctctgtctgactgtaatggttgctgctttgtctggggattatattattcatataatcatcatcagaaaaagcattgtattgcataaacgatagacccagcccagagatgcagcaaaaagagcagacttgattgatgctagtcacaacccagtgactaaagctattagtagtgtatagcaacaacttcaaaacactttacttttgccgagcacagactctccatgtcttggatcagtcatccaaggaaatcacttcagtgcccccctccttcagccccttctcagcagaagtcagcttctcgtccagctcatttatctgcctccttatcttctcaccaccatctggtagcttcgacaacagcacagcgttggagagggtctgtgaaagccggttgattcttgcctttatctcttcaggactctctgcgcttctgttacttggaatgtagtttcgaacagtgaaactttcatcctttggcttcagcgcaaaagatgccccgttggcgacatagtcagatgaggatcccttgtaatattgctggggcatcatgggcatgccccgaggtttgctgtccagtgcatcattctcactcagagtgggcagggttgcagttttagagaataggaggctgtgatgactcacaccggctattccttgttgctccagaaactgtatatgcttcctcaaggactcatccagaacaacttgttgaccatgctcttcttgcaactgcttatgtgtgagggaaacatcaaatccttgttgtggcaaactaaatagctcttgaatctcactcttgctgaagtaacgtgtttgctctttttgctccgtagctgtcctgaacagagcgcccttcaaaacctgcaatttgtatatcttttcttcaatggtcgcagatgtcatcaagcggtatacaatcacatttttagtctgtccaattcggtaagcacgatcaacactttgattgtctgtactagggttccatgcaggatcaactacaatgacacgagttgccttggtgagtgtaagtccaagcccaccaacttgtgtggttagcagaaaaactggagctccacaaccctcttggaagtccttcacaatcctttcccggtcagaaaccttggtggtgccatcaatgcgcaaaaacgcatagccctctaatattatagcttcctgaataaggtttagcattttacgagtctgtgaaaatattaaaacatgatgcccctctccaacaaggttccgcaacaaggacatgatgaatgatagcttgcatgagacatcctgaccaacttccagtgcattatcatcatgagccatatctgcaaggttcatggccattttttccaccattccaatgtcttgatcattcaacatttcacccattccttccaacacaccctcagcacctttcttagttaatagcagtggatgatcacatattttcttcaatattgtgattgcagccaacggtgatgcctttggctgcaatgctaaatgaaccagctcactatttagaaaagcttcatatagtttcctctggcatggtgttaacttcagccagacaattagctcattcttcttggctaatgttttttcttctgatgcaccagtatcaaagacaacttcacttttcaggcgccgcaaaaagtatggcttgattcgctctcttagttcctttgctacatttgagcctacgtgcttctctcgagcggtagcatttttgtcatttcctcgaaggatagccgtttcataccttattttgaactgctgtttatcacccaagacatctgggcaacagaaattgaacagagtccacatttccttcaagttattttgaataggtgttccactgatcacaatgcgatgggcacaaggtatttcgtacaaactttgggccctttgtgtcttattattttttattagatgtccctcatcaagaattacgtaattccacaaagttccttcctcatcatcatcatcattgctgttgttgtaggagttgcctcttatgagcttgtagttgttcctgacaatgtcataggtggttatgag

SEQ ID NO: 45051 - DNA, 616 bp, Zea mays
  Clone ID: MRT4577_141094C.1
gagctatgttgtcgcttgcatcgcgtacgtatgctcggaattcggctcgagattccattgatgttgacatggtggaacaagaacaaacggatgaaataaatgctgacaatgaagatataggtacagaagaagctgaacaagcagatcagaggttagatgcttcagatgatatggaggaaggagatatggcacaacatagcgatggtgtggtagataatgaaggggagcatgttgaagatgcaaatacagacgcaggtgagatggattcacaccaattggacaaggcggattcacttatgcctctgtcacaaggcctacagcctgacaatatgcaaataaattctaatggagaatctgaagcgaacttggccaacagcagtgatatgcatggcgctgttgctccttcagtaaatttttcaggaaatgaagtgcccaatatggaaatatctatgcccaatactggtaacgattcaatactatcgtctaactccaagccagatatgcaaaatgatgctcagcagcacatcaagcagacaaatcctttcagaagcatcggagatgcattggaggactggaaagaacgggccagagtctcagctgatactcaggatcatca

SEQ ID NO: 45052 - DNA, 217 bp, Zea mays
  Clone ID: MRT4577_141095C.1
aagtcgataaagtcgccgtcccgtcgagcaacaggtcgagcggcggcgggaacggtaatactaagctggagtacgggtacaactggcgcaagtacgcgcagaagtatgtgaaggggatcgagaatccgcgtacttattacaagtgcacgtatcatagctgctccatgaagtagaatgtggatacggccctgtccgacggccgcatcacgcagatcgt

SEQ ID NO: 45053 - DNA, 438 bp, Zea mays
  Clone ID: MRT4577_141096C.1
gtggcgcgactccctttcacggcctccccgcgtctcagcctacacgtccgagccgccagccgtgcgctttaagtgagcgcacccacgaaaagcagccaggcagcggagccggagagaagaagcagcagtagcagcagggccgtcaacaccatggcggtgggcgcgaccgccacgaagctcctcccgtcggcggccgcggccgcgcgccgcccatcgatgctccacctcgcggccgtcgccgtcctctgctcgctgtcctacctcctcggcatctggcaccacggcggcttctccgcggggcccgccgccggcgactcctcctcctcggtctctatcgccaccgccgtctcctgcgccacccccgccccgacgaccgccttctcgtctccccccgcgggaccgctcgacttcgccgcgcaccacacggcggaggggggt

SEQ ID NO: 45054 - DNA, 400 bp, Zea mays
  unsure (1)..(400): unsure at all n locations
  Clone ID: MRT4577_141097C.1
accacgcgtccgcccacgcgtccgcccacgcgtccgcggcggtagagaagcccgtgctgcccctcgtgtatcaccggaacttgcagcgtttgtcctcttgtcaattcatttctcatttagctcgaagctaatgcgtgcgatttttcatggttgttgtgctggaatgttctaaatcttagattttcagtgaccccaacaatctcgctgcccccgattctcctgcttcatatatttgattactcanagcacgcgatgctcccctgaagtagtaaggaaaatgctgactctgctcttgctgaaaatattgtacagaaagacacaattccattttggtggatgcaattggaggattcagcgagatgcttgcctctacacggaggtgctatgtatttggaggcaa

SEQ ID NO: 45055 - DNA, 281 bp, Zea mays
  unsure (1)..(281): unsure at all n locations
  Clone ID: MRT4577_141098C.1
cccacgcgtccnctcaaattcctcaagttaaacactcgatagcatgagacactgccgccgagcatattacaacatgggagggaatcggacaaggcgcgcttcaagccgatctcatccactttcagtagatgagcacgcacgtccctccctatttcacgtcgcctatatgccacatggtccggccagggacacaaaacgtaagctacctaacacccacgctaagattcaggtcgacagatgagcatatcgtccatggtctttttgaccacgacctccctgct

SEQ ID NO: 45056 - DNA, 911 bp, Zea mays
  Clone ID: MRT4577_141099C.1
caatttccttcaccgcaatttgttctcgctttatcagatctccaccttatccacctgcagtcgagcctgctgtaccctggatgcgcaagttgtgaccatgttggtccgacgatccctatcccgtcaggaatcaagcctgctgtaccctgggctccgccgtcccggcgcggtcggtcagactgtccctactccgtcggtgccaggcaccgacctgaccatcggaggcgcaccggcgcgcgacggcgtcccgtgtgccctgtccgtcggtgccagcaagcagaaccccgacgccgtcaagccggcggggctggtgctcttcggacggaccatactaaccgagcatcagatgagcctcagcagctccggcggcgccacctccccagcggcgactggtaacagctctctgtgctggaccgccgagaagggccccaatgtctcggagggctcgggctcgggctcgggctccggcgtcatccagaacagcccgaccggcaagaacacgtcgtcggagaggctgccgtggttcggggacggcagcagccagcaggcctccgagcccggtcttgagcccggacaatgcaaggtgttcgtcgagtccgacacggtcggccgcaacctcgacctgtcggcgctgggctcgttcgacgagctgtacggccgcctgtccgagatgttcggcgtcgagggcgcggagatgcggagccgcgtgctgtaccgcggcgccaccggtgaagtgaggcacgccggcgacgagcccttcagcgatttcgtcaagtcggcacggaggatcacgatattaaccgatgctgggagcgacaacctaggtagctaagtgaggagcagtgaaccaattccagccgcgagtactgactagccaagtagctagtgtgtggttacaggaacagcatagg

SEQ ID NO: 45057 - DNA, 424 bp, Zea mays
  Clone ID: MRT4577_14109C.1
ggccccgttcttccgcacaatacctcaaaacctgaggagcttttgggaccatccgtggctgcccatcacctgagcctgctaaagtactcggaccagccggggatccaggtggaatggggtacttgttctatcgatagacgacaccctaccggtggatcctgcgtaacaggtgggggactcagccacaatggtcgatgaatctatagacatgcaagctcccatggacaaagggtatccatggtagacttctatctgacaaactgtgaatgaggtgctggacagatagatgttctatttgcaattgttgatagtcatggcggaggtaaagaagcagaggctgtataaaaacacctgcccaacaatcatgaatggtctccaaagtatataagtggaactaaaggctccttatacgaggcttatcaaa

SEQ ID NO: 45058 - DNA, 276 bp, Zea mays
  unsure (1)..(276): unsure at all n locations
  Clone ID: MRT4577_1410C.1
taccggccgggggttccagggcttacccacgcgctcacctaattaccaacttttttcattttttcgaccactacccgccggggttcttcatggggtctgagctgcactccantcaccactgagtaatgctctccttatccttctactaccaccaaataatcatcacgctctctatcaatctctgattattatcctaacccgatcactccaccatatcccctaaactactctcaccatgtaataaagcataatacatctacagatttttcgcgcttt

SEQ ID NO: 45059 - DNA, 726 bp, Zea mays
  Clone ID: MRT4577_141100C.1
cattcagattgaacacatttttaatccagattaaataaaaaaacataagtcaacataacatccaatgatcctagagcacaaatcaacatagtttctttatccttagatcgtagaacaccattgatcctggagcacaaatcaacatagttcaatgcgtcaactagcaactagcacgatgtagattttcagattcagaccaacggtgctacagaagtccaaacttagagcttatctatcttccgtcttaaccataggagggcagtttttggctcatcaatactaaaactaataacagtctctctgttgtttggtatgtcgaacacctcagctgcttttatcttctcatcttctgtcacgttcatggatctaagaacataaatgcatctcatgatggagaagtcattaccttgagcagattcttttcctttagccatttgtgtaacctcatcctcaacttgttttgattttagatctagatatctcccaacaagtccttccaaagaatccttcttcatcctctttgcttccttatcttgattgattattgatgcagtagaccttcttgttgttacatgtaccctctgttcagtcatttcaattataggatcttcatcttgttccaatcttgaatcctcttcttgtggttgcccaataataccttcctaatccattcttgtggtgttcacttgttcttttagaatcgcgtggcctggacgcgtggcgtcg

SEQ ID NO: 45060 - DNA, 1460 bp, Zea mays
  Clone ID: MRT4577_141101C.1
gccgcggcagcgcaaggagtcttcctctccgacgccggcaacgtcgacaccgctggcaaacttctctccgattgtccctgctccagtaagagtaggcgaggacgagcctcccccatcttgggtgttggtgcctgacccattttctcaagatatgatgttcacaagaggttctcccaaaattttgatgttatctaaagctgctcaaaagaaggtttctcctaaagcttctacatcaaagaagtgtggaggtggtgttcagagagcagcatggaattctgaattggagaagagcctcgttgatttgttgtttgagcacaatgtacctccatatagggctcaaaatggctagagtccagatgcttggaacaaaattgttactgaattcaacaagaagcatgagtatgtcacattcaacaagattcaaattcaggagaaggagagggaattgaaaagggattacaagatgttgaaagaggctagaaagcaaagtggcgtttcctggaatgagaaacgatgcatgattgttgctgatccaccaatatgggaaaacatcataaaatcatttcctagggccaagaaatttcaaaagaagtctttccctctctttgatgctcttggggaactatatgatgggcacattgctcaagggacctagaacataacatctacacaactaccacaagaatggaacacaatttcaaatgaagaagaacaagtgaacaccacaagaatggatgaggaaggcattattcaacaacaaccacaagaagaggattcaagattggaacaagatgaagatcctatgattgaaaggactgaacagaggtctactgcaacgagaaggtctactgcatcaacaatcaatcaagataaggaagcaaagaggatgaagaaggattctttggaaggacttgttgggagatatctagatctgaaatcaaaacaagttgaggatgagattacacaaatggcgaaaggaaaagaatctgctcaaggtaatgacttctccatcatgagatgcatttctgttcttagatccatgaatgtgacagcagatgagaagataaaagcagctgaggtgttcgacataccaaacaacagagagacatttatcagttttagtgttgatgaaccagaaactgccctcctatggttaagacggaagattgataagctctaagacaggaaatattggtcatatggagacagttctgcacagcgttttgagtgccagtatgagctatatatatgttgcatttctccatgtttgggctcagcatgtaatagaactgaaggaaggttgttgcgagacttgtatggcatgcttaaatttctggataaaatctagcatatactaagtctattacatgcttaaatttttgaaaaaatatgtatcgagaattggatggaatgcttaaatttctagataaatgacatgttctatgtttaaatttctggag

SEQ ID NO: 45061 - DNA, 368 bp, Zea mays
  Clone ID: MRT4577_141102C.1
gctttttgtgcgttctcaggtcgggcacgatggataacatattggcgcggcaccgtacgcaggtgtggatcttctagcagaggctccgcctgtattggaacttcacgcacaggatggtcttgaggggctgtaagctttcgagcaggttgttccgattgcaccccgcgaacgggcacgagtaccggcgcttaaacggctcctgctacgggcccgcatccctcagcggctcggccagcgtcacacgagctcttgtactcgtcatcgtgccctcgcatgtgcatacgaacgttcgagtcccgcttgaaccctttgccgcacatggtgcacaagtgcgtgtgcggcagccagcatctgggactactccagct

SEQ ID NO: 45062 - DNA, 190 bp, Zea mays
  Clone ID: MRT4577_141103C.1
ccactcgttcattcattctatcattacaattcccaacctaaccttcttccccatatcccggatgaaccttaaattctacagggacctcattaacccttccatatacttctatctcatatatcatcaccaaaccattcatctcttcaaccacatttttaccacatatccttttaaaatcatttccaaccac

SEQ ID NO: 45063 - DNA, 279 bp, Zea mays
  unsure (1)..(279): unsure at all n locations
  Clone ID: MRT4577_141104C.1
ccgagacggcggcgccggacgcagagcaccgccgcccccncggaggccccgcccgggccacggacaaccacacccaccacaacgccaacaacaccaacggcgaggcccacgagcccaagaacacccacgaacggcagacgcagagagaccgcggcaccggccccggcaccancnccacggaggaggcgacgcggaacgccaacgagggcangaacggcaaggagcaggacggccgcattttttttttacccaccccccccccgcggcggccgcggaggc

SEQ ID NO: 45064 - DNA, 692 bp, Zea mays
  Clone ID: MRT4577_141105C.1
gcggcccgctcgaaggccggcccgggtctgggatttaccattgatatcaagtctcgttcggaatttattatcccttgatagcactgcataatcgactttcttgaagctattactggtgatgtccttagtgggtcttctatggctcttttcatccgcgtgggtgcgggaattgatagccaaggtcgctgacgtgggggctgactttgcgtcaaacgcacaaagaaacattcctgaggacaatgcatcaaacccagatgtcattgttgactacgatgcagacagtgcggaatatattgcagcaatggcatcggatctctatgttgtcatatgataaataatcatagtgctgctcatgttgtgccctctatctcggctcttagaatcaaccatgacattaactccgataggtgaccctcttctcgccctctctgttgtgattatagaatgcatcagaacagacgtctgactgcaacggatatccccaagatagaggatgagtgtgtaatatactctgctctcaagaaacagatcataatttcacacgaatgctacgaccattggcctggcactaatgcattcgattcggacctccatacactaccactatattcaactttgcactacggaatacagcgacaagatgctaaatgttcttgtgtagtccgaatggactctgcaatgagctacttgtt

SEQ ID NO: 45065 - DNA, 306 bp, Zea mays
  Clone ID: MRT4577_141106C.1
aacaaactagctattacaagggaataatccagactgctatcagtcctgatcttgctgattggatccgtcaatataagactgatccactaccatacttgctatttcctaaaacagaataagtaaactagcaccaatcaaggattactttcctagcaatgcatatatccgtatcaacctacagaatgtttttactggatctaaactcaatctaggtcattcctattgtcattgatatatctgtgcaaagtgcaaacctacatacccatctaaacattatttcagagtaatagtttctacatggatcat

SEQ ID NO: 45066 - DNA, 501 bp, Zea mays
  unsure (1)..(501): unsure at all n locations
  Clone ID: MRT4577_141107C.1
gactagttctagatcgcgagcggcncggctttttttttttttttttttttttttttttttttttttttttttttttttttaaggaagaggatgatgatgataaattataaaagcaacagtgggggggaaagcgtaatttgtacgcctgccttctcaattttccaaaaagggtttagggggggggtgtttttgcttggcggctcgaaataagggtaaagcacggaatgaaatgccagcctgacccaaaaaaaattgaaaaaaattcctgaactaaaaagggcgccccggatgcaaaaacttccaggaccatgatcacgatacaactgcaacggcacggtgaacggaaacaacttcctttcaaagggcgccgaaaaaaaatagttgttccgttccgccgtacttgggggtagtagactagtagtaacagcagcagtttagtggtagtagagcataatatagtactgtaaacgatggtgaccgagccgagtagggaaaaattgg

SEQ ID NO: 45067 - DNA, 188 bp, Zea mays
  unsure (1)..(188): unsure at all n locations
  Clone ID: MRT4577_141108C.1
gccactcatccnctgacttntcttctcctccccctcaccttcttattccaattcttctacttcgtcccggttcaccttccttggggagcggatccatattctncttccaatctttaatacctcttcttcttcgacctactctctctttccactgacgaccactcccttcacaactccttcatcaccta

SEQ ID NO: 45068 - DNA, 555 bp, Zea mays
  Clone ID: MRT4577_141109C.1
ttttttttttttttttttttttggaaagtaaccggaaacagaccgggggacctggtacctttttattgggcccggaatccacccctaccaaaataccttcctgccctttaactttgggggaaattcccttaccatctaatgagggctaaaagggccttttatttttaaagcgggttccttttttggcaacctggccaaacttttcttgttacaagtttgggactggccacccttggaatttttggaggtcttcctttttggcctaaagcccaaaggacccggtcaccccttacccctttaaaaccccggtaaaatatggttttgaaggaccttcgaagcccaaaggccccaacctggggtaataaaaactaaaagccccgtaccaaaggtccgaagggaaacctggaaccgaccgggggaattaacctggaacacctaccaaagctaaggcggtcaattaatacctaccttaacttaaggcccaggcatggaccaccggaatggcacagctggttcctgggtttccgaatccgaaaaccgaaaatgggatggctt

SEQ ID NO: 45069 - DNA, 554 bp, Zea mays
  Clone ID: MRT4577_14110C.1
ttttttttttttttttggacgactaagcggagccgtgtcccgggtggtattgaattcatgatcatttgcactctcaacgagaagttctttttacgcctattccgatgcccatgccttgcattttcagcaggccagaaaccaacccaaagacacgccagagaagccaggaacccacaagcccggtggtatttttatattagagagagcttgttggcagcaatgtcgagagcatcgacatcaggggtcaggcgggcgtaggccttcttggtaccgtcagggcggataagggtgttgaccttgacacagtcaatgtcgtagagcttcttgagagcaagcttgatctgggccttgttgctcttgatgtcgacaatgaagacgagggtgttgttctcctccatcttcttcatggcgctctcagtgttgagagggtggacaatgatcttgtgctcatccagacgaggctggtgagggatagatcggcgagggtacttgggggctcgcgaggtgatcagggtcttggcgcggtggaaggaggtgctgaagcgagccttgac

SEQ ID NO: 45070 - DNA, 402 bp, Zea mays
  Clone ID: MRT4577_141110C.1
atgaagaagcgtgccgccgctgccgtagtagttcgccccagccctggaaaatcatatagatcgagcacgcgctcgcataggttccgaatccgtgcgggtgcgggagcagcccgcctctggggccctggaatttcttgtcaccgcggaactccgcccaaatcggtgccttgtcgtggaccgaatctacggctacatgctctaaggtaccatgcctctcctcgtgtccgccatcctccctactttgcgttgcacccgttaattcgtggttttgggcgttgtggcattggctgtggcctcgccggcgtgtgctccgccgtgtggcacgcagcgccgccgcgcctggcagccaggggaagaagaacatgccttcgccgttggatcgtgatggatggtcgagattga

SEQ ID NO: 45071 - DNA, 559 bp, Zea mays
  Clone ID: MRT4577_141111C.1
tgggaccctcgaggccggccgggccgggatttccagcaacacaatccactttcaccaactcacccaccaacaccacatcacaccacacccaaccacaatgtccaccacccgctcgcacgccgtcgactcgcagaacgagtctgtcgttcccaacgccgtccagcgcaacgcgcccgagggcctcgagaggaccttgcccgactcggtccacaacaccgaccccaacaaggacgagcgcagcgtctcgcacgccaccggcccttccatcgtgcccgaggccattcagaaggctgcgcccgagggcctcgagcgtgccttgcccgagagcatccaccctaccaagtagactcgccgcgatgcagcgtcacggccagcgtagcgtcgaccccgcttgtttgatcaacatgcgacatgcggtgcatggcgtatgctagtcgagacgtggagcggactagagatggtgatgtatcatagctggtagacagtggacatgcatgtctgctgaaagtgaaaaaaaaaaaaaaaaacgaaaaaaaaaaaaaaaaaggcccctagggcc

SEQ ID NO: 45072 - DNA, 678 bp, Zea mays
  Clone ID: MRT4577_141112C.1
caggcatgtagtcaagtagatccggatagctgcatcttgttccttaatggtgcaacctgtatgaaatcgctcggaggtttgtagctcctcaatttatatcccgtgcagcttccagcctcagaaaggcccagcagccggcccatgcttcactacctctcgtgtccctgctactggcccaagccgagggtagccttggctccaaaaccaagtgggaaagaaaccttcgcctggaatggttctcatggcccccagagctgaggcctgcggaggtgtacttccaaatgcatctgctggcgaggcagtcgtctgcagctgtttctcagcagaaccagctggtggagacgatccagagccccgagttatggttgcttcgggcgattcacctgaacccgtcctgccccaggtactggaaggctctgctgcagcaaatatatgtgtagccttttgtctcacatgtatcgtccatgcgcattctagcgggtgacacgtccgtcggacggtgatatattagttgagatcgctggggataagttcgtggctcgcatgtcgtagtgctttgtgctttgcgttgggatagtttgcacctgcaatgttttctgtcctttccaaaaggatactacttgatcttggaggattaaaagaaaaaaaaaaaaaaaaaaggccccttaagtttgcagg

SEQ ID NO: 45073 - DNA, 362 bp, Zea mays
  Clone ID: MRT4577_141113C.1
acacatctcaatccgcgaatcacagacgcgcctatctcttgttgctgcactgccctgccatcatatcaatatcatatcgcacgtgagcccgaccgagagcgagggataggcatggctgctccgaaactccagacgatggcgctgcgcgagctcctgacggcaaccgtgatgcctccccccgccgcgtggcgagcagcgatgtcgtgctccaccgcgcacagcactactgatgacgagactgccgttcgtccagatatcttcctccatgacgccctcagcgagctgcggacgtatacgcagcctgctgcagcaagacaagaacacgccctacaggcggagcatctgctgctgcctcaagaacg

SEQ ID NO: 45074 - DNA, 779 bp, Zea mays
  unsure (1)..(779): unsure at all n locations
  Clone ID: MRT4577_141114C.1
cgtgattcgcgctcagcgcaaggntgcgnnnnccgtgggcaagncccatacccatcaccgcaaggnccctgcccggatccganccctcgacttcgncgagcgcaacgnnaacctgaaggncgtgnncaccgacgtcatccacgacccgggccgcgncgcgccgctgnccaaggtcaccttccgccatccattccgnnacaagcaccaaaaggagctgttcgtgcctgctgaggncctgcacactggccagntcgnttactgccgccgccgtgctacactcaccattgccaccgccctgacccccaggagaccccctgagcccngccccctgtccgcccccttgcccccccccccaaccaccccgcgactcccccacaccccccccccccacccccccaccccccccccacccccccccccccccacccccccacccccccccctccccccccaacccacccccccacccccccccccccccccccctacccccccctccccaccccccccccaccccccccccccccccctcccccctgctacccccccccccacccccccccacctccaccacccccccccccccccacccacccccccccccccccccaccccctcaagtttcctacacctccccacctccacccccccccctccaccctccacacccccccccttgcccccagtacctattccttccaccccacaaaggaaacacccctttgcccccccctcccccccccccccccccccccccccccaccccccccccccccccc

SEQ ID NO: 45075 - DNA, 428 bp, Zea mays
  Clone ID: MRT4577_141115C.1
cacttaatggggagggtaagcagcagtaatccgaggaatccaatcgatcggttacaaaaaaccaccaccccggccgggggggcaaaactgaaaaagtcccaccccccggaagagggggaggggccggggggaaaatgctagcttcccggcaaatttacagggcggttttttgattctttcagcggggatgggaatggctcaacggcggcgggggcggcggccattcccggagggaggaggccaatggggcggggggggcacctttcgtggcggtgttggaaaatcctgataatgctgcagcggacaacggcaggtctttaggaggaggacctttttttgccacctgccatgcccaggtggaaacagcccctgcaggcctcctggggaaatctcctgatgcactcatctaatggtttgtgaaaacaaaa

SEQ ID NO: 45076 - DNA, 1134 bp, Zea mays
  Clone ID: MRT4577_141116C.1
actcctatgggcgattgggaccctcgaggccggccgggacatcggctcccagaagccctgcatctcctttctcccgtgcgcttcccagcctcgctccctctggcgctgtgggcccgacatgcaggcgtggttctcctccggctccgggccctcctcctcgtctgcggcgtcctcatcgcagccgtcgctgctcgcagagtggaactcctacgctgccgcccgctccgctgaggacgcgggcgatggcttcgggatcgacatcgaggcggccgtccgctccgccaacgaccgcgtcgccggcaccttcggcgtggtctcaaaaggtgttaaagggtttccaggcagctttaagtccacaacaagcagtgttccatctggcagatctctcatgtatttcggtctgtttcttggtagtggtgtattcctagttttcatcgcattcacgatatttctgccagtcatggtgataatgccacaaaagtttgcaatatgtttcacggtgggatgtgctttcataattggatcattctttgcgctgaaagggcctaagaatcagctctatcatatgatttccaaagagagattacctttcaccatgggatttgtcgggagcatggttgctacgatctacgtgtcaatggtgcttcatagctacatactttctgttttcttctctgtgcttcaggtccttgccctagcatattatgccatctcatacttccctggtggatctgctggaatgaagtttatatcttctgccgttgtgtcctcagtgttgagatgctttgggcgatgagttcacctgactgctgctttcctgtgctgattgcagtatttctagtggatgatctagcacctttgtggctttgtcgtttagcctgtgcggcttcattaatttcagaagtttgatgccagttgaagcaccgaggtgaactgtgaggaaaggatgttgtggacccagccaacgcttgttaggggcaaaaaaattgtaatgtagtacattgggaacaacagcttagtctaaaaagtacattgtacaaaacatctcactgaacactgggccacaatctaacgcccatggcgctcatttctttcatcttttctgtcgtaaaagggaaaaagaaattgcgagcg

SEQ ID NO: 45077 - DNA, 561 bp, Zea mays
  unsure (1)..(561): unsure at all n locations
  Clone ID: MRT4577_141117C.1
ctcgaggctcgnccgggattgccgagcccttcatccccggccgggaaccgagcgaacaggagggagattaccgccatggcgaggagcctgcgtcccgtggtggacctccgcgtaaccaagaatcccgagccggccgaagaccctgcgccatcgcctatcgtctggccgaacgctttggcgccctcgtcctcctcgacacctcctccgtcgcgtccagccatccatcgatccgctgaccgccgggccaccgccgccatggggtttcatcgcgccgctataacacagcgaggtcacgtgccatctgaagagcaagttggtacctggaatctcaagtcccaggtcaagagcaggtaccacaggatgaggcgcgtggaggatgctgtgatgagttcgtgagtggtctatgccgtcgtctcccagtcaactttgggttgctggaccgctgtctccttataatggaattatttattttgtatagaactcctattatatagtaaagatgtgacattcgatcccaaaaagaataaaatagattgggatgaaaaaaaaaaaaaagcggcc

SEQ ID NO: 45078 - DNA, 269 bp, Zea mays
  Clone ID: MRT4577_141118C.1
atcctcttgtacagccgcccccctttttttttttttttttttgacaacaaccaaaccaaagcgcattttattccgcgaggggaggaccaacaaatacaccctcaaaaaccccttggcccaccaaccccttaattctggtacacggtccccaccaagcaagccagggggggccgaaatttgtttttacaggaataccattgcaagccaaaaggggatggttcattccatataattaccgaaacgggaagcttccttaattttttgtaaaa

SEQ ID NO: 45079 - DNA, 1585 bp, Zea mays
  Clone ID: MRT4577_141119C.1
ccggccgggagtctctcccctcgtctctctcgatctctccagctctccccccctgcctgcctcttcaacttgtctccagagtccagaaccgccagccgccggcccacttgctcccgagggccgttcgccgccgccgccgccgccgacgctgacttctcctgaggagctaactgcctcggccgcttcccttgcagcgccgcgccgcgccgaggagcgggggagaccgaaattggcgcgccttcgccgcgtgccgcctcgccgattcgaccgacacgttcctctcccgttcgggcaggcaggtgccgatcccccgcgcgccggcctgcgcgggcgcggcggcgcgaggcgtgatgtgcggcggatcggagcgcgggcgtgatcgcgtctccgccgagtagaggcccgcgggtgccggtgtgccaggagggtgggtggggttgttgcgcgtgctggcgtgctgctgcggacttgacgatgtacatagcgcgggagacttccaaggtgtggaggaaggtggccacggaggtatcggtggagctgcagctcctgcgcgagaagtgggggctccttctcgccggtctgatctttcagtatattcatggattagctgctcgaggagtgcattatttgcatcgacctggaccactgctccaggacttgggatttatggcccttccagagctcgggcaagacaaaggttatcttagtgagactatattttcttccatcttcatctcctttgtgttgtggacattccatccttttatttatcacagcaaacgtttctatactgtcctaatctggcgcagggtgcttgcttttttagttgcttcacaatttttaaggattattacattctattcgacccagctcccaggtccaaattatcattgtcgtgagggctcaaaactggcaactcttccaccacccaatagtgtacttgaagtgctcctgattaactagtctccttataattgcttctcgcaagcactactcggtcgatgttgttgttgcgtggtacactgtaaacttagtagtattctttgtcgacaacaagctgccagaaatgccggatcggacgagtggactacatttgcttccattaagctccaaagaaaaagagggcaggcagaaggaggagaaagacagtaaactgaaggacgagttccacaagttactgaatgggaaccatgcggatcctactgatcggcgacagcgggcacagatgaacgggaggcacgacgaagacatcaatcacgcgctctccgaggccactgccaacggcacgtaagggcccgtcggcatctgcttttcaccgggggctttgtccttggcgctcggaggagaatcctcgcgggggtcgagaaaacctgcctggtgtggtgccccggccgcctttttctgaattatgaagctgtccgagattccagcgatccagccattcacatcatgcatcttcctgaaccgctgttgcgttgcgttgcgcaagaatcagaatctcgtggcgttcctcggtacagtttgcaccatacttcattgcaatgacatttatcagaaaggcacggtggggaaatgatcttgtgtc

SEQ ID NO: 45080 - DNA, 403 bp, Zea mays
  Clone ID: MRT4577_14111C.1
attcggctcgagtgtacgccatgttttttgctcctctttctgaccggtgcctctggcgtgggcaggggcggtgtccgcagcatcaggacgaaatattcttgcggtatccgctatgcatccagctaaaagcttgtgctgcctaggcgagccacctacgcaagataccccaagacgatcaggctgactgacccgtcgtggttgtacctgcccgtggctgggcccgtgctcggggacgggaacagggcgtccagctgctcgacattgattcgtttgcgaaacctgtccaaggggatcacgtactagatccacaagatcattgggatcacaggctcttatctcagatctctgcatatagttatgctcttactgagagcgaagaacgcccacacgttccgggtgaact

SEQ ID NO: 45081 - DNA, 284 bp, Zea mays
  Clone ID: MRT4577_141120C.1
attacagcaacgagacgggtattccaatagaaaaggctatccatattttccataaaacaaagacgaccttgggtaggctcactgcaccaaatgggatggaaacgatactgaaccacgcagtgtgataccatatgtggcgcgaagacaaaacacggaaccccttcccgccagtggcttagggcactcacaatccatttcattttttaccggggaggaatgggctgaatctctgatgctgaagacacacacttcaaggactaccggaacacggcggggagcccttc

SEQ ID NO: 45082 - DNA, 408 bp, Zea mays
  Clone ID: MRT4577_141121C.1
ctcaaaactggcaactcttccaccacccaatagtgtacttgaagtgctcctgattaactgtttattaagttccttgcttggttcatggctataattcagagtctccttataattgcttctcgcaagcactactcggtcgatgttgttgttgcgtggtacactgtaaacttagtagtattctttgtcgacaacaagctgccagaaatgccggatcggacgagtggactacatttgcttccattaagctccaaagaaaaagagggcaggcagaaggaggagaaagacagtaaactgaaggacgagttccacaagttactgaatgggaaccatgcggatcctactgatcggcgacagcgggcacagatgaacgggaggcacgacgaagacatcaatcacgcgctctccgag

SEQ ID NO: 45083 - DNA, 881 bp, Zea mays
  Clone ID: MRT4577_141122C.1
cattgggtacgtcgaggccggcaggggtttctatactgtcctaatctggcgcagggtgcttgcttttttagttgcttcacaatttttaaggattattacattctattcgacccagctcccaggtccaaattatcattgtcgtgagggctcaaaactggcaactcttccaccacccaatagtgtacttgaagtgctcctgattaactttcctcgtggggtactttttggttgtggtgatttgatattttcatctcacatgattttcactctggttttcgttcgaacttaccaaaaatatggttcgaaaaggtttattaagttccttgcttggttcatggctataattcagagtctccttataattgcttctcgcaagcactactcggtcgatgttgttgttgcgtggtatactgtaaacttagtagtattctttgtcgacaacaagctgccagaaatgccggatcggacgagcggattacatttgcttccattaagctccaaggaaaaagagggcaggcagaaggaggagaaagacagtaaactgaaggacgagttccacaagttactgaatgggaaccatgcggatcctactgatcggcgacagcgggcacagatgaacgggaggcacgacgaagacatcaatcacgcgctctccgaggccactgccaacggcacgtaagggcccgtcggcatctgcttttcaccgggggctttgtccttggcgctcggaggagaatcctcgcgggggtcgagaaaacctgcctggtgtggtgccccgcccggccggccgcctttttctgaattctgaagctgtccgagaattcagcgatccagccattcacatcatgcatcttcctgaaccgctgctgcgttgcgttgca

SEQ ID NO: 45084 - DNA, 3575 bp, Zea mays
  Clone ID: MRT4577_141123C.1
tccgacagtggaaaacccggtcaccactgtgctggtccatgtgctctttatcatgcttgtgctctatccagaccttatcctgccaacaattttcctctacatgttcttgatagggctgtggaattaccggttccggccacgcttcccaccacacatgaacacaagaatatcttacgctgatgttgcactcccagatgagcttgatgaggaatttgacacattcccaacctcaaagagcccagatctcatccggatgaggtacgataggttacgacacgttgctgggaggatacagactgttgttggggacattgccactcagggagaaagattacagtcactgctcagctggagggacccaagggcaacagctatgttcctgatattttgcctgattactgcgattatactgtatgtgacaccattccaagtggttgcactctgccttgggttcttcgggatgaggcatcctcggtttcgccacaaggtgccatcagcaccagcaaacttcttcaggaggctacctgcaaagacagattctttgctgtaaagctccttggaagaccagctatcaacaatgtctattgtacctgtttttgttccccatatattgttgtataatagccttaagtcagatcatattgtgcttcatgtgagcgaacaaaataagttaatctcattacattatttcctgcttttagaagttaataagacattcaaacttctgtatggcatgaaatgtatgtaagatgcctgcttcaataataatttctccaattaatcaaaaaaaaaaaaaaaaaaacaaaaaactttccaagaaaccagagcaaacccagcgagacaggtgcagcacttgccaagggaaaagcggcaccaggcacagccatacccataccacgccgccgatggaggttcgtactacggagaccagcagcagagaagcttctccgcggtcgcgaacaaagccgcagccccagcgcctcaggttcaggtatcaaggatgtacgctccaggtccacagcagcagcccatagacttccagctgaaggagacaagcccgacgctgggtggtggccgtgttatcggcggccgggtgtaccccggcgagaaggccggggcgtacgaccttgtggagaagatgcagtacctcttcgtgcgcgtggtcaaggcccgcgacctgcccaacatggacatcaccggaagcctggatccttacgtggaggtgcgccatgggaactacaagatgaaaaccaagtacttcgagaagaaccagaggcccgagtgggacgaggtcttcgcgttccccaaggaggtcatgcagtcggcgacgctcgaggtcgtcgtcaaggacaaggacgtcatccgggacgactacgtcggccgagtgagcgttgacctgagcgaggtccccctgagggtgcccccggacagtccgctggcaccggagtggtaccgtctcgtgggcaaggacggcatgagggacagaggggagctgatgctcgcggtctggtacggcacccaggcagacgagtgcttcccgagcgccatccatgcggggtcaacgtgctagaggcgcacgacgtatacccgatggcggagaaccgcgtacctgatgtgctggtcaaggtgaggctgggccatcagctgctcaggacgaggcaggttcgctcgccgacaagaaacttcatgtggaacgaggagctcatgttcgtcgcggcagagcctttcgaggacgacctggtcgtgtcggtacaagactgtgtggcacagaacaaagacgaggtgatcggtgaagctgtcataccactcgccaggcttccgaggcgggctgaccacaagccggtgccgccgcagtgggttgatctcaggaggccaggactgatcgacgatgtggaccagctgctcaagaaggaagacaagttctatgcgaaggtaagcctccgtgtctgcctcgaaggcggctaccatgtgctcgacgagtccacacagtactgcagtgatctccgtccgacgatgaagcagctgtggaagccacccatcggcatgcttgaggttggcattttaagcgccaacggccttaacccaacgaaacccagaaacgaccgtgggtcctgtgatgcgtactgtgttgccaagtatggttcaaaatgggtccggacgcgcacgatagttgacagcctgagccctcggttcaatgagcagtacacgtgggaagtcttcgatcacggaaccgtgctcaccattggtctgtttgacaactgtcacataagtggagacaacggttcctctgcaggccacatggataaacccatcgggaaagtcaggatccggctttcgacgcttgacacggggcgtgtgtacacgcactcgtatccgttgctcttcctcggcccatcaggagtcaagaagatgggcgagctccatctcgccatcaggttcacagccgcgtcccttatcaatgtgctcttcacatactctaggcctctcttgcccaagatgcattacgcacagcctctgtcaatagttcagcaggaaatgctccgccaccaggctgtgcagcttgttgcgcagcgcctgggacgcatggagccaccagtccgcagggaagttgttgagtttatgtcagatgctcgctctcacctgtggagcatgcgacggagcaaagctaacttcttccgccttatgcaagtcttctcaggggtcattgctgcagggaaatggtttgctgatgtttgtcagtggaaaaacccggtcaccacagtgctggtccatgtgctctttatcatgcttgtgctctatccagaccttatcctgccaacaattttcctctacatgttcttgatagggctgtggaattaccggttccggccacgcttcccaccacacatgaacacaagaatatcttacgctgatgttgcaaacccagatgagcttgatgaggaattcgacacattcccaacctccaagagcccagatctcattcggatgaggtacgacaggttacggcatgttgctgggaggatacagacagttgttggggacattgccactcagggagagaggctacagtcattgctcagctggagggacccaagggcaacagctatgttcctaatattttgcttgattactgccattatactatatgtgacaccattccaagcgatcgcactctgccttgggttcttctcgatgaggcatcctcggtttcgccacaaggtgccatcagcaccagcaaacttcttcaggaggctacctgcaaagacggattctttgctgtaaagttccttggaagacagctgttaacaatgtctaatgtacctctttgttgtacctgtttctgtcactcatatatcgttgtataatagccttatactttcgtttcctgctttcagaaattaagaagacattgaaacttctgtatggcatgaaatgtatgtaaggtgcttgcttcaacaataatttcttcaattagtcaagtttgtcatggcgaaagactactgactttggtaaccagatatatacttacagttacgaagctgagactcaaaaaaaaaaaaaaaaaatttgcggcc

SEQ ID NO: 45085 - DNA, 162 bp, Zea mays
  Clone ID: MRT4577_141124C.1
gtcacgcgtacgcaaggtgaaggagatcaagaacgggcggctgtccatctccttcatataccaacatcttgatccatgcttatgctaccggctattgctacagtggattaattacgcgagaattttaactaagcgttcagaagctactatattatccttttt

SEQ ID NO: 45086 - DNA, 359 bp, Zea mays
  unsure (1)..(359): unsure at all n locations
  Clone ID: MRT4577_141125C.1
aacggccgcccgggtgtgttttttttttttaatttttttttgtggggggttttttttttttttttttttttttttttttttttttttttttttagggaaactacaaactttctgttctggggggggtgaccgccacaaccaaaaaaaaaagggaaaaggggggttttgttttgggaaaaaacantaccctccaatctttggagtttactgcccaacaaaggccaccatccctttaacttcaacccaaaattaaacttgggccccgtgccttgcgattcccgccccccccttcatactttgcacctccaggtggcggtccctatctccccgttcctccgggggtgccccccgttttttcc

SEQ ID NO: 45087 - DNA, 746 bp, Zea mays
  unsure (1)..(746): unsure at all n locations
  Clone ID: MRT4577_141126C.1
aggagcaacnccggcgaaagccccccaaaccctcgcaccctaaaacagcggcgcacaagatgtccgacgaccccaccaacggcggcggcggtgatcgcgtggaggacgtcgtccgcgccgagggtgaaacacaacctcgtgatgatggcttgtcgaaatccaaggatagggacaaagatagagaaaaggacaaggacagagatcgtcgccgagaccgtgacagagatcgagggagagacagggaccgtgatagggatagggacagggacagggatcgggacagagacaaggatcgccaaagtaggcatcaccgtgaaagacgggaacagcgagaccgtcctgatgatcacagagtccgtgattctgaaagaagaagagaacgcgacaaagatgggcatcgtaggcatcgttctcggtctcgttcaaggggtagagatcgaagatctaggtcacgttcaagaagcaagcgagttagtggattcgacgccccacccccgcaagcaatgggttcaacatttccagttattccaaccccaagcaaccatgtatggtaacaaggccaatcttgggtcacttgcctcacttctaccagtggaatgagctgcctactatagctttaatgtacaaggaagaatcagtgcgccggtttgatatcgtcatgttcatcttcaactagctagtactaggtcagttaccaggctcttcgcttcccaacattggtggcatgtttccaacatgctcccttt

SEQ ID NO: 45088 - DNA, 915 bp, Zea mays
  Clone ID: MRT4577_141127C.1
ccgggataataaaagccgggcccccgccggaggccggggggagcaacccggcgaaagccccccaaaccctcgcaccctaaaacagcggcgcacaagatgtccgacgaccccaccaacggcggcggcggtgatcgcgtggaggacgtcgtccgcaccgagggtgaaacacaacctcgtgatgatggcttgtcgaaatccaaggatagggacaaagatagagaaaaggacaaggacagagatcgtcgcagagaccgtgacagagatcgagggagagacagggaccgtgatagggacagggacagggatcgggacagagacaaggatcgccaaagtaggcatcaccgtgaaagacgggaacagcgagaccgtcctgatgatcacagagtccgtgattctgaaagaagaagagaacgcgacaaagatgggcatcgtaggcatcgttctcggtctcgttcaaggggtagagatcgaagatctaggtcacgttcaagaagcaagcgagttagtggattcgatgcgccacccccgcaagcaatgggttcaacatttccagttattccaaccccaagtcagttaccaggctcttcgcttcctaacattggtggcatgtttccaaacatgctccctttcggtgttgctgggcagttcaatccccttgtcatccagccacaagcaatgactcaacaggctactcgtcatgctcggcgtgtttatgtcggtggccttcctccatctgccaacgaacagacagtggcaatttactttaatcaagtcatggctgctattgggggaaacactgctggtccaggtgatgctgttctcaatgtatacataaatcatgacagaaatttgcttttgtggagatgagatctggtgaggaagcagcaatgcaatggccctggatggcattatgtt

SEQ ID NO: 45089 - DNA, 949 bp, Zea mays
  unsure (1)..(949): unsure at all n locations
  Clone ID: MRT4577_141128C.1
acactcggcacgacgggcgaaagcccccaaaaccctcgcacccttaaaaaagcggcgcccaagaacgtccgccgaccccacccaacggcggcggcggtgaactcggtggaggacgtcgtccgcgccgagggtgaaacacaacctcgtgatgatggcttgtcgaaatccaaggatagggacaaagatagagaaaaggacaaggacagaagatcgtcgccgagaccgtgacagagatcgagggagagacagggaccgtgatagggatagggacagggacagggatcgggacagagacaaggatcgccaaagtaggcatcaccgtgaaagacgggaacagcgagaccgtcctgatgatcacagagtccgtgattctgaaagaagaagagaacgcgacaaagatgggcatcgtaggcatcgttctcggtctcgttcaagggtagagatcgaagatctaggtcacgttcaagaagcaagcgagttaagtggattcgacgccccacccncgcaagcaatgggttcaacatttccagttattatcgaagagcaagcgcgtgcattcctttgaccaagcacctacacaataggaagtgcctgttgtgtaggtgctggtgttatccctggtcagctgcctggtgtcaccgctcctattcctggggttggggtgcttccaaacttgtataatttggctgcaggacagccacaagccatgacacaacaggctaccaggcatgctcggcgtgtctatgtgggcggacttcctccaactgctaatgagcagaccgttgccatattcttcaatggagttatggctgctattggaggaaacacagctggtccaggtgatgctgttcttaatgtctacataaaccacgacaagaaatttgcttttgtggagatgagatctgtggaggaagcaagcaatgcaatggtcttagatggcataatgttt

SEQ ID NO: 45090 - DNA, 295 bp, Zea mays
  unsure (1)..(295): unsure at all n locations
  Clone ID: MRT4577_141129C.1
accctcncgcccaccaccacaccacaccaccggcggcggcggggacccagncgagaacacgaaggcgacggcgacagcgcngaaccgcgggctccgctccgggcnccgcctccncgccgccggcgccgaggcgnccaagccagcngcgcgnggaccccaggccaccggcgngaagagaaggggagggcagggccangaggagcgcggcgacanccacgccaagcacaggnagaacnngcacaggaggaagcancagggnnggaaggggacacncnccgngcngggagcggcnggc

SEQ ID NO: 45091 - DNA, 736 bp, Zea mays
  Clone ID: MRT4577_14112C.1
ccggccggaatagtatcttagcttcaccgtccttctttgtgatacccaattgaaaatggaaactccttttaccgtcaaggctcagccgggaactgatgtctggaagcagcctccttctacagacgtcttcacagcccccttccgtcctcactctatcgctcccctgaagcactttatctcagcaacaatcactttccgcacaacctacgtccaccagtacgatcaagcctgtcttctcctcaccttcaccaagccaggcgccccccgaaagtggatcaagacgggcattgagctgtacaatgagcacccgcgctactcaactgtaacatgcgactcttgggccgattggagcgttgaggcggtaggacccaacgatgaagctggtgtcatgagtggtgagaagagcgtcactatcaaggcgatgaaggtcgaggatgccctgggtgtttgtctctgggtctacagggtcgatgagaacggcgaaaagacgccgttgagacagactaactgggtgtacggcgacgaaggtggtgagggctgggagctcgaggtctcagctgctgtcgccaggccagatcctcataagaacatcaaggatgatcttgaggctacgtttgacaagttggacgtcgaatgggagaagcctacagcttaaacaaattcacaagttaagcaagtattgacaatatacacaaagacaccgaaaaaaaaaaaaaaaacccgcggccctcgagct

SEQ ID NO: 45092 - DNA, 1628 bp, Zea mays
  Clone ID: MRT4577_141130C.1
cattgggtacctcgacgccggccgggggccgggcgagcaacccggcgaaagccccccaaaccctcgcaccctaaaacagcggcgcacaagatgtccgacgaccccaccaacggcggcggcggtgatcgcgtggaggacgtcgtccgcaccgagggtgaaacacaacctcgtgatgatggcttgtcgaaatccaaggatagggacaaagatagagaaaaggacaaggacagagatcgtcgcagagaccgtgacagagatcgagggagagacagggaccgtgatagggatagggacagggacagggatcgggacagagacaaggatcgccaaagtaggcatcaccgtgaaagacgggaacagcgagaccgtcctgatgatcacagagtccgtgattctgaaagaagaagagaacgcgacaaagatgggcatcgtaggcatcgttctcggtctcgttcaaggggtagagatcgaagatctaggtcacgttcaagaagcaagcaagttagtggattcgatgcgccacccccgcaagcaatgggttcaacatttccagttattccaaccccaagcaaccatgtatggtaacaaggccaatcttgggtcacttgcctcacttctaccagtggaatgagctgcctactatagctttaatgtacaaggaagaatcagtgcgccggtttgatatcgtcatgttcatcttcaactagctagtactaggttactagcttcatgattattacatatttatttttgttcttgcacgtatgttgttaattctttgacatgattactgcatagctggttcttgatctatacagccttttaggagcatacaccaataccttactgattgctagttgattatgcttcctactagaaatttattgatgctctgcaggtcagttaccaggctcttcgcttcccaacattggtggcatgtttccaaacatgctccctttcggtgttgctgggcagttcaatccccttgtcatccagccacaagcaatgactcaacaggctactcgtcatgctcggcgtgtttatgtcggtggccttcctccatctgctaacgaacagacagtggcaatttactttaatcaagtcatggctgctattgggggaaacactgctggtccaggtgatgctgttctcaatgtatacataaatcatgacaagaaatttgcttttgtggagatgagatctgttgaggaagcaagcaatgcaatggccctggatggcattatgttcgaaggggcaccggtgaaggttagaaggccaacagactacaacccttcccttgcagccgccctgggcccaagccagccaagccccaatctgaatcttgctgcagttggcctaacagcaggatctaatggaggactagaaggtccagaccgtatttttgtgggtggcctcccgtattacttcactgaagcgcaagttcgggagttgcttgaatcattcggtcctcttcgagggtttgatcttgtgaaggatagggaaactggtaactcaaaaggctatgcattctgtgtttaccaggacctcaccgtcactgacatcgcttgtgctgcactaaatggtatcaagatgggtgacaaaacccttactgtcagacgagcaaacca

SEQ ID NO: 45093 - DNA, 490 bp, Zea mays
  Clone ID: MRT4577_141131C.1
ccgggcaacgccgagctagctgaagctgaagagagtggcaggcggttgccgccatccttgcagtggctcaacagcctgttctcgccgtcggcgcagtcctccggtagcggcggcagcagttcgcatcattgggagaactaagcaatattgccatggttgctgccgcttgaaagcttggcccgttggttggtcccaatgtacataggaaggagcaggagcatgccgggttggtgccatgtaaaaatctggagccttttttcagtttggctcatgttaatggtctctgatatgtatcatggctgtaaaaaagaacagaaatgggcaaatgtatgaaaaaaaaaaaaaaaaaaaaaaaaaaaaaaaaaaaaaaaaaaaaaaaaaaaaaaaaaaaaaaaaaaaaaaaaaaaaaaaaaaaaaaaaaaaaagggggggcccttttaaaaaaccaaattttccccccgggggggtgaaaaaaaaatttttttttttg

SEQ ID NO: 45094 - DNA, 175 bp, Zea mays
  Clone ID: MRT4577_141132C.1
gccggccgggctgcggatttctttatctgtcccattggttacggccttctgttgtgaggctctttgtgggttagaggactgggttcgaatcttggcccatgcgatattttttgccctttttttcaaaaaaaaaaaaaaaaaaaaaaaagaaaaaaaaaaaaaaaaaaggccccta

SEQ ID NO: 45095 - DNA, 353 bp, Zea mays
  Clone ID: MRT4577_141134C.1
cgtaagctcggaattcggctcgagggcggatgctttattcagcctgaataccaacaggacggagggggggactaggaggcacctgggcgtgctccacccttaggtcgacgacaagggcgccggagaggtccattcaacggcagtggacatggtggcaacgcaaacagcgggaaacacactgctgaggacagagcataatctgatcattaccaacgcaagctgctagttggatggatgcctgatccaagtataaagatgcatcatctgttgatatcagttgacgatattactcggcataagattgacattctgtgtcccagtgcatccaggaatgatacttgactaaatctgta

SEQ ID NO: 45096 - DNA, 281 bp, Zea mays
  Clone ID: MRT4577_141135C.1
ctgcttttggggaagacggtgagggtgatgacctggacctgtggacagtacgatgttctgggcaacactgggagcgagaggccagtgtccgtttccagcatgttggcacctctgtgttcctgtcagttactggtgaacagtaaataaacccaatccgtgggcagcatgaggtgcatggcatgcctagtgccaatgcacacaacacgtcgaaggccatggaaggaatcttcatcaagcccggagcagatccctccacaggtcacgatgaactctgagccgga

SEQ ID NO: 45097 - DNA, 238 bp, Zea mays
  Clone ID: MRT4577_141136C.1
gctgatcctcagagcggccgtccgcgtacagaattattttcgcgaaagcgaaaaactcgcggagggggggccaaccaacacagccgaccaaaagacccgagacaccgaaaagaagaaaaacacgcggaataaagcgattgctccagacactaccagatgccacgcaacgggtacatctgaggatcgaacggcgaaaaacaccaccaaccgtaattgccgaacaccgagtcaacccaga

SEQ ID NO: 45098 - DNA, 413 bp, Zea mays
  unsure (1)..(413): unsure at all n locations
  Clone ID: MRT4577_141137C.1
aattcggcacgaggtctctgctcacgagtaaagcctgccgctagcccgcgctctggacgtcgcctcctcccccaccccaccggctgtcgccgcccccgccgacgttacctccttacccgccgcacccccccccccctgcccccccgnccttgccttgncggntctgcctgcctgtgccgcctggctctccctcttctcccgccggtcgccgctgcctcccttcgcctgctgcccctgcgtgtccgggcctncgcgccggcccccctcgttcgtggctctttgctctctctcccgtgcccggtgcctccctgggtgttttctgcttcctctcccgcctgttgcggggcgcgccccccgcgtggtccccttggtcggctcgcgcgggttcttgccggcgctcctcggggggtgct

SEQ ID NO: 45099 - DNA, 712 bp, Zea mays
  Clone ID: MRT4577_141138C.1
attgggtacctcgaggccggccggggtgtgttcgagaacggataagagaaggtcaggcacaaactcgcggggacgaagcacacaacaaacctgcagatcccccatggcaggctccacctccctcgttccccttcccgtccccgcccctccatctcgccaccgcttccacacgtccacgtccgcatccccccgccacctgcgcccctcccctgctacacgcctccgcgctgcccggcgtcggcatcccgacgccgtcgttgtcgtcccagatgcccgcccctgggtcggcgatctatcgggcgccgccgcgtcctaccgggacggaagtgaggaggacgaagacgacgcagatgaagatgaggacgaagacgaggaccgcagcctggacctactggcccggttcctgcactccgtattcaggaaggcctcacgccgcgcgcgccgcgctgccaggtgaagttttcggtcaatggcgtgcttgtcctgacgttcttatggatcctgaagggtcttctcgaggtggtctgcacatttggaagcatggtgtttgcaagcatccttcttgttcgtggtatatggtctggggtgacatacatcagagaaaaccgttacagctatattcaccggatcgacaacgatgagaaccgatggagcagagtccagactgctgggtaaatatttgcttccttgaacagaaacacactctgcattg

SEQ ID NO: 45100 - DNA, 252 bp, Zea mays
  Clone ID: MRT4577_141139C.1
gtgggacataaacaagagtttggggggtgccccatcacaacacaacaaccaggatgtgagacgcctgtgggaccatgccacggacaacaagacccacgtggcccgtgcaatcatagcctgttaggacaactacctgcggccagcggccacacgggggaacaaaatgcctcgcgggtgattggtcatatgcgaatacgcacctgcctgcagcagataaaaacggaccatcacaaacaaacctaggttcgcctg

SEQ ID NO: 45101 - DNA, 542 bp, Zea mays
  Clone ID: MRT4577_14113C.1
gtgggtttttttttttttttttttttttttttttttttttttttttttttttttttggggccacacatcacaccggtctcacttattattgaacacaattatagacccctgccagaaaaaacgaagcgagtaccggattacaggaacaccccgggggggggggggttttttttttttttttttttttttttttttttttaaaaaaaaaagaaatactcggcacaaatgccatgggtgggatttaaagcagggcgggggaacaaagtctttgggggggcatacagcatgcttcccccgaaagtcctactacataccccataacttgggcgaatacaacaagcaaaccattggcaagcccccgaatgaaaggaaacaagggtacaaatgggggagggcccaaaccacccttacttgttttggaggggccccccggcctcgaattccccctcctcataaaaagggggatcctgggactggtgggacccggacaccaaaacggtcatgttgctctcaacttcggggaactccattttatccatgcc

SEQ ID NO: 45102 - DNA, 996 bp, Zea mays
  Clone ID: MRT4577_141140C.1
cattgggtccctcgaggccggccggggaagcacacaacaaacctgcagatcccccatggcaggctccacctccctcgttccccttcccgtccccgcccctccatctcgccaccgcttccacacgtccacgtccgcatccccccgccacctgcgcccctcccctgctacacgcctccgcgctgcccggcgtcggcatcccgacgccgtcgttgtcgtcccagatgcccgcccctgggtcggcgatctatcgggcgccgccgcgtcctaccgggacggaagtgaggaggacgaagacgacgcagatgaagatgaggacgaagacgaggaccgcagcctggacctactggcccggttcctgcactccgtattcaggaaggcctcacgccgcgcgcgccgcgctgccaggtccgtgctgccgccttccgtccccgccgagctggtgaagttttcggtcaatggcgtgcttgtcctgacgttcttatggatcctgaagggtcttctcgaggtggtctgcacatttggaagcatggtgtttgcaagcatccttcttgttcgtggtatatggtctggggtgacatacatcagagaaaaccgttacagctatattcaccggatcgacaacgatgagaaccgatggagcagagtccagactgctggttaatattttgctttccttatctatgaacagacacactctgcgttgacaggctgtatagtacaaaaagaaaagatatggtcagcaagtgcaaactatgatgattgccattgctagaccccgcggctaaggctgtctctagcagataagcctgtctctagcagtgtcctttatattaatcttctagaccccgtggttaaggctgcctctagcagcgttatcttttttacattctcttttatgcagttatctctaaaagattcaatcttcgttctatctcttctaaatctcgtcctctatacatatatataactatattaaatgtatatattttttctttt

SEQ ID NO: 45103 - DNA, 211 bp, Zea mays
  unsure (1)..(211): unsure at all n locations
  Clone ID: MRT4577_141141C.1
ctcctctagctccattcccaccctatccatcgcancagaccccctccatacttgttagtctgtcctcncctcactaatctcccaatagatccataagagccacctcccgccttactgacacgttaccgccctaattttcatcaatcctacaccaaagcctgcttcccatcgcgctccccctactactaaccttcctccccttaaactacaa

SEQ ID NO: 45104 - DNA, 430 bp, Zea mays
  Clone ID: MRT4577_141142C.1
tgacttcacatgtacgtaagcttaagctctgtacatctgccgcccttttttttttttttttttttttttttttttttttttttttttgttttttatacttttttacgattttttttttatttgaaaaaggggggccaaaactgttggttgttttgggtttacccatttaactttaaaatttttttacccaaatttttattaccttgcaaaacaaattttattcattaaccccccttgggatttcccaaagtaacccgaagggtttttaattttttaaaacaccaaacaatttttttaaacctttttttgaaaaagttaacaaattaaaatttttttccgaaagttttaacaggaaaagtttttattcccatttgggaccctccaatttttttggatttttggggacttttttgaaaaaatcctaaatttt

SEQ ID NO: 45105 - DNA, 1011 bp, Zea mays
  Clone ID: MRT4577_141143C.1
cattgggacctcgaggcggcgggcacgctttccaggggaagaatgacattgactatcccaaaccgtggcatgtatagcctccgccaaagaacccttctccttctgcttgtataaagctacctatagcagaagaggctgatcggctgagctcatcgcacaaaagatatataagaaccaccaattggtaaccacaagcaagcaatatatagagagtcaaccttgcagcggcgatgaagatagtgcttaaggtggcgatcacctgcaagaagtgcaaaacctgcgtccttgggatcacctcgaaagttaatgggatcaagtccctgacatacgacgacgagaagagcactcttacggtggtcggagacgtggacgtggcggtcatcgtggacgcgctgcgcaaggcgaagcatccggcggaggtggtgtcggtgaccgacgagaagaaggaggccgaggagaagaagaagaaggaggaggaagagaagaagaagaaggaaaaagaggaagaggagaagaagaaaaggtgctgccccaagccgccgtgcaagccgtgccctccgcctccttgcagtccgtgccctccgcctccttgcacgccgtgccctcctccgccgtgccctctgccaccgtgcccaccgccgtacctcaagccgtgctacatccccatcgaagacgagtatcccgggccctgcaccatcgtctgagactgagagagcaacaccgtggccatccataccagttcctcgctgatggaaaagccaccacgcactcttccagaagaaggcatttgagtttcagctgtagcgccatgcgtcaatcatcggtttggaagaaatggtttccaattttccatgcacattctctttctgtccttctcgttctatggttctagcgtgctctttctccatctaccatattattgtaaaattgataggtgtctgaataatatgatataacagacacgttcaggtacataccatgtgtatagctctgggataagcttcccatcgg

SEQ ID NO: 45106 - DNA, 166 bp, Zea mays
  Clone ID: MRT4577_141144C.1
tctgtgatctctcctggccctcctcagagagcttcttgttgctagggcctgcgtgctttccatcccgccagcgtccaccttctcctggggcccacgcccctatgattgccaggctgcgcggcgcgtgacggttacatcacttttctcgaagtacccaatgctggag

SEQ ID NO: 45107 - DNA, 300 bp, Zea mays
  unsure (1)..(300): unsure at all n locations
  Clone ID: MRT4577_141145C.1
ccataaagctgtacaaatcggaccggcaaaacttccatggcggggccaaaagggttccacttctttgaaagccggcgctgataacatcctaggtaacaaactatagtctcaaaaactcagttggcgcctataaatacaaacccactgggatatacataaatacaccgagcaggcattaaacattgtgctanatttaccatcccactgcgttctttctanaacaaaacttctagcgacaactatcctgtgcatcatatgacccacatttcctaggaatgcttgatacccaagaaatcaacc

SEQ ID NO: 45108 - DNA, 684 bp, Zea mays
  Clone ID: MRT4577_141146C.1
tagcgatgacattgaaaacaagacccatccatctccaacaaatttgaccagcaaccctgagcaaactaattcaactttgaaaggtcatctggatcaacaagtgaattcaatggcagtgctcggcaaccaagtacagcctttgactaaccagacgtcgcttgagttggattctcctccaaatggcaccttggctctggtaacagatgccaaaaagtccacatctggagctggagatgatggcagcaacagcacctcaccctccactcatgtggacaagaagacggacggcggagatggtcccaaagaagacgtggatgtgtccactaaaataatgaataaggcaattagtgaagatgaagttgttccagagtgataaggagatccaagatctcgtgtcagcttctggtgtgacctgtaagtttgtaggacttggtttatctcctagacctggagatgcaatgcaagcaggctatcttgttgcaccctttttttgtataactagtaactggcacgtgccctacgcgtgtagtttttttttttgcaatataagtagaaaaaatcgcaatataagtgataacagtgctatattgcttgtaagatgcacattaagtaagctattcatatatattacaagagctagaacaaagctagttccgaccgaaaaaaaaaaaaaaaaaagcggcc

SEQ ID NO: 45109 - DNA, 242 bp, Zea mays
  Clone ID: MRT4577_141147C.1
tacgcgcagggaagtaaagctccaccgagtacagcacgctcatgccgtgcctgccgttcgttcagatgggccgggccatgccgccccagacatgctgacgctgcattccgagcctgctagaacaggccaacaacacccccgaccgtcgcaccatctgcggctgcctcaagaacgtcgtcaacggcgccaacgggagcggcacctacatcagccgcgccgtcgcgctgcccaacaagtgcggc

SEQ ID NO: 45110 - DNA, 247 bp, Zea mays
  Clone ID: MRT4577_141148C.1
atgctatagggctagcgtgttactattcttttcttgtttttttttggagctggttcatctgaaacgagaaagtctcggctctctgagtgcaccgtctttatgatgcatcattcgaaacaaggggcttataattcctaacagtacaatctacgtcgaatcaaataataagtgcaggccacactattactttggatgcatcccgttcctgacagagaacgagattgcggtaaagaggccagggagacca

SEQ ID NO: 45111 - DNA, 255 bp, Zea mays
  Clone ID: MRT4577_141149C.1
gcttttcatcctcctctgctgccttcctcctccatttccagagtcagacatagtagggggcagcagaaatgccaggccagccccctcctcccaccggccttctctcagctcttaccactctcctgggagcctggtgccagagcagggtttgcaggcagagtccgggggaggctgggaagccggcctacccaggggccggccaatccccagccttggcaagaaccagggcctcccccttctgctctgtatctgtaa

SEQ ID NO: 45112 - DNA, 488 bp, Zea mays
  Clone ID: MRT4577_14114C.1
ccaccctaccgcaaagttatttttaaaaaaaatcccaggaatggctatttcccaacaatttaatggtttccttccaggcacccttcctcccccttgggccctaacctttctcattagagacacctcacctgaccagccaaccatccctgaacaatctgggtttttcccttcaaccgttggcagggcaacccgtttaaggcgattggttcattaggggcaatgcctttttggccagccggcctttccttaaaaccatcccacctgccctcaaattccggttagggtccagccccatttccgtggggcgttccaaccagcccaaagtggccaaacccttggttcaggccagcaaggctgagaaatcttccacaaagtaccttgacttggtccagccttgcttggacaacctttaacacctctttaaccttttaaaggtcctatatcccacttttttggtcggggtttcccccaaccttaggactatgaag

SEQ ID NO: 45113 - DNA, 225 bp, Zea mays
  Clone ID: MRT4577_141150C.1
cttactgctctgccaatagtaataaactagtaatcatgtcgttgttttgttaccttatgtcaaaatgttatatctttagactctttgtgtgactgaatttcccttgaacttgttcagataaataagcatgaaaaattaaaacaccccaatgaacctggtggaggttcctaaaactctacatgggatataaggataccatatcgaccggtccctggcttttttatc

SEQ ID NO: 45114 - DNA, 447 bp, Zea mays
  Clone ID: MRT4577_141151C.1
atttctctaactttcatcaagtcggcagtgttctgctttgttgttggcgactaccgagcaccacggagagggattatggatggccaagtcgaagaacacacggagaataaccaatcgctcaaggcgcacaagaacggcatcaacaagcccaagcgccaccgacagacctccaccaaagggatggatccaacacttctgaagaactttgaggtactcacggaatgcaaataaaaagagtggacgaggttgactccgaggactaagatgatgcggtattgagcttgtggcgacaaatgtatatcttgaatccctaacagtgttatctgtgaacttagttctcacttctgcgagactgcgatcaaaggacatccatcatctggcacccaagtgtattttatgtctgtgttggtgacctgtaatttaattaaaaccatcatctgcatctac

SEQ ID NO: 45115 - DNA, 106 bp, Zea mays
  Clone ID: MRT4577_141152C.1
actctcgcctcccctccccgtatttaccgagccctagcacgcaagacggaacgcttcgtcctcgcacctccgccttatccgatgccttccctctccaccaccacgt

SEQ ID NO: 45116 - DNA, 321 bp, Zea mays
  Clone ID: MRT4577_141153C.1
gcgggccccggcccttttccccgggtctccaccacgcgcgtttcatagccctaatgctagattaagtgctaggggcatgtatgaaacgcggcgcgacatatctggcgagcgaggtatcctgctgggggctgaacagggcaacatgagagatgtctgaagaacacacacaatgcaccgaagggacaaaaacccgtgatgaatgaactcgggggagaggatcactggaattataataaaaaactatttaaaagaagggaatgcttgagggcgggaccttctatgacggccaagggaacgaacccgtgcatggaagcctatagc

SEQ ID NO: 45117 - DNA, 638 bp, Zea mays
  Clone ID: MRT4577_141154C.1
gcgcctcgcgcggtcccgtcgaccccgctcgcgccacgtgcggcctcgtcgtccccgcccgcgtcacgtgtggccccgtcgtccccgcttgcgtcgcgcatggccccatcggcccggttgcccttgtttgtgctcggcgtggccccgtcgcctgcacccctcacaacacgctacattgatcccacccatgtctaccaacagtgtgtgcatcctgcctccttggtctcctctgctgcaccgacctattcctcggctccctctcacgaggagccaccggtgtaccatcttgttgctctccaccgggacctcgggcacgtccacctgatggttacccagcgagccgcaggtgtcctttggcctgttgaccgcctagtccttttggcgtcatcttctccggcgctctcccccaagttgtcctctgtccgtagtgcgttcgtcgaccccaattggtggctcgctatggaggagtatgaggctttacaggcgaaccacacctaggacctgataccacgcccctctggcgccaatgtggtcaccgggaaatggatattcaagcaccagttgaagacagatggctccttggatcggtacaatgctcgctgggtattgtggggcttcacccacgtcccgggtggact

SEQ ID NO: 45118 - DNA, 1550 bp, Zea mays
  unsure (1)..(1550): unsure at all n locations
  Clone ID: MRT4577_141155C.1
ggccgcttttttttttttttttttttttttttttttttttttttttttttttttttttttttttcgcataagccccatcaagtgagcagtgttattggatagtaaaactcagttctgtagtcacaatgtcctccatgtcaaaccaaaaaataaactatggtgctacggaataaatccagaagcacaaggaaaagaactaattcgcaagacgtacgagtattacatatcctcgagggaaagccccaaaattagttctagcaccatttaactctcattatcacacttataatcctgcagtttttgtcgcctatatctgaaacgtgaaaatggagctagcagatgccttaggatgagaaagtcgaaagaacgttcttcttgatgataaactcgtcggccttggaggggctgatggacttctccaagatgcgatcaagcctcttggtttccttctcagtatactcgttgcctttctctagaatcttctttgcgatggttacatagacctttccatgccttgcagcagaaccactgagcttatctgcctcctcctccatactggagaggacttcctttcgcttgtcaccggaagcaccaaggaactccttagccaggacatccagacttgctatacggccagcctctgaggttagttgaccctttgtgtcacggctggtaccactcttctcgttaatgaacttgacaaagtcaaccaagtccctatcaccatcataatcttcaccagctttgtttccctttgggaaaaacttcaaggtaggaaatccactaactccatacttctcagccaaatccctgtgtttgtcagcgtcaaggttagcaataacaactccttcatccaacttgaaaacagaagccaccttctcatacgtcggtgcaagactcttgcagtgaccacaccatggggcatagaactcaacaaggacatctttggtttcatcaaggacaactgagtcaaaggtctctggggtcagaaccacaacacttgaaggaactgctgctatcttcacattagtcgctgcttcagagttaacatactctgtaagggcttcggcagtgcgttgaccctcatacttcttgggctccaaggaacctttgggaaaccactggattgtggggtagccagaaactccatacttgctgcacacactcttgtgctcatcgcagtcaaccttggcaatcaagactgatttagcctttttaaagcttgcaccaagtctttcatactcaggagcaagcttcttgcagtggccacaccagggagcgtagaactcgacgagcgcgccgcggtcctttccgacctccttctcgaacgtggattcggtaagggccaccacgtcgtcgccgtccgcaagcgcagctggggcggcggcgaaggcggcggccaggagaaggatggccaggaatatgcgtgagatctgggagatcgccatggctgggtctctgggaagcagacgaagggaagtcttctgctacttcgtccccacttgtgtccttttatataaaccagaaatanatctccatatcccggccgg

SEQ ID NO: 45119 - DNA, 632 bp, Zea mays
  Clone ID: MRT4577_141156C.1
acctacgtgctgaatctaacccagctcttaatgctggcctggaaaacgtacagtctacaagggttgtagaacattatcaaggctctggggcaagtgatggtggatgggttgcaaaaatcgctgccttacttgttggggaggacccatcacagtcgtacgctttgatctgtggcaattgccatatgcataatggtttggcccggaaggaagattacccacacattacatactattgcccacattgtcatgctctaaacacatcaaagaacttgatggggcaatactcaggctccaactcaggcccatcgaccccagttgctcctgctgatgtgatatctgctaccagctcagtagtagagagtgaattgattaacatggctacagtgcaggagttgccaaaggaagaacacgcagagaaggaagtggaggcaagttgatgccggtccgtactattactgttgatatttgtgagattagttcatatcgccgtgtttgaactggtttgagccgcagatgtagcactgttgtaaaattggaaataggtgacctatatgatccacagcaaaaccagtacaataattatttagccagtttgtccatgaacacacttgagaggacgagttttgttggca

SEQ ID NO: 45120 - DNA, 589 bp, Zea mays
  Clone ID: MRT4577_141157C.1
tccttttaaaaaaaaaaaaaaaaaaaaaaaaaaaaaaaaaaaaaaaaaaaaaaaaaaaaaaaaaaaaaaaaaaaaaaaaaaaaaaaaaaaaaaaaaaaatttaaaaaaaaaaaaaaaaaaaaaaaaaaaaaaaaaaaaaggggcgccctttttaaggatccaaattttccttccccttccttccaactttttatttttttttttgtgcccccaaattaaatttacttgcccgctttttaaaaccttcgaacttgaaaaacccttggtttccccaattttattccttttgaaaaaattccccttttccccatttggtttattacaaaaaagcccccaccctttcccctttccaaaaatttcccccccttaattggaaattggacccccccttttaccgcccttttaaccccggggtttttggtttttccccccaggttaccctttacttttccaagccccttaccccccgtttttttctttttttccctttcttttttcccccttttccccgtttttcccctaaaatttttaaatgggggcctccttttgggttcccatttaaggtttttccggccccttaccccaaaaa

SEQ ID NO: 45121 - DNA, 513 bp, Zea mays
  Clone ID: MRT4577_141158C.1
cgaaactaccagtgattctttctctggttcaaggttgagcacccacttgatggatatgaactggatcttgattcttgaggactgaagaggatgagctaagacattccagtagtcaaggaaacttgcgtgatagggaaggatgagcataacaatactataaggcagtgctgctacagcttcaaaatcaagtcttgaccttgaatagaaaatcaaggaattactctgatgattctgatgatgatgagtcttatgattctgatgaggatgattctgatgattatcatgatggcgaagaatcatctcctgacgaatgcgactatgactcacgtcattaggatgataccaactatgatgactaggaataaacctcaactgctaaaaagccaacagcaagcaagaagagatgctctcttaatgctttcaaaactcctctttctgataagaaagcaaacgttgtcacacacccagtccacaacacaggtggcaagaagggtgccacccatgtggctactc

SEQ ID NO: 45122 - DNA, 967 bp, Zea mays
  Clone ID: MRT4577_141159C.1
cagccacaataacagactctgaggtaatagcagcaatagaaagttcaaaacctgaaggggtgcaatccatagcccaaagtccacgaagcatgactggagaagagaacttcagaggtatacaaaaaccgcctatcaaacatgtattcaaaagaagaggtaagaaacagccagttactactgaagcaataaacaagagcccgtcaaataaaatggataaagaagtggctccacatagccagagtaatgccacaagaactggagcttcaactgggtgtgatatgctggatcaaaaggaatgctcaaaaatggaacccaagagggaactgaatatggaaggaataaccccagcaggggaaagtaaaaaggccgaaaagattggagcatgcagaaattctgaatacagtaaggtagcgtccactacaatcaagtcaaagaagacacaaatattaggagacacatcaagagctccgagagatgagttgatcactaaatatcccaaaggtgacgggatggatcaaatgggatcaagcgcccaaggtgacgaaaaagaagatgcatccataatagacacagggctacttccaaattccgaggaagttggtgtctatgacagtttcagtgagatgggtcttcaggagaatctactcaagggaatatatcaatatggtctggagaagccttccgcggtccaccaaagaggaatcgtcccactatgcaagggctttgatgtgctccatcgatctctgtctggaacaactgagacgatctgctccggcgtacttcagcgagttgactacggatctgcagaatgccaggctttgatccttgtaccgacacccgacttggcacaagagactctgaaagttcttgaggcacttggtgagttccttggtgttacagctcaaacttgcacaggaggaactagtgcccatgcagaccagcaagcgctgctaagtggagctcaggt

SEQ ID NO: 45123 - DNA, 820 bp, Zea mays
  Clone ID: MRT4577_14115C.1
atcggaggatgaactcatgcgctgcgacggtgataacgagcggcgtacgggcacgtgcaggccaggcgggaagaggccacggacaaccacaacctcgccgagttggtgagtttgccgctgctgctcgagcgatttttggggattaaaaatggtctgccagggggtgtttatcccaatgattgagtgatcaggatgcgacgacatcgccgaccaaatggagctgctcatggagttggtcctcggctacagtaagaaagactagcctcttaggttcaagtagctagaatggttcgaggatatcggtctgctccacacccagtcgctcgcttcttgatctgaacacgtcgtggagggggaggggcttcaaattacgtctgccaccatgaaaataattaatccgtgcattggtgtgtgaaccagttcaacagcgagagcaagccgatgacccttccacttggcagagaagaagtcacaaggcaagaggaagtctttaatcttttttaaagtaggctacatcagtgagacattgcagctcatacgggtcttgaaaggcgtcctgatttcgatgaaagctcgaggcaagaggaggtctctaatcacttctaaagtaggctacatcactgagacattgcagcccatagtagaagaggtatttgaggttcagctgctaatggtcctgtgattttgcatttctgtcatcatcattatcatcatccttggccaatacaaataccgttccaagggaatcacatagttcactataattataaggacagtaaattaaatagtgaaataatgaagcaccaatcatcttactttt

SEQ ID NO: 45124 - DNA, 347 bp, Zea mays
  Clone ID: MRT4577_141160C.1
ctgtccgactcccgtggcgggcccttctgaccggtctggcgaccgctgctgctgcgttccgggaagatgcctgggaaaggaattgggctcggacagtgaacccaggagcttcacaatcaacggctccaacaataacagctgcggcggcaatttatgggtctgcaaaacattggcctgtgagagcagttgctcaaaagcgaaccatgcacgccatgcaagggctctggatgcccccccagcaagcaagcaaagaataggtttgcgtcccacccctccatctggagagcgccaaggtgccacctctcaacacgtacaagcccaaggagcccttcacggacaccattgtc

SEQ ID NO: 45125 - DNA, 180 bp, Zea mays
  unsure (1)..(180): unsure at all n locations
  Clone ID: MRT4577_141161C.1
ctggatttttgacnccgagtgctttgncctcctcnagcnctntgtcttnccttggtccgtgaatngtgtttctgtgngcccgnatgggnanctctttgctgtcctgggagatcntgnggctggttgtgtggtggatcccnagtgtggcaaggcnttggctctctcggggtcacttggnnc

SEQ ID NO: 45126 - DNA, 528 bp, Zea mays
  unsure (1)..(528): unsure at all n locations
  Clone ID: MRT4577_141162C.1
ctagaggattcctctctctgcccagttcgacattatccgtgcaaaaaaaaaaaaaaaaaaaaaaaaaaaaaaaaaaaaaaaaaaaaaaaaaaaaaaaataaaaaaaaaaaaaaaaaaaaaaaaaaaaaaaaaaaaaaaaaaaaaaaaaaaaaaaaaaaaaaaaaaaaaaaaaaaaaaaaaaggggggggggaaaaaaaaaaaaaaaaaaaaaaaaaaaaagggggggggccttggaagaccccgggtttacccccctgggtcggcaagaaaaatttttttttttggggggccggaaaaaaaattaaggggcccgattttaacaaccttcggaggggaaaaccccccggtttgcccaatttaacgctcttggaaacaacccttttttggcggggggggtagtagttaaaggggacctcacccntcccttttccaaaaattttacaacccttatttgggttgtgccccccccttttttgggcactttaaccgggggggggggggtgtttccccccagggggcccctttta

SEQ ID NO: 45127 - DNA, 2143 bp, Zea mays
  unsure (1)..(2143): unsure at all n locations
  Clone ID: MRT4577_141163C.1
cccacgcgtgcttttctggaaaacgtctaacctatangatgtggctntgaaatgactttagatggactcttggtgagcgcaattgctatttaaattatcaggcttagtattttgtgctgaatcctagtaattcagatagaaattcatttatccaagcaggtccttaggagtttgttttgtccccaaggatgcaaaattgtgtgtacaattcaaccattatttgatgcgaagcgtccggaaagacagcgcacgaagcaatctttccctttccccaagatgggattcggcttcgttcgtctcgccgcccgcgccgcggtttctcgccggggcatgacgccagcaacctccgcccgccgcgcgctcgccccacccgccgtgccggcggagccccgctgcgggtcccactggctcgtggccgctcgcggccacgtgggccactcgcaccaccacggcggggaggacgagggcgagacatccgagaggatctttcgtctgggactcgccgctgacgtcgtactcaccgcggggaaggccgtcacaggctatctctccggcagcaccgccatcgccgccgatgccgcccactccctctcggacatagtgcttagcggggtggctctgctgtcttacagggcggccaaggctcccagagacaaggaacatccctatgggcatggaaagtttgaaagtttaggagctcttggaatttcaagtatgctgttggttacttcaggtgggattgcatggcatgcttttgaagttcttcagggagttatgtcttctgctcctgatataattggcaatacattgcatgcacaccatgaccatggtagcagtgggcatcatcatggaatagatttggaacatccagttcttgcattgagcatgacaactttagcaatatctatcaaagaagggctatactggataacaaaaagagctggggaaaaggaaggcagtggtctgatgaaagctaatgcatggcaccatcgtgcagatgctatttcatctgtcgttgccctagtaggggtaggtggttccattcttgggttgcctcttcttgatccactagctggacttgttgtctctggcatgattctgaaagctggtattaagactggatatgagagtgttctggaattagttgatgctgctgtggatccttcacttttagcaccaatcaaggaaactattttgagggttcacggtgtgaagggatgtcatcgattgaggggaagaaaagctgggacatcattatatcttgatgtgcatatagaggtatatccttttctgagtgttagtgcagcacatgatatcggtgaaactgttcgtcatcaaattcaaaaggagcacaatcaagttgctgaagttttcatacacatagatccctcgtacttagtaggcccgaccatggacctaaaaaggattctgaaggactctgatggaacaaattcagaagctatcccacggcaacaaagtgcagaagccatcgtgtctaatattatttcatctcatttttcggagaaaatggcgctcgaacatctaatgctgcattacgtgcaaggaagagtgttgctccaggtccaagtttcaatgtctccagaaattttgattcgggatgcaatggaagtcgcgaagcaagccgaagaggagatactcagggctgatgccagcataagccaaatcagcttgcagctaagattgggccaacaaatcaagcaacttcagctagcatcgcaagaacgtcgctgatctacatgcaggagatcactgatccatttgctggctgcttcatgagtctactcgggagtatttccttttgctaatttttctgacatacatgagcttggtctgctgatgaggcagtaggctataggattctaggaaccgactgtgtacattgtaatcagagtgttcggagacgtgaagctgagtttgtaataatacacaagcagccttgctcagaaatgtactgggcaacaaattgtctgccacatactgtcaatgtaaaatgtatgaacaagttcctcactggccccgctataataacaacgaaccatggctactgatgcaaaataaaatgaatattgttttttttcttgaccctacctattcaaggcacaagcctgaaactttttaggat

SEQ ID NO: 45128 - DNA, 3467 bp, Zea mays
  Clone ID: MRT4577_141164C.1
atgacgccagcaacctccgcccgccgcgcgctcgccccacccgccgtgccggcggagccccgctgcgggccccactggctcgtggccgcccgcggccacgtgggccactcgcaccaccgcggcggggaggacgagggcgagacatccgagaggatctttcgtctgggactcgccgctgacgtcgtactcaccgcggggaaggccgtcacaggctatctctccggcagcaccgccatcgccgccgatgccgcccactccctctcggacatagtgcttagcggggtggctctgctgtcttacagggcggccaaggctcccagagacaaggaacatccctatgaagatattggaagtcacatttcttactctccttttgttcaagggcatggaaagtttgaaagtttaggagctcttggaatttcaagtatgctgttggttacttcaggtgggattgcatggcatgcttttgaagttcttcagggagttatgtcttctgctcctgatataattggcaatacattgcatgcacaccatgaccatggtagcagtgggcatcatcatggaatagatttggaacatccagttcttgcattgagcatgacaactttagcaatatctatcaaagaagggctatactggataacaaaaagagctggggaaaaggaaggcagtggtctgatgaaagctaatgcatggcaccatcgtgcagatgctatttcatctgtcgttgccctagtaggggtaggtggttccattcttgggttgcctcttcttgatccactagctggacttgttgtctctggcatgattctgaaagctggtattaagactggatatgagagtgttctggaattagttgatgctgctgtggatccttcacttctagcaccaatcaaggaaactattttgagggttcacggtgtgaagggatgtcatcgattgaggggaagaaaagctgggacatcattatatcttgatgtgcatatagaggcgtcgcctcgtcttacgccttatcgcttaaaagatccctcgtacttagtaggcccgaccatggacctaaaaaggatcctgaaggactctgatggaacaaattcagaagctatcccacggcaacaaagtgcagaagccatcgtgtctaatattatttcatctcatttttcggaggcccagcgatggagcgatgatggtggtcttgcctcttttgcgggtgcttcagcggatagtcggcctcaggcctcttacaaagagtgttgctttcctcccgaccccccatccatcatcctgctgctgaggttgatggcgacggttgggtgagagtcaaggatcgtcgtgcatgcttcagggatcatcgtgcctgccagcgtgatcttcgtcaccctggcctctctgcccccaaggctactcctattgacttgcaggggtggtgcttcaattgcttttcctcgtctcatcgtgcaatcagctgttgtcgtcaggacgcctgtccggtggcaccgtctttgagcccgcagatggcagctcttgaccaatcagtgagcgcgctccgaccttgctgtgtcatcaaacattccaggaggattatccaagctgaagagaatctgcggagtgctctgttcgtcaacgtagttgggccagaggattcaggtcgcaccgctgaggtcttgaacgcactcacacagaggtttggttttgaggatgatgtgatcgacctacgtcgcgtcgcgccgaattcctttcccagtgatgatctagctaatcgagtcttcaatggagtaatggcgccattcatttcgttcataactcctacaccggttcatgctgcggttgaggtccatgcctcagttaagtctgcatggttccaggctcctggtgtttcttctaatgcattggtcgagcacttgttgggaaatttgaccgtgtcagctcaggacttcggaatgcctcagattgagaagtgcgttgatggtttgggtgctgtgggtgcagtggttcttcactccccagcattaccttctgttcaggtctcccgatctggatctagcaaaatactgaaagtctatcacagaaggattcggcccaagcttcagcttcaggaggttaatacctgtgacatagctaacaactttatcgagatggtcaccaaacccctatcaactattttgtcgacaccagcatctcctaagccgaagaccagaaagaatatttcaccaaattttgttccaagaagatccaggcgtgtggccaagttacaccctttagtgtttgggttgaagaataagcatggctcactttcttctgctgatctggagcattgtgctcaggaattcagtaagtcagtatcccttaagcaagttaaagttctaagcaaggtggggctgcaggctttatcccccgggattgctgacattgttttccaggattggaaaccaaaccctccttttaatcactgggatttggctttctgccttggctctgagtttggtgactttgcttttcttccatctaaagacacaagagggggcatccttgttgcttggcaaagaagcctttttactgcagtggacaggaaaattttgaatcattcagtcttggtttgctttcgtagtgcctctaatgtctgctggtggttctcagggctatacagcccttgtagggatgaggagaagcaattctttcttgatgaactctccctgctggcactggcaaaagaaactgtacatttattggaggttgcccaagacagtagaccactttggcgtgctgaagattggttaaggaagcaaagcaaattattgtgtctcaaactttcattcttgagcagaaccatctctagattaagatcaagagtgagattcaggaaaaggaagaatttcatccataaattggttgttgatgatcaatatctcaccttgcaagaggacaagcagcacgctatgtttcaattctatagcaatctgttcggcaaagaggcagaggctttacacccaggtgattataggcccgtcagcctggttcacagttttgcaaagttaattattaaaatcatggcaaatagattggctcctgaaatagacagattgctgggctttcctgctggaagttcttcatcactggtgttttggacagtcttggactcttggtgcagtatggttttcaacctcctcaagacttcttcaatgcaaattctggtaaatggggaacctggacattctattagcaataggagagggttgaggcagggataccctctttcccctctcttgtttgttctagtcatggatgttctcaataacctcttcatcaaagcagatgatagtggcctactgcagcccttagctggaagatctataaaccaaagagtctcaattttcgcggatgatgtggctatttttgttaaacctgatattgaagatcttgaagttgtcaaatgtcaaggccattttaaggggttttggaatagcctctag

SEQ ID NO: 45129 - DNA, 181 bp, Zea mays
  Clone ID: MRT4577_141165C.1
gagatcgtcgaggttgtcggcgagcctggcacgccgtcggggacgacagccaggctgatggacttcatccccatcgatatctacatcccgtccgtggagcggggcgcgctcagcgagagccggcgcaagcggcggtttctggacttcctccgggcccaaccgtccaagggactggtttttg

SEQ ID NO: 45130 - DNA, 424 bp, Zea mays
  Clone ID: MRT4577_141166C.1
ccggccagggtccactgcactcccaccgcccaagctttactacgtgatcgatccgatccgccgcggcgcgtaggaaaccatcctccccccgcgcctcgtgccatggccgtgcacgcgcagtaccacgcccacgccttcccacatgacctccgcgccatccccaggttcgtctcgtcgtcctgactcctgaatccgctcctcctattaatcttctccttctatctatattaatccgtccgccatcgccgaaaccaccgcaacgtcgccgctgcgcccatcgtcacccgcgtgctcgccttgttccgcagctgcccagcgctggacaacgccacgagcgcgtcggcgttccttgtcgtcgacgccgaccccgcacccgcggctggtggcaacacggcgctcagcggcctcacccgcaacggcaaca

SEQ ID NO: 45131 - DNA, 1254 bp, Zea mays
  Clone ID: MRT4577_141168C.1
ggccggccgggactttcgtcaaaagagactctctccctcctaccatttccgcctccggactgctccggacgcgcgcctcagatctactccaacacctgtatggattcctctggccgtgtggcctttccggcaactatagataggcaactatagctagggttctccttctcccctccctcctccgcttgcgcttgctcttggacggtgcttcctcttctttaccagctagtcaaagtaaccacgcgtgctgcttcatctctcccttccttcctgccgtgtggttgttggctgccgcagcggcggcgcccgcgggtggaggagcaggagcggcggcgccatggtcgggaccgggaagagggagcggatagcgatacggaggatcgacaacctggcggccaggcaggtgaccttctccaagaggcggcggggcctgttcaagaaggccgaggagctctccatcctctgcgacgccgaggtcggccttgtcgtcttctccgccaccggcaaactcttccacttcgccagctccaggcagatgagaggagaggagctccagaggctgagcgtcgaacagctgcaggagctcgagaagaccctcgaatccggcctcggctctgtactcaaaaccaagagccaaaaaatccttgacgagatcagcggtctggaaagaaagagaacgcagctgatcgaggagaactcaagactgaaggagcaagtgacacggatgtcgaggatggagacgcagcttggcgccgatccagagttcgtgtacgaggaagggcagtcgtctgaatccgtgacgaacacgtcctatccgcgcccgtccaccgacaccgacgactgctccgacacatcgctcaggctcgggctaccactcttcagctccaagtgacggagatttgacatgtccggtagcggagcggtgccgatcgcttgcccttctccactctagataggtctggattgggggagagcagcagtgctggatcgggaagacccaagtgaccaacgcgtcgcatcagaataaagcattttgagtgctgtatgatgtgtgtattctggctctgaaagtgagacctgcttttgttataatacatacatacaggcagcatggcaatacgtgacggggtatccgctgcctgcagtccgtgacctgtctgtcgtctctgtttctagtactcgctataatcaccctgcaattacctgcagctggtcattgttaggagaaattccagtccatgcaaatgaactccc

SEQ ID NO: 45132 - DNA, 228 bp, Zea mays
  Clone ID: MRT4577_14116C.1
tcgaccccgcgtccgtttaccacaccgttcactcaagagcaagagacccaaccctggctaaaacaagccgctcctcctgctcgccacctcgttcctgagctgcggcctactggtggccgtcgactacgccccaatgaccctggccgtggtgaacaactgcccctacctggtgtggccggacattcagggggggggtgcgggcacaacttcctggagggcggaggttta

SEQ ID NO: 45133 - DNA, 1809 bp, Zea mays
  Clone ID: MRT4577_141170C.1
gcgctgccttcccaatcaatcgcattctccgtccgcgacccaatccaggtgccgacagaccagataccagagcaaacaagaagccgtctcactccacgtcgcaagggaaatggccaccgcctcgctcgcactgctcgatcagacgctgctgccgtcccctctggcgtacaacggcggctccgaccgcctcagccaggagatcttctccatcctcgagtccaacttcctattcggcgcgtcgccgctggagggcggcgcgtgctccgcgggccgcgtccgcgtgctgtccatcgacgggggtgccgacggcggcgcgctggccgccgcagcgctggtacggctcgagcgccgcctgcaggagctctccggcaaccccgccgcgcgcgtcgcggacttcttcgacctggcggccggctccggcgcgggcgggttcctcgcggcggcgttgttcgcgtgccggatgcccgccgaggcggcgcgcgacgtcgtggccaagaaccggaaggtcctgtccgggcgtggcgggggcctgatgtcgttccggcgccccgaggccgcgttccggaaggtgttcggtgacctgacggtgcgcgacgccgccaagccgctgctgatcccgtgctacgacatggccaccgcggcgccgttcgtgttctcccgcgccgatgccgtggaggccgacgcgttcgacttcccgctgtggcaggtgtgcgcggcggcttgcggcgtgggccccgcggaggtggcgtccctggacgggcgcaccaggctgcgcgccgcgtcgggggcgggggcaggcgggggcggcgcgtcggccgccgtggccaacccgaccgccgtggcgctgacgcacgtgctgcacaacaagcgcgagttccccttcgccgccggcgcgggagatctcgtggtgctgtccctcggcgggcgcgccgcagcctcgctgggccggctctcgtcctccagcctcctgcgcatcgccggagcctgccaggccgacatgtgcgcgcggattgttttgttttgcaggttgaccaggccgtgtcgatggtgttcggggagagcagagcgaccaactacgtccgcatccagggcaacggcattgcgcccggcgagacggcggaggcggcgctggcggagcggggcgtggagtcggtgctgttcaggggaaagaagctgatggcgcagaccaacggcgagcggctggacggcgtggcggagcagctggtccgggagcaccaccgccgactggagagcaagacccccgtggtgctggtgaagccctccgccacgccgcggacgtcttcgtcgtcggcgtccacgctcatcaccgtgtccaccaactcgtcgtcggagtcgccctgagaccgagacgacgagcgaccgaccgagcgagccgtcaacagacagacagaagcagctcggctttaactagcgtggccttgctttgttttcagcttttttatttattggttcgtttgggtttctagtttagcgcggcgccggcgccggtgctcggggttttgacttttgattgcctgccggcgccgcctgcgcgctcgctcccggtcccggccgcctggcgcggccgggaagaaagatcgaggagggctgtcgagcggcgaaggcgccagagatttgtgtacgtagctagaggaaggagatgtgcctgtatgtgtgcgtgtgctgcaaacgcagtgtatgtacgtgcgtacgtagtagagtgcccggagcttggatgatattgcaatgcgatgtgacgatgctactgtcggtgtggcgtttactgatcaaaaaaaaaaaaaaaaaaaa

SEQ ID NO: 45134 - DNA, 428 bp, Zea mays
  Clone ID: MRT4577_141172C.1
aaaaaaattaaaaaaaaaaaaaaaaaggggggaaaagaaaaaaaaaaaaaaaaaaaaaaaaaaaaaaaaaaaaaaaaaagggagaaaaaatataaaagataccagcggtacgtgggggggcgggcctccgtgtttgctggcttgttgcgtcacctttcttcgtttttctggccgtttttttggggggggggggttgttaattgcctgccgtttcctaacttgcggggggggggggcgcttccctttttggccggttggcggccttggcgcctaggccctttttgttcgccgtggccaacggcttggggcgttccccgtgtgggggttctcgccttgttgtgggccatttggcccggggggggccctctttccgggcgggtggaccgctcccttgtgtaggggccctacccccgggtgctttccctttc

SEQ ID NO: 45135 - DNA, 434 bp, Zea mays
  Clone ID: MRT4577_141173C.1
cggccccgtgggcgggaacccgactctaatgagcgcactcctcaacttgccctgcgccacgctcggttgtcttgttcacaatcaatctctacaacactagccatgggaccctacgtacccttccgactgcatccatcatagactcctacagaccctggaccgcggctaaactgacatagaatgctgccctcatgcgcaccactgacgagggtctccattgcagatgttgagtgaactggcgacatgggcaaccgcctctcaccatgcttttccacacgcacggagagagtaacctggggggtctcattgagctcgtgtactactgcactggggccattcccacatcaccggcgcgatactctaccaggagacactataccgcacgacccggatgtggagcgcctggtgcatatcatccaggagggaggagtgct

SEQ ID NO: 45136 - DNA, 417 bp, Zea mays
  Clone ID: MRT4577_141174C.1
gggccgacccggcccaatttaaaaattaaaaaagaaaaaattcaaaaccccagctccaaacaaaaaaaaacaacttgggtcgcatcgacaaactaaaaaaaaaaggcatggggcacgacaacagggagcgaaaaaggccaaaacaaaaaaaccgaccgccgaaaaaaaaaacactacttcgaggggaccaaacttaacccggaaacccaaacggcgaaaactgccccccccgaggagttaagttggttgaacctttaaaaaaaaagggccttcctttggtcgaacgaaaatttctggggggggaaccccttgggcccctttgggggctgcttgggtgacttgcccacaaaaggatcaacacggatggcaaaatggacctttttggacaaagcttccatggaaaaagcccaaaatccc

SEQ ID NO: 45137 - DNA, 608 bp, Zea mays
  unsure (1)..(608): unsure at all n locations
  Clone ID: MRT4577_141175C.1
cccanagagggctccagctcagggcacagtcactgggcagggaagagacaggacgcccggagcctggctgtcagcgcagccgccatcttatcgctgaaggggactgaggccgagctaggcaaggagaactaggggcacggattgtggagctgacagcggggaggcctgagtcccgccacagcctcttcccaccggttccaaccagccccttctcctctctagggatgtcggactcggcactctcaccatttctaggcttccaaggggtcctggcatcttagctgtggattcccaatacctgcaggtcacagggccacagaggctgggcctctacgagcagaggacacagaagggcgaagacgagaccaggaactccggctgcagcgagagacaaagaccccgccacatcccggaagccgccctttccgctccaaccgcgtgcctgattggacagttcccaggccagcgtctctgacttgttaacgtttaagatccctcgccctcacgccctgagtgacagaagatgtgaccaaatgctgggctgaatgaagaaagactgacagccgaaggtgcccncttttcaggcagggcttcctccctgaggtgag

SEQ ID NO: 45138 - DNA, 257 bp, Zea mays
  Clone ID: MRT4577_141176C.1
cccttccttctcaaagtccaacacccaatgccccaaaactgcaaacgaaatcctagagcaggcctactatcgtagacagaccatagttttggcaaagaaaagaaaactggcagaaaaaaaaacaccagtttgtccgccagtcatgccaggtagtatagatcgaatggagtagcgggcgaattcatcatcacaccccgtcggtggtgtggtggcgtgcaaggaaatcaaacccatcacggagagtgggttccatgaca

SEQ ID NO: 45139 - DNA, 303 bp, Zea mays
  Clone ID: MRT4577_141177C.1
accagttgcaccctgtatttctttttgcagccagcacaatgtgacccaacttaaaatttgggggaaaaagaatgcaggatgtgtataaccaagtcaaaaccatgtactatctccttgggggttagggatgctaagaagagcccacaaatagaggattactcttcccctgaatctctaaactcagaaacaattaccaaaaaatacataactacttccttgtagggccctttgccttattcatttaggtagtgtgaacattaagtataacataaattatgttcttaatggctcttagaccactta

SEQ ID NO: 45140 - DNA, 350 bp, Zea mays
  Clone ID: MRT4577_141178C.1
tttataataaaaaaaaaaaaaaaaaaaaaaaaggggacttaaaaaaaaaaaaaagggggaaaaaaaacaaaaaaaacaaaatttaaattcaacataagctgggggggccgccttaaagttccccgacctgcatgcgactagctccgccgcgcatgccacctttttggcccccctaaatccattttaaggacggcgttttcaaactcttcgaagccgaaaaaccctgcgtttaccccatttactactcttgctgcaattccccctttcagctgttgggttaatccctaaaaggccctgactcaccgcccttcccaataattgtcccccctgtatggctattgggacccccc

SEQ ID NO: 45141 - DNA, 930 bp, Zea mays
  Clone ID: MRT4577_141179C.1
atgtccgagttttacgaagctatggaaagaaccaatgcagaaaagattgtgcatgagacactatctgggatgtctgagagttcctgtgatagtgaagattttgatgcagaaagtgagaatgagggtgccgaagatcagccctggataccaagccatattgtcttcgggaagtcaacaatcaagcaaggacaaattgatgcaatgaggggaagcttcatgaaagcagggcttcagttccctctagataagatactggttgaagtcctaaaaacttttgaaattttcctacatcagcttactcccgaagctatcatcaagatagagatctatatttgggccatgaggaaccaagggttagaaccaaatgcaaaatgcttctgcaacatgcatgaattgtcttatgagacgaaggccaccggaaaagagcaatatcacaataatttcggttgctacgacttcataacccgctctgaggtgagcaacccagttccaacatttcgcaagagatggccgggggcctggatgcaggagtggttctatgtgaaaaatgatcttattgaaagggaagatatcaaggggattatccaacgtcctatatggtctcacttcagcattaggagaccatcccttacccttgggaacgacatacaagcgtgccaagctgcttttaacacagtatgcacttacatagacaccagggacttagttcaggaaatattgcttatagagtgtggccactcggaagtggatgggagatgccgaaggaaactgccactgggtccagcgaagtatatgagccagttcgatgagccaaatgatgactggttgaatgccatcgaagcaactagtgatgaactgcttggtgcttactcaagggctaaggatgatgctatgacaacagccttcggggtcgaggcaagaagaaactga

SEQ ID NO: 45142 - DNA, 219 bp, Zea mays
  unsure (1)..(219): unsure at all n locations
  Clone ID: MRT4577_14117C.1
cccggtcgcccacgcgtcgcacgcgctcgcccgcgtncgccagcttccggtcctgccaaaacccttcggcagcggcgccggccgacgacgcggcggacccctctcggatctcttccctcctacgcctcatcccctctgcatctttatctgagagaagcggaggtggggaagaattgggcgccttctcacccggaggcggcagcggcaagggtgggggtg

SEQ ID NO: 45143 - DNA, 577 bp, Zea mays
  Clone ID: MRT4577_141180C.1
cattgggtacctcgaggccggccgggaggcatcctacctccagcgagcagatctaagcgtccatggcagcgtcgcgacagagcgagctagtgagtatcacgagcaacaacaatggcttccctgaaggccgcgaagcccagcggagctgcggcgcatggcaaggagccggcgcccgagctcagcgagacggcgacgaagccgacagccgcgaagagcggcggcgtgaagaaggctgagcagaagccccgggaaaccaaaaggaaggcagagcaccaacaatggccgccgcctcctcgtcctcggtcctcctgctgctcctggccggcgccgccgccttggctgacatgagcgccaacggcgccaccttcaccatcaccaacaactgcgggctcaccgagaggcccgcggccaccccgatgggcggcgtgacgcagctgaacccgggcgggacgtgtaccgtcaacgagacggtcggcaccagctccggccgcgtgtgctgccgcaccggatgctccttcaacgggaacagcgtcagctgccagaccgtggactgctctggctcgctgtgctgcacgct

SEQ ID NO: 45144 - DNA, 248 bp, Zea mays
  Clone ID: MRT4577_141181C.1
gcgggagcgcctctgcctcgaggccgagcgcctcaggctgtccgcgatgatcatgattcaagcggggatggggtgccttgcgcgggggccgcttaaagagactcgaacagcaattagagactactgcgtgcaccattgtgtctgtccgggtgggcgaaagcgcatacccataggatgccttttaaaaatgagctacatacgaaaacccgcaaatgagcccaaatttaatgcggtgccgaccaatcccc

SEQ ID NO: 45145 - DNA, 152 bp, Zea mays
  Clone ID: MRT4577_141182C.1
gactgattactttgttggtgtttttattttgggcaaccaaacaaaaacgttcccaaaccatgttaacccacggttcagctcctaaaatccatcaaaatttgttgttctgataactcttggacttatgttataatagctcatgttgacacatc

SEQ ID NO: 45146 - DNA, 742 bp, Zea mays
  Clone ID: MRT4577_141183C.1
ttgggtacctcgaggccggccgggttcactacttcgtccgcgacattggatatcttatttactggacctaccgtaggataaagaaccctgtgttagcatacgaacttccctgaccactcagatttcgattcatatacgatatgcgactatgatatatacgacgctgaaattgaaagcacatgtcaccccattatcgcctctatgattgcataacacctattaccaaatggcaacaagtcaaggacatcctcgctgactgtgggcgtgctgcaccccatactctacgctccatgaacactccatttagatcctcctgtgaatatggctatcagaatatcgctctcaatatgatgatgaacggatatcattgctgctgccaccctcttccaatcatgagtgtgccactacatgtgctgctgctctgagcatctggctgcgacagagtagcccaacactgcacaaaggcaatatgccgaacttctgcgcttcatccccagccaaattcgagtcgaaatcaactctatggaggctggtgacggtgcttggcccatgaaatgccatgcagatgcgcatgcgatactgtgatcagcacctgtgacttgatatttcgtgctcgacctcccgaacgctgtacctgaactgactgtgaccctgtgacctcaccttgactacataaatgtactcttatttattgaagacaataatgtacatcacgtcatgtgaccgcctaatggaactgtgc

SEQ ID NO: 45147 - DNA, 637 bp, Zea mays
  Clone ID: MRT4577_141184C.1
ggggtaccgcgccccccccgcggcctccccccccccccccccccccccccccccccccccccccccccccccccccccccccccccccctttggcaaaaaaaaaccattttggggaaattgggtttgctaaaaagttgttatgccaaaacaaaatttttaggctttataacacaaacccacaaggcccagggaaacattacatgtaatgaaaaaaccaaacccccttttatttggttccatgcccccttttgtttacactaaaaccactaaaagttaatttacaacgtttttcggaacttaaaaagctcaaaaggggggcctttataatgggaaaaatttttttaaccctgcacggggggggggagggaacccccatcaagtccccatgatgggaggaccccttaccctcctgactatgggaattaccactatcctctttaaaaccagaatttccggaaaagtttataaaatcacccagttgttcaataggaggaacgggagctttgttgttaaaaccaatgttaggagcattgagggtcttgggaaactaagggcaaaaaaaaggttttggggaaactttttgctgtaacctaacactaaataacatccacgggtagataaccggaaccaagtttt

SEQ ID NO: 45148 - DNA, 409 bp, Zea mays
  Clone ID: MRT4577_141185C.1
atacatcatagagtagctcggaataggctcgagctcgagccgttttattttcatggatgctggatcagaagttcaaaacaacaaaagtgaatgtacagtattattggaatggaggctaacttgttatcatggtgtgttctgttactggtctatatatgaccataatatgttaatatattttctttaaaaaaactagtcaaagttagagatatttgacttagggaaaagctattgtgaactatagtttggaatgtgtggagtactggttatgttgtggctggcatttgcggttacatgcaactttctattcaatttaatatactggcagtgacttcatttctgtcattgctgtcaggggactaacaatcagcttgctctgcttgagaagatgaatgaccgcgtatcacag

SEQ ID NO: 45149 - DNA, 715 bp, Zea mays
  Clone ID: MRT4577_141186C.1
acctcccaacagctgaccctgtcccctgcggccctcatcccgacgccgcggctccgggggctcccgatcgaggcccggatcgccagaatccgtgcggcgccgaggtcgcgtggggtgcgaattggaagcagcgagctgtacttccggacccgaaaagtgggcagttccggggcaatcgcctttggctggactgtgtgagggagaaagggaagagcggaaaggttgccggagctcagactttggttatttgagaatgatggaagcgggcaagttccccgggataattggtgccgcaagcggccaggacggtggcgtcaacttctgcgacatggcatactaccagaagctaggggagggctccaccatgtccattgatagccttaacagcatgcagaccagcatgcacggtggttccataatgtctgtggacaacagtagtgttggttctactgactcgcgtactgggatgcttaaccatcctagccacagggggcctgttgctgtggtcagctactcggttgggaacagcattttccgtcctgggcgggtgtctcatgccttgagtgatgatgcgttggcacaggctttgatggacactagattccccactgagacactcaaggattatgaggagtggaccattgatttggggaagctccacatgggattgccctttgcacccggtgcatttgggaagctatacagggggacctac

SEQ ID NO: 45150 - DNA, 180 bp, Zea mays
  Clone ID: MRT4577_141187C.1
cgtttccatgcatcctggcgcacaagaggaagcggagagctctctctctctctcgcccgcaatataatgatgagagcacactctagccctggtcagcttcttcgctgcctcaattatcggagcagcgaacaaggcgttcacaattgcacacaacatagatatacacgaaagctagatatt

SEQ ID NO: 45151 - DNA, 274 bp, Zea mays
  Clone ID: MRT4577_141188C.1
tggatataatgtcggagtgacattgaatgttaaagcacattggagagagaagcaatgtcatgacgggctttcaacttcaggaagatcatgtggataaatgttctgatcctgaaaacaggagtgtctgggaatgactgggcttagagcatcctggggtttttggacgaggacaatggcgggagagccctcatctcacctcccagagtgtccatttgaaggctgctttggttgggtctggagtcgcatattatacatccttagattttgtgtaagc

SEQ ID NO: 45152 - DNA, 317 bp, Zea mays
  unsure (1)..(317): unsure at all n locations
  Clone ID: MRT4577_141189C.1
tgggggggggggggggaaaaaacctaggccggggtgaggngtgaaaatgctccttaattgacgagccaattcctcagcccaaaaacttatccctgggacatcatatttttttttttttccgnnaacggncatccacttggggttaagattagggcctctccttgggcggacaccttaacatctacaaaaaaaaaaaaaaaacccccctccttatggccaccggcctagagccggctngtgcctctctttcgtggcgccttctgcctccttcccctcctgccgtcctttcttgcgtgtgcctgtcgtggggacccggg

SEQ ID NO: 45153 - DNA, 415 bp, Zea mays
  Clone ID: MRT4577_14118C.1
tttatccttgctgtcgctctgtcacctctctcgctctggctcgtcgccgccgctcctaagccacgtgctgaggctttctttgtgcacttcgccggagacgagtacccactaattctgtacaaatggctgatggtgaggacatccagcctcttgtctgcgacaatgccactggaatggacaaggctgtttttgctgacgatgatgcaccaagggcggatttccctagcattgatggccgtcctctgcacactggtgtcatgatatagatggtacacaaggacgcatatgttggcgatgaggtacagtccaagacatgcattcttatgcacaagcaccccattgaccaccgaattgagagccactggtatgacatggaaacaatctggtatcataatttctacaacgagcttcacgt

SEQ ID NO: 45154 - DNA, 212 bp, Zea mays
  unsure (1)..(212): unsure at all n locations
  Clone ID: MRT4577_141190C.1
ctcactcggcagctcgctcgctagctgatcacaactgcntggctcgaaagactgaagggctccncaactgctgacgtacttcgggcgcggcggcggcggaacgacagcgtctgcgccggacgacgcgacgggcgagggccagctggaggcgccccccgctggcccggtgctggaggagctgatcaggtcgcaggggtgcggggcgtcacccg

SEQ ID NO: 45155 - DNA, 249 bp, Zea mays
  Clone ID: MRT4577_141191C.1
atacatcggatttgttttgtggtgtgatttaatttcccatcgtctgtccttgtggagttaacaacagagttcgatgacagccttatccaagaacaaaagatgtccacgcttggtgcagggatcgtcttttaccgattgaggacatgaataacacgagctccgaaggcgttacacagcctcgcgatcacggctacgacctcggcgggggtgtaaaggtggaacttggaagcaacctctaaaaaaattacg

SEQ ID NO: 45156 - DNA, 286 bp, Zea mays
  Clone ID: MRT4577_141192C.1
acaatacatcaaaagaaataaaaaacaataaaacaaaaaaaaaaaaaaaaaaaaaaaataaaaaagaacaaagcaaaaaaaaaaatccagaggcaagattctctaggaaggtcagcgacaaaggggcgtgccctctaaagtttgagggtttcaattccctggcctccaacttcttccgtctcctacggtgtcccccaagtccattccaagggcctcccttttaaaccttttggatgggtaaaccttggcctttccccactttaacccctttgccgtaccccctctt

SEQ ID NO: 45157 - DNA, 665 bp, Zea mays
  unsure (1)..(665): unsure at all n locations
  Clone ID: MRT4577_141193C.1
gggacgttatgaagtttgtctgccctacgcgtctgcttgggaccttcaaaggcttggcctgaagcagacttcaaggtaaatggtcctccagtcctgtgttttcaagtcgtccgactaatcgcgattagtcgcgattagtcgggctagtcggttagcagagctcgattagcacaaccgactcgattagagcacctaatcgccctggtcgtccgactagtcgacgattagggtcgattagtcgctcgattagctggttctgcgcgactaggtttaggatccagattttttgatttcgtgggcttttttggcgggcggcccagctacagggagatggaacgccagccgtctctactctctactaaaccgatagttcacatctctattttcctggcttctcaatctctttccttttcttctcttctctatttccctaccggctcctagacttcttgttctagaatctagacttcacctcaccagtacactcgcggttccaatctagacacgcgcaaatccagttccaagctccggacttcaccgacccagatttctcgtccagagtccagacactcgtggttccaatccagacacacgcagatccagaaatccagaatttttcgtcggcatgagttcaccttttggaggtattcttttgtgtagntctg

SEQ ID NO: 45158 - DNA, 202 bp, Zea mays
  Clone ID: MRT4577_141194C.1
atgaagggaaccgattttatttcatcaaggggataaagatttaagaaatggatactttgctttccaaatagcaggcctttaaatttgtggtttaatttcaagccagctgaaatgttcattgtttttcacacattcttatgttttcattggaattttatttcaacttgtgctgattctagcttggaatttacatgttttatac

SEQ ID NO: 45159 - DNA, 376 bp, Zea mays
  Clone ID: MRT4577_141195C.1
ggggtattcagtatgcccgaatgggggctaactggggctctatcgtttttcacgtccttatgctctttgctctttagttcatgttttggtagacgtggcctttttacttctgtgcttacttggtcctattgcttctctcggttcggggtggggttcttcctttcattgtttctctctgcgttcatcctgcttttggttcctgtgggctgccacgtgctgtcgccgggtgcccttttctgctctcgccgtggctgtttcgtcggtcgtcgtccctgtctttttggcttttgttggctcctcccatcttggtgtgtctgctggggcttcttgtggtgcctctcgtctccctttcgtctccgccgttttttttcctttc

SEQ ID NO: 45160 - DNA, 357 bp, Zea mays
  Clone ID: MRT4577_141196C.1
aaaaaaaaaaaaaaaaaaaaaaaaaaaaaaaaaaaaaaaaaaaaaaaaaaaaagctagaacaataaaaagaaaaaaaaactatgggccactttatggtgatatccttaaggcgtgttttttcgctagggcccgttctcctgcgggcgccgttgtggccttatatgttagtcgccttagcggttccctttgggggtgtttttttaaagtcctttgtggccaaattttacatttttttgaatttaataaccctgtcgcttatcccctttttgcctgttggacccttaccgttttggcccgcttgggttttccttacaaaggccttttcagcctgtttttcctttggacgcgccctgtta

SEQ ID NO: 45161 - DNA, 577 bp, Zea mays
  Clone ID: MRT4577_141197C.1
gtaccctcggagccggccggggagtacggacgccatctcaccctgctgcggttgttaggagacctgcgccgtccctccgggccgcgagctcgccgaaatggtcgcccacatgtttcatcagtaccaggtggtggctcgcgcgctagccgacctcgaccgatgatcaccccacgatctaccgcatgaagctctgtgccactaacgaggatcgagccaagcccaagttctgctacttgctgggagagctggagaaggtgaagaagatcaatggccagatgctcgccatcaacgagatcttagagcgcaacccagccaccatcaagaactacgggatgtggctgcggtcccagatgaggacggggtaccacaccatgttcatgtagtgccgcgacacgaccctgagcggcgccgtggatcatatgtacaacgagatggcctggcgccgccgcgtggggtgcccctgcgtccatatcatcaagacggggacggtccacttcaggctgtgcaataggggcctctcggggctgctccgcatctcggcgttctagttcccactcgtgtgccgctggtgtggccg

SEQ ID NO: 45162 - DNA, 460 bp, Zea mays
  Clone ID: MRT4577_141198C.1
aaaaaggaaaaccacattgggggtataggggcatttcgggttaaacccccgccttcacttcaaaaagggtaaaagaaggggatagatttccctcatttccccccccggggtggcaggggacccgcccctatgaagccggcatattttttggaaggaaccaaataaccccccccttgccaaaactaagggggggcctctggcccggggggtttagttatcaaaggccctttttccacaaaatttacccctaagccaaactaaaagggcccctcaaacttaaagcgggggggtaagggagcccctttacatgaggggccagcagtctctctccccatggcaacaaaatggggtgagttattactttgctgcggccccaaaatttttaagcatatcacaatgggggggctggtatgacagcccccattggggaccctgcagctcaaccctggaattctggggg

SEQ ID NO: 45163 - DNA, 518 bp, Zea mays
  unsure (1)..(518): unsure at all n locations
  Clone ID: MRT4577_141199C.1
cagagcctttcatagtcattttcacactcccnngctgctatgatcctaattctgaactcagcgcacccattgactagggctatgttccaatattttttaatccttaaccccccacctcctaattgttgtactgaaaacctttccttctttgggactatactgacattctccagtttcggttcaacaaacaacagtaaatgtgcacattgcattaccgatctgaattattactcaaaatctcggatgatcacactttcaaaatcaataaatgcataaacataagttactttacatttactccaattaactataaatggattctttctgatctatattccaaacttattaaacattacaccagctttgaagtattgcccatcttcattgttatacacttctcttcatatgtatcacataaatgactgaaactatttgtactgacttctcttctaatattatgaacaccctctaaaaacactttgcccacactctgttctctctttttcaactttttacca

SEQ ID NO: 45164 - DNA, 266 bp, Zea mays
  Clone ID: MRT4577_14119C.1
ttttgggggatgggcgatctctggcggtctacaacatccagaaggagagcaccctataacttctgctacgtcttaggggtgggatgccaatattggctaagaccctgactggaaaaaccataaccgtgtaggtagaaagctccaacaccattgacaaagtgtaggctatgatccaggacatggagggcatacgatcagaccagcactgattgatcttacgcggcaaacacattgaggatgggcggaccgtactagactacaacatg

SEQ ID NO: 45165 - DNA, 209 bp, Zea mays
  unsure (1)..(209): unsure at all n locations
  Clone ID: MRT4577_1411C.1
gctgaccatcccttngcgtgggtatacaaggccgaccgatcgccttcaacagtggcagctgagcaatggaccccctgacggcattacgcggggtgtgggtacccgggccgtcactgcggcctacgccgtctttgttttcttcttttgccgtcgcggtttccgaagttaatggggtcctttaggtcgttaggttacgactgaccaaaact

SEQ ID NO: 45166 - DNA, 761 bp, Zea mays
  unsure (1)..(761): unsure at all n locations
  Clone ID: MRT4577_141200C.1
gtacgcctgcaggttccggtccggaattcccgggtcgacccacgcgtccgaactacgcctgcccagtgggaagacatcacagggacaacgccactaacatttgtcaatgagtgtgtttcctttacaaccaacgtgtctgccaggttctggctgatagactgtcgacagattcaggagtctgttgcctttgcatcacaagtgtatagagaaattatctgtgtgccatatatggccaaatttgtagtgtttgccaagtcacatgaccccattgaagccaggttgcggtgtttctgtatgacagatgacaaagtagataagacccttgaacaacaagaaaacttctctgaggtggccaggagcagggatgtggaggtattggaaggaaaacctatttatgttgattgttttggcaacctggttccactaaccaagagtggccaacatcatatattcagcttttttgccttcaaagaaaatagacttcctctctttgtcaaggttcgtgacacaacccaggaaccttgcgggcgactctcatttatgaaggaacccaaatccacaagaggactggtgcatcaagctatttgcaacttaaacatcaccctgccaatttatgccaaggaatcggagtcagatcaagagccgnaggaagagatcggtatgacatccgaaaaaaatccccaagatgagcaggagcggatggaagaaaggctggcttacatcgctgatcaccttggcttcagctggacagaattagcaag

SEQ ID NO: 45167 - DNA, 227 bp, Zea mays
  unsure (1)..(227): unsure at all n locations
  Clone ID: MRT4577_141201C.1
gcttccacacagcatacgagcgggagtccatggtgtcagtcagcgtataaaggcatgtctacggacggtataatgtacgttntcagaatgtcaaccttggggcaggcatggataccaccttctggagattaaaggatgaagatcttctcccaagtaaatattttgaggttgactttccaatgattgtcacgagaaagctgcacagtatcaaatgcaagcctccccta

SEQ ID NO: 45168 - DNA, 673 bp, Zea mays
  Clone ID: MRT4577_141202C.1
gccggccgggttccggacccccacgccccaccccaccaaactatggcgccggcggcgacttccacagcctctgcgccctcctccttccactccaccggtaggcatagggccagggtcggggcccggccatcgctcgtctctctccgcgtcagagcagccaatcccaacgttaccgccgatcccgcaccggccttccagtccgtcacggccttcgcgccagccaccgtcgccaacctcggcccgggcttcgacttcctcggatgcgccgtcgccgacgcctccctctccctgggtgacaccgtcaccgcaaccctggacccgtcactcccgcccgccaccgttttcatctcctccgccacatccccgtcccgccccaacctcgccgagcgcctctctagggacccgctccgcaactgcgcgggcgtcgccgccatcgccgcgctccgcgccctcggcgtccgctcccacgccgtgtccatccaagctcaaggcgacagcaaccgtcgcgcagctcgatacccttggtgccagggtcatcgccacgtcatccttgaactaacaaaagattcggaaagtggtactgcaattgtatcaccaaaccaggaagaatgaagggggaccccatggatttggatgctttcccttctttcatgcatcttttaggggtaaattg

SEQ ID NO: 45169 - DNA, 1910 bp, Zea mays
  Clone ID: MRT4577_141203C.1
tcgaggccggccgggctggggcctggggcgccgaggacggcggcggcgaggagcgtccgccgcggcgacaacgcttcgtattccgcatcgcagtttgttgaccggattggctggatgggccgaaccaggtcaagtggagatggagagagtcctggtgtggtgcgggccgcaagtgtgagtgagacgtcaccatcgaatcccaccacaaaagctcctttcgtcacaccggccagcacccagcttctcctctcctcacccccacgccccaccccaccaaacaatggcgccggcggcgacttccacagcctctgcgccctcctccttccactccaccggtaggcatagggccagggtcggggcccggccatcgctcgtctctctccgcgtcagagcagccaatcccaacgttaccgccgatcccgcaccggccttccagtccgtcacggccttcgcgccagccaccgtcgccaacctcggcccgggcttcgacttcctcggatgcgccgtcgccgacgcctccctctccctgggtgacaccgtcaccgcaaccctggacccgtcactcccgcccgccaccgtctccatcgcctccgtcacatccccgtcccgccccaacctcgccgagcgcctctctagggacccgctccgcaactgcgcgggcgtcgccgccatcgccgcgctccgcgccctcggcgtccgctcccacgccgtgtccatccacctcaccaagggcctgccgctcggctcggggctcggctcctccgcggcctccgccgccgccgccgccaaggccgtcgacgccctcttcggctcgcgcctcggccgcgacgacctcgtcctcgcggggctcgagtcggagaaggccgtcagcggcttccacgccgacaacatcgcccccgccatcctcggcggcttcgtcctcgtccgcagctacgacccctttcacctcgtcccgctttccttcccgccagcgctccgcctccacttcgtcctggtcacccccgacttcgaggcgcccacgagcaagatgcgcgccgcgctgcccaggcaggtcgacgtccagcagcacgtgcgcaactccagccaggcagcggcgctcgtggcggcggtgctgcagggggacgcgggcctcatcggctccgcgatgtcgtccgacggcatcgtggagcccaccagggcacccctcatacctggcatggcggccgtaaaggcggcggccctgcaagctggagcgctgggctgcacaattagcggcgcgggccccacagtggtggccgtcatccaaggggaggaaaggggggaggaggttgcccgcaggatggtggacgcgttctggagcgcaggcaagctcaaggcgacagcaaccgtcgcgcagctcgatacccttggtgccagggtcatcgccacgtcatccttgaactagcaaaagattcggaaagtggtactgcaattgtatcaccaaacaaggaagaatgaaggggaaccccatggatttgtatgttttctcttctttcttgcatctttaggtggttaattggctttggaataagtgagatggaggacatcgctagaacaattctgttccctgggctgtaatttcaatttgggctggtttcttcatcatgccatggataattatgaataaatttgaggtagtttgttacctgtcgtcctcgacccatgggcaatgatgatcatcaggctctcacctccgacggcagcgtctgcttcaccttcaaaatggagcacctcctaaatggtgtttggttgcgggacggctaggacagggacgttccctggcgtcctctctcgtccctctaattttgagggacaacactggaatagttttgtcctaaccttttacccagaaccaaacaacctaatttgaggatcgtccatcccgtactatc

SEQ ID NO: 45170 - DNA, 809 bp, Zea mays
  Clone ID: MRT4577_141204C.1
gccggccggttcgggcgacacgactctcggcaacggatatctcggctctcgcatcgatgaagaacgtagcaaaatgcgatacctggtgtgaattgcagaatcccgcgaaccatcgagtttttgaacgcaagttgcgcccgaagccttctggcggagggcacgtctgcctgggcgtcacgccatacctcgggcccggccgggccggacagccccgccgccgcaacatcccgagtcgctcgtcagatcctccagcaacacagcaccttcgccgccgccgccatgggtaaggttcacggatcgctggcccgcgctgggaaggtgcgcgggcagacgcccaaggttgcaaagcaggacaagaagaagaagccccgcggccgcgctcacaagcgcatgcaatacaaccgccgcttcgtcaccgccgttgttggattcggcaagaagcgcggccccaactcatcggagaagtagatctagctatggctttgtgttttattccccactagtttcctcactgatggcaacttgctgaagacttatgctattatctgtatcgatgttactgcaatactgttaagtaggatatatgcatcgtttagttgatcaagttgcctgtggtggtgatccttttagtttgtctggaatgttggaaacatgtttgtgtcgtgctgtgttcgttttgttttgaaactggtaacatgtttgagtctaaatgccggtctattctgtttcagattgtcctgctgcttgatttttaaatttgatgatagtggaactgttttgtggggaaaaaaaaaaaaaaaaagccccta

SEQ ID NO: 45171 - DNA, 347 bp, Zea mays
  unsure (1)..(347): unsure at all n locations
  Clone ID: MRT4577_141205C.1
taaatacatgggggggcgtgtttagagggtgtgggttgggtgatggggttgggttaagtatggtaatggttgtatggtgtgtgatgttggtattttgttttttttttgngggatataaagggttgtttgggggatgtggggggaggttgtgttgnagtaatgtgtgggttaacttagattaattgaagatagtattagtggtgtgtaatggtaaggataatgtgttgtgataggatgcttgaatagaatagtggatctgggtgtggggtagttggttggaggattgtagggctgtaaatgtttttgggttggtgggtttttgagttggggttgtggtatggaggaag

SEQ ID NO: 45172 - DNA, 579 bp, Zea mays
  Clone ID: MRT4577_141206C.1
aattcggcacgagggtgcgttacatattctccctcttctccctggcaactgcttccgtcatctccaccatcgtccccacgttctcctccctccgcctctcgctctgcgcacatcccatgcccacgccgagcgcttgagcggttgagcctcaccacccccgtcgcagccgcggccgtggcggcgtcgacgacctcccccgactttctcgccgtgggcgccgtcctggggaagcccacaatgctcgtgggtagtggccgagaagatcttccctcgctgtcccgttctctcgcctccccaccatcggcgtcgaggtctactactttctcgttggctagggcgagcagtgctccagcacctgtcaccatcaccgacatcagcctcgccgcagacgacaagaccgacgagctgttcgccaaaatctgcctcaggctaggccccccatactggcttgttgagttagcttcactcttgggggctgagactctcggcgtcggggaacgcattgggaccgacccgatccatcctcttggggaggcggcactctctgcacgggtgcatcagtagactagagagagaaac

SEQ ID NO: 45173 - DNA, 378 bp, Zea mays
  unsure (1)..(378): unsure at all n locations
  Clone ID: MRT4577_141207C.1
cgtcccgcacctgtgctgggaatttnngcttgtccgtgcctagaaaaaaacggtgcctcgcccatttgnngttggaaattctgtcnngaaaatgaagcccagcccatcaatcagnattacccatacnnntgctatatncnnattgcctggcnntttctgtnngcagcccacagnaaaccatacgtctnngtagccagcnnnagtggccactttggcactnnnggggcgcacaagnatgnnaccggnacccgatgcgcctgcccacgcccaagnncgaacagnnaagaaaaaaaaaaaatnnctctgaggggttgtgtnntgagaatgcannactagcaacccacggggnaaccaagncnngaaaatnngcaacaaccc

SEQ ID NO: 45174 - DNA, 285 bp, Zea mays
  Clone ID: MRT4577_141208C.1
tgctgcaccctcgactgatcggtcagggaaggagatacaatgacgtagcggacaattctggtgtgctggtggctcctggaataggcaaaaaaggagaaaatgggagaacagaagtagcgctgcggcagtttgtcagtgctcttagtaagtgcggaatatacctacgtagctctagttccctagcttatcctctagtggagttgccttgcagatgttagaaaaaatggaaaattgaagggagttacaaaagcggaggcctgagtgtgaatgctgttactaggctct

SEQ ID NO: 45175 - DNA, 669 bp, Zea mays
  Clone ID: MRT4577_141209C.1
cattgggaccctcgaggccggccgggaccctatccctccatctaaggacgctagcgaacacacaaacaatgtcatgttcaatgactagatatgagcagctaacaaatggagcacttgccctgcataaagaccgctcgctagtcctcacaatagatggcaccggcccgtgcatgacaagagcctctacagctgctggctcgagaagtccctgacggcaacgcatcaaggtcagctgcggcaaggcgacgacactcggggagtcgggcctcatctaccgcgagaacagcacggtcaccgcatcctgggagtgctgcttcgtccgagaggtctctcaagaacttgaccacgaagaacttgaacaagcaggacgcgtgaaattggctccagagtgagagcagccaacatcgaccacagcgtctatgagctgaggaacttcaacattgctgacaacgagggcgagcaagaagattagactgcattgcacattgctgataaccagggagaggaagaagattagactgcattgcacttatatctcaggcatgaactcattggatactgatacttgtacccgcagttttgcaaatgcccccatgatatgctctggggaattttggatgattcatttatttgaaaaatctttctaaaaaaaaaaaagaaaaagcggcc

SEQ ID NO: 45176 - DNA, 994 bp, Zea mays
  Clone ID: MRT4577_14120C.1
atggaatcctcgggtccgtccggccacgcaagcggcggcaccaccattcatctacgaatccatgggaggagattggagtggggccagctaacggatcggagtcggagtccttcttgtgcttctcctgctctgctggtgccgctgccatgggtttccccagcacccccaacctgaagctggagcctcgccctcgcacgcggaggctcctgcgctgcgccctcagctctgagcctgtgcctcccatgactgtttccatcactggagccacaggtttcattggacgcagattggttcacaagcttctatcggatgatcacaaggtttgcatcttaacaaggtctgcctccaaggctgcgtcagtttttcctgcttccacctatcctggactcacaatagcccagcaaggggattgggaggcatgcgtcagaggctccactgctgttgtcaacctggcaggcatgcccataagcactagatggtcacccgagattaagcaggaaatcaaacagagccgggtcaatgttacatcaaaggtgtgcagagaatgggaggccacggcatgccaagtaaaccaggaggatgttaggcttgtacttctccggattggggttgttcttggcaaggacggcggtgctctaggttgctgtgtttcatttaattccttttctcccctcttgtccttttattttccttcctcaagagaaggaccattccaatttacgctgcttattcacctggttcatctgtccatctgcagcaaagatgatacccctttttatgatgtttgctggtggtcctctggggacgggacgccaatggttgcttctctctcttgtgctacagacttatagtatacgctgggatcctagtcattctgttttcagacagatgggatttgatcgttagtacattcaacttcagcatattgtaccaattaattgattatctgattgctaggttttcttggattcatctggatgacctagtcaacctc

SEQ ID NO: 45177 - DNA, 132 bp, Zea mays
  Clone ID: MRT4577_141210C.1
gcgaggggcagaccagcttctcttgacctccccaaatctggacgcctgagggggcatcacgccccgcctcctcacagcttagggcctaacttgcattcagaagttatcggtttctgttccttaatcttaggg

SEQ ID NO: 45178 - DNA, 322 bp, Zea mays
  Clone ID: MRT4577_141211C.1
cacacatttactgctaaccgcatctcacacacaggctgggtgggcttgttgcgcaacgagctttgcctcactttacccgcctcggagccatggctaagctcgcgctggcgctcctcctcctgctggccgaggctgcctccgcagttgtcagcagtgctagccacctggatctcgacctgggcttactgtactctggtgaacgcccgagggagagccgtggaacggtggccgagtgcctcgcctaggagtctgatgaggagggccttgatctggctggatcccaccgtcgtgcgctctacggctgtaggtacattagctacgg

SEQ ID NO: 45179 - DNA, 578 bp, Zea mays
  Clone ID: MRT4577_141212C.1
actcatagttttatatacttaaaaaacccatagctatgcatagtacagactgtggaggatcttaagttaggtgagcgcagccggcatgttgtctcttgttcttttgttttttgagtcgctcctctgtcctttcttttggaaaaaataatttttgcacattttttgcttacagttactagtctgaattttttatttaagcatatttttcttttttagattcaaatcttgaaataccagttttttttttttgtgtctcgatcaaaactagctatactatctataaataaataaataaataaataacatgtatttaaggataatcttttttacgtgttttataagtacgtttaaatatagaataaacaagtaattaaagagctaaaacatgtgatggctttataatgaagaaagagtcgattaaaagtataaaatgatgtgtattcctcggtttaaagataattgtgtcatatatttatttcgataattatgtgatcatcattctacaaaaaggttgaaatcactttaacaattaaaataagtaggcatggttataatatattgtgggcgtggcccttgtg

SEQ ID NO: 45180 - DNA, 272 bp, Zea mays
  Clone ID: MRT4577_141213C.1
ccaaaagaacttaccattatccaattatgtgaacagcttcactgaccagggttaagatgctgcagatgtcttgtttctgtagggcggcttctcagggctgcttcagggaggtaaggatgcagtgcacgtgggagacatctgtggcctgctccctgggcttagggtaaagtcgcacagctgtgcacccactttgggacactcattagtgtcctcacaatggctgtgctgcccagccatttgcctccgctttctgtactgctcactgtctcacg

SEQ ID NO: 45181 - DNA, 660 bp, Zea mays
  Clone ID: MRT4577_141214C.1
cccactctgtgcgcccacgcgtccgcaccacatcgtgcggttagtttggtttgctgctagtttacacataatgaggcttgatgattgccttgctgaacttcactatctcttgaaagaagagagactagatgtagcttgattgttgatttttgcaaataagcaagacatgcactgagctataaaaccaactggaatcgctaagagtcactctcagacagctcatcaacggttggttctactgccagtacacaacgtttaagaagcgctccacggacttgcacaggcgcactgccaatctactccacagtctacaggacacggctatacccaagagacatgtcttcgatgaagagcagtgtagagatgataaaggtatctggactgttccaaagcacaagtctgcatccaaagcctgttccacaaaagttattaagacttaaacactatgctgaatgaatatctttactttattcacaacacacctgagatggactgagcttggacagctaaccattttattgagaatgatgaggcataaactacagacaatgctactttaaattatttgcagcagaatatgcttattatgacaagccacatgatccaacgacttcttcctgctataccaccgaccattatgagaggacaagctgtgtctac

SEQ ID NO: 45182 - DNA, 193 bp, Zea mays
  Clone ID: MRT4577_141215C.1
acggactcactcaagccctacctccatctatgactacgatccctctagacgataaaacgttccggtctcacgcatgcctcgtgctaatattcctatactttctgctacattctcaacacataaattcctacaacagccccgtctctcgacactaccatactgatcaccaactatctagcacttatgacccata

SEQ ID NO: 45183 - DNA, 619 bp, Zea mays
  Clone ID: MRT4577_141216C.1
actggctttttttttttttttttttgaggaaactgcggtatttttcatcacagaagatcacaaaatgaattactctgtaggttactgtttcagctcatgggccttttgcgggacgtcggccgctacatgatccatgtatttttggtgggccgccagctgcagcagccccagcagtcagtttcagttcaacgctgcctcctggtgctgctgcacgtacgcgacgcccttgtcgatgctggccttgagcgtgggcttgagggcctccagcgcgcgcgcctcgtagtcggtgagcgccctgagctcggagcccatcacctcctccacgccgtccctcccgagcctcaccctgcacgcgaagaacgggagctccggcaccacctgcgactgcacgtacgcgcactcgtacacgtcgccgtggccgtcgaggccgcgcagggacgcctcgaggaaccgcgcggcggcgtacgccatcgacagcgtggcggacccgccggcgccggcgtcgcggaccctggccgtgagctcctccacctcatcgtccgtgaacgccgccttgggccgcgccttggacagcagcggcaggatggtggccgccgcgtggccgcccaccaccggcacg

SEQ ID NO: 45184 - DNA, 633 bp, Zea mays
  Clone ID: MRT4577_141217C.1
cttctctctctccccccactctttgcccaacccccctactgccggcggcggagacgacggaaacatggtgcagcgcctgacctaccggaagaggcacagctatgccaccaagtccaaccagacgcgggtcgtcaagaccccaggtggtaagctagtgtaccagtacaccaagaagagggcgagcggccccaagtgccctgtgaccgggaagaagatccaggggattccccacctcaggcctactgaatacaaaagatcaaggttgtctaggaaccgcaggactgtgaaccgtccctatggtggagtgctctctggaactgcagtgagggaaaggatcatccgcgctttcttggttgaggagcagaagatcgtgaagaaggtgttgaaaatacagaagaccaaggacaagacgacctcaaagtaatctgtttgaaacagaagtgcgaagtgcgatggtgttctgtaaacaaggaaaatatttttgttggtggttatgatcaatggtttagtcccttctagctaaatgttttagagtacttgaaatccttctgccgccgtgacatcagagattgtgaaacatttgatacccatttgcagtttcatttctgaatgcatgttgaatctacttatgtg

SEQ ID NO: 45185 - DNA, 3814 bp, Zea mays
  Clone ID: MRT4577_141218C.1
cacagctcatataccaagagccggagcagcttagcgcagcccagagcggcgccgcgccaagcacaacccccacccgccacagccgcgtgcgcatgtgagcggtcgccgcggccgggagaccagaggaggggaggactacgtgcatttcgctgtgccgccgccgcggggttcgtgcgcgagcgagatccggcggggcggggcggggggcctgagatggaggctagcgcggggctggtggccggctcgcataaccggaacgagctggtggtgatccgccgcgaccgcgagtcgggagccgcgggcggcggcgcggcgcgccgggcggaggcgccgtgccagatatgcggcgacgaggtcggggtgggcttcgacggggagcccttcgtggcgtgcaacgagtgcgccttccccgtctgccgcgcctgctacgagtacgagcgccgcgagggctcgcaggcgtgcccgcagtgcaggacccgctacaagcgcctcaagggctgcccgcgggtggccggcgacgaggaggaggacggcgtcgacgacctggagggcgagttcggcctgcaggacggcgccggccacgaggacgacccgcagtacgtcgccgagtccatgctgcgggcgcagatgagctacggccgcggcggcgacgcgcacccggacttcaaccccgtccccaacgtgccgctcctcaccaacggccagatggttgatgacatcccgccggagcagcacgcgctcgtgccgtcctacatgagcggcggcggcggcgggggcaagaggatccacccgctccctttcgcagatcccaaccttccagtgcaaccgagatccatggacccgtccaaggatctggccgcctacggatatggcagcgtggcctggaaggagagaatggagggctggaagcagaagcaggagcgcctgcagcatgtcaggagcgagggtggcggtgattgggatggcgacgatgcagatctgccactaatggatgaagctaggcagccattgtccagaaaagtccctatatcatcaagccgaattaatccctacaggatgattatcgttatccggttggtggttttgggtttcttcttccactaccgagtgatgcatccggcgaaagatgcatttgcattgtggctcatatctgtaatctgtgaaatctggtttgcgatgtcctggattcttgatcagttcccaaagtggcttccaatcgagagagagacttacctggaccgtttgtcactaaggtttgacaaggaaggtcaaccctctcagcttgctccaatcgacttctttgtcagtacggttgatcccacaaaggaacctcccttggtcacagcgaacactgtcctttccatcctttctgtggattatccggttgagaaggtctcctgctatgtttctgatgatggtgctgcaatgcttacgtttgaagcattgtctgaaacatctgaatttgcaaagaaatgggttcctttcagcaaaaagtttaatatcgagcctcgtgctcctgagtggtacttccaacagaagatagactacctgaaagacaaggttgctgcttcatttgttagggagaggagggcgatgaagagagaatacgaggaattcaaggtaaggatcaatgccttggttgcaaaagcccaaaaggttcctgaggaaggatggacaatgcaagatggaagcccctggcctggaaacaacgtacgcgatcatcctggaatgattcaggtattccttggccaaagtggcggtcgtgatgtggaaggaaatgagttgcctcgcctggtttatgtctcgagagaaaagaggccaggttataaccatcacaagaaggctggtgccatgaatgcactggtccgtgtctctgctgtcttatcaaatgctgcatacctattgaacttggactgtgatcactacatcaacaatagcaaggccataaaagaggctatgtgtttcatgatggatcctttggtggggaagaaagtgtgctatgtacagttccctcagaggtttgatggtattgacaaaaatgatcgatacgctaacaggaacgttgtcttttttgacatcaacatgaaaggtttggacggtattcaaggacccatttatgtgggtactggatgtgttttcagacggcaggcactgtatggttatgatgctcctaaaacgaagaagccaccatcaagaacttgcaactgctggcccaagtggtgcctctcttgctgctgcagcaggaacaagaataaaaagaagactacaaaaccaaagacggagaagaagaaaagattatttttcaagaaagcagaaaacccatctcctgcatatgctttgggtgaaattgatgaaggtgctccaggtgctgatatcgagaaggccggaatcgtaaatcaacagaaactagagaagaaatttgggcagtcttctgtttttgtcgcatcaacacttcttgagaacggagggaccctgaagagcgcaagtccagcttctcttctgaaggaagctatacatgttatcagctgcggctacgaagacaagaccgactggggaaaagagattggctggatttacggatcgatcacagaggatatcttgactggatttaagatgcactgccatggctggcggtctatttactgcatcccgaagcggcctgcattcaaaggttctgcgcctctgaacctttccgaccgtcttcaccaggtccttcgctgggcccttgggtccgtcgaaattttcttcagcaagcactgcccactttggtacggatacggcggcgggctaaaattcctggaaaggttttcttatatcaactccatcgtttatccctggacgtccattcctctcctggcttactgtaccttgcctgccatctgcctgctcacggggaagtttatcacaccagagcttaccaatgtcgccagtatctggttcatggcacttttcatctgcatctccgtgaccggcatcctggaaatgaggtggagtggcgtggccatcgacgactggtggaggaacgagcagttctgggtcatcggaggcgtttcggcgcatctgttcgcggtgttccagggcctgctgaaggtgttcgccggcatcgacacgagcttcaccgtgacgtcgaaggccggggacgacgaggagttctcggagctgtacacgttcaagtggaccaccctgctgatacccccgaccacgctcctcctgctgaacttcatcggggtggtggccgggatctcgaacgcgatcaacaacgggtacgagtcgtggggccccctgttcgggaagctcttcttcgccttctgggtgatcgtccacctgtacccgttcctcaagggtctggtggggaggcagaacaggacgccgacgatcgtcatcgtctggtccatcctgctggcctcgatcttctcgctcctgtgggtccgcgtcgacccgttcctcgccaagagcaacggcccgctcctggaggagtgtggcctggactgcaactgaagtgggggccccctgtcactcgaagttctgtcacgggcgaattacgcctgattttttgttgttgttgttgttgttggaattctttgctgtagatagaaaccacatgtccacggcatctctgctgtgtccattggagcaggagagaggtgcctgctgctgtttgttgagtaaattaaaagtttttaagttatacagtgatgcacattccagtgcccagtgtattccctttttacagttgtatattagcgacaaaggacagattggttaggagtttgattcttttgtaaaaaaaaaaaaaaaaaaaaaaaaaaaaaaa

SEQ ID NO: 45186 - DNA, 166 bp, Zea mays
  Clone ID: MRT4577_141219C.1
cctgattcggctcgagcggcgtgctgttccgcagccgcggagcgagggacgccttccaccaggtcctcaacgggctggcgcgcaagccgccccaccccaaggacgtcttcctcaagcccggccagaaggtgctcaactggacagagggcgcccaggatgacctcaa

SEQ ID NO: 45187 - DNA, 172 bp, Zea mays
  Clone ID: MRT4577_14121C.1
gatttggtactttcgacttgagtggttattaacaaaaggggagcctggtatttgggtggcaggatggcttttttggggttattaatgaaccaaaacgggggccccctgcttccaaacccaaggttccagaccccggggacttaagggaaggaaaaaggcaaaaaacctggtc

SEQ ID NO: 45188 - DNA, 347 bp, Zea mays
  Clone ID: MRT4577_141220C.1
ttttttttttttttttttttttttttttttttttttggtttttttttttttaaccggagtatgcgtatgtatgacacactggaatacaaaaggttacatggttgcatggcagcaaccagcaagcccaaaagaaaactgttccatatttcttttatttccagttaagaattaagggcgcaaaaatttgcgaaaaattaaaaactgagtttggttagttaccccaaacccaaacctgggcagaaacgaaatacctgaagattggacaaggatttgccgaacaaaatggtgaaataaacccacgagagggacaaatgttttgacggggcttgtttccttagccaaggaat

SEQ ID NO: 45189 - DNA, 1799 bp, Zea mays
  Clone ID: MRT4577_141221C.1
gcaaaaccaaagacggagaagaagaaaagattatttttcaagaaagcagaaaacccatctcctgcatatgckttgggtgaaattgatgaaggtgctccaggtgctgatatcgagaaggctggaatcgtaaatcaacagaaactagagaagaaatttgggcagtcttctgtttttgtcgcatcaacacttctcgagaacggagggaccctgaagagcgcaagtccagcttctcttctgaaggaagcbatacatgttatcagckgcgcgctacgaagacaagaccgactggggaaaagaggtctatataccatataacctgactcaaaaggcttccgactaactctactagagatgtattgtactaagtagaccaccggttccttgcagattggctggatttacggatcgatcacagaggatatcttgactggatttaagatgcactgccatggctggcggtctatttactgcatcccgaagcggcctgcattcaaaggttctgcgcctctgaacctttccgaccgtcttcaccaggtccttcgctgggcccttgggtctgtcgaaattttcttcagcaagcactgcccactttggtacggatacggcggcgggctaaaattcctggaaaggttttcttacattaactccatcgtttatccctggacgtccattcctctcctggcttactgtaccttgcctgccatctgcctgctcacggggaagtttatcacaccagagcttaccaatgtcgccagtatctggttcatggcacttttcatctgcatctccgtgaccggcatcctggaaatgaggtggagtggcgtggccatcgacgactggtggaggaacgagcagttctgggtcatcggaggcgtttccgcgcatctcttcgcggtgttccagggcctgctgaaggtgttcgccggcatcgacacgagcttcaccgtgacgtcgaaggccggggacgacgaggagttctcggagctgtacacgttcaagtggaccaccctgctgatacccccgaccacgctcctcctgctgaacttcatcggggtggtggccgggatctcgaacgcgatcaacaacgggtacgagtcgtggggccccctgttcgggaagctcttcttcgccttctgggtgatcgtccacctgtacccgttcctcaagggtctggtggggaggcagaacaggacgccgacgatcgtcatcgtctggtccatcctgctggcctcgatcttctcgctcctgtgggtccgcgtcgacccgttcctcgccaagagcaacggcccgctcctggaggagtgtggcctggactgcaactgaagtgggggccccctgtcactcgaagttctgtcacgggcgaattacgcctgatttttttttgttgttgttgttggaattctttgctgtagatagaaaccacatgtccacggcatctctgctgtgtccattggagcaggagagaggtgcctgctgctgtttgttgagtaaattaaaagttttaaagttatacagtgatgcacattccagtgcccagtgtattccctttttacagtctgtatattagcgacaaaggacatattggttaggagtttgattcttttgtagcaatgtgtcccgcccccccactgttgttgtaaaatccgcccattcgcccagaaccgcggtgggcggcgctgctagctttgtgatcatatagaaaacgacttggttgtttttggacattttgaattgaaggaaggatgaagaaggtaggaaaaaaaaaaaaaaaaaaaaaaaagaaaaaaaaaaaaaaaaaa

SEQ ID NO: 45190 - DNA, 290 bp, Zea mays
  Clone ID: MRT4577_141222C.1
ctctctctcttctcctctcttctctaactctgcctctctgacgcaatgccgttccccaccgccttcaccgcgcggcggcggcggcacgagggcgccgcgggtcgttggtgcgggctcgtggtcctggttctgatggcgctcgaggctggcgcggcggcggagacgtcgccgtcggacgtggcggcgatgcgggctgtggcgaaggcgcttggcgcggacaagacgctgggatgggacgtcgccggcgacccctgctcgccgaagcggagggacggggtgtcatgccactt

SEQ ID NO: 45191 - DNA, 1748 bp, Zea mays
  Clone ID: MRT4577_141223C.1
ctgcatatgctttgggtgaaattgaggaaggcgctccaggtgttgtcaacctttcaaacatagcttacaacagcaccgttagagttcaaaggcatattcttagatataaaaaaccaggacagttcttctgttaatccatttcatgttgacttcactacctgttgtgtaaatggatgaaagcatttctgtttctatttgacacttgtgaataacattgcactgttctccaggtgcagatattgagaaggctggaattgtaaatcaacagaaactagaaaagaaatttgggcagtcttctgtttttgttgcatcgacacttcttgagaatggtgggaccctgaagagcgcaagcccagcttctcttctaaaggaagctatacatgttatcagctgcggctatgaagacaagactgactggggaaaagaggtctatataccatatataacctgattcaaagacttctgactgttctatttaaataaagatatattgtactaagtggatcgtggtttgttgcagatcggctggatctatggatcaattacggaggatatcttgactggatttaagatgcactgccatggttggcggtctatttactgcatcccgaagcggcctgcattcaaaggttccgcacctcttaacctttcggaccgtcttcaccaggtccttcgttgggctcttgggtctgtggaaatcttcttcagcaagcactgcccactctggtacggatatggcggcgggctaaaatttctggagaggttttcttatatcaactctatcgtatatccctggacatccattcctctcttggcttactgtaccttgccagccatctgccgccgattttttttgtttccccccgaactgcagcttaccaatgtggccagtatctggttcatggcgcttttcatctgcatctcagtgaccggcatcctggaaatgagatggagcggcgtggccatcgacgactggtggagaaacgagcagttctgggtcatcgggggcgtttccgcgcacctcttcgcggtgttccaaggccttctcaaggtcctcgctggcatcgacacgagcttcacggtgacatccaagggcggggacgacgaggagttctcggagctgtacacgttcaaatggaccaccctgttgataccaccgaccacccttctcctgctgaacttcatcggggtggtggctgggatctcgaacgcgatcaacaacgggtacgagtcgtggggccccctcttcgggaagctcttcttcgcgttctgggtgatcgtccacctgtacccgttcctcaagggcctggtgggaaggcagaacaggacgccgacgatcgtcatcgtctggtcgatcctgctcgcctccatcttctcgctcctgtgggtccgcgtcgacccgttccttgccaagagcgacggccctctcctggaggagtgtggtctggactgcaactgaagaggcagaattatgcctggttttttttttttttttttggaattcttttttctgtagatagaaacacagatccccggcattttcctttgtgtccatggtggcgaggcagtgagtacatcccttgggcgaatcatgccctgctgctgctggtggagtggtggtggtgagttgaatggaatctgtcagttgtgcaagttgatctgccagccgccgggggccgagaaatgtgcctgatgtttcttagtaaattataaagctttaagttatagagtcatgcacgttccagagt

SEQ ID NO: 45192 - DNA, 3987 bp, Zea mays
  Clone ID: MRT4577_141224C.1
aattcggcacgaggcagccgtgtgcgcatgtgagcggtcgccgcggccgggagaccagaggaggggaggactacgtgcattttgctgtgccgccgccgcggggttcgtgcgcgagcgagatccggcggggcggggcggggggcctgagatggaggctagcgcggggctggtggccggctcgcataaccggaacgagctggtggtgatccgccgcgaccgcgagtcgggagccgcgggcggcggcgcggcgcgccgggcggaggcgccgtgccagatatgcggcgacgaggtcggggtgggcttcgacggggagcccttcgtggcgtgcaacgagtgcgccttccccgtctgccgcgcctgctacgagtacgagcgccgcgagggctcgcaggcgtgcccgcagtgcaggacccgctacaagcgcctcaagggctgcccgcgggtggccggcgacgaggaggaggacggcgtcgacgacctggagggcgagttcggcctgcaggacggcgccgcccacgaggacgacccgcagtacgtcgccgagtccatgctcagggcgcagatgagctacggccgcggcggcgacgcgcaccccggcttcagccccgtccccaacgtgccgctcctcaccaacggccagatggttgatgacatcccgccggagcagcacgcgctcgtgccgtcctacatgagcggcggcggcggcgggggcaagaggatccacccgctccctttcgcagatcccaaccttccagtgcaaccgagatccatggacccgtccaaggatctggccgcctacggatatggcagcgtggcctggaaggagagaatggagggctggaagcagaagcaggagcgcctgcagcatgtcaggagcgagggtggcggtgattgggatggcgacgatgcagatctgccactaatggatgaagctaggcagccattgtccagaaaagtccctatatcatcaagccgaattaatccctacaggatgattatcgttatccggttggtggttttgggtttcttcttccactaccgagtgatgcatccggcgaaagatgcatttgcattgtggctcatatctgtaatctgtgaaatctggtttgcgatgtcctggattcttgatcagttcccaaagtggcttccaatcgagagagagacttacctggaccgtttgtcactaaggtttgacaaggaaggtcaaccctctcagcttgctccaatcgacttctttgtcagtacggttgatcccacaaaggaacctcccttggtcacagcgaacactgtcctttccatcctttctgtggattatccggttgagaaggtctcctgctatgtttctgatgatggtgctgcaatgcttacgtttgaagcattgtctgaaacatctgaatttgcaaagaaatgggttcctttcagcaaaaagtttaatatcgagcctcgtgctcctgagtggtacttccaacagaagatagactacctgaaagacaaggttgctgcttcatttgttagggagaggagggcgatgaagagagaatacgaggaattcaaggtaaggatcaatgccttggttgcaaaagcccaaaaggttcctgaggaaggatggacaatgcaagatggaagcccctggcctggaaacaacgtacgcgatcatcctggaatgattcaggtattccttggccaaagtggcggtcgtgatgtggaaggaaatgagttgcctcgcctggtttatgtctcgagagaaaagaggccaggttataaccatcacaagaaggctggtgccatgaatgcactggtccgtgtctctgctgtcttatcaaatgctgcatacctattgaacttggactgtgatcactacatcaacaatagcaaggccataaaagaggctatgtgtttcatgatggatcctttggtggggaagaaagtgtgctatgtacagttccctcagaggtttgatggtattgacaaaaatgatcgatacgctaacaggaacgttgtcttttttgacatcaacatgaaaggtttggacggtattcaaggacccatttatgtgggtactggatgtgttttcagacggcaggcactgtatggttatgatgctcctaaaacgaagaagccaccatcaagaacttgcaactgctggcccaagtggtgcctctcttgctgctgcagcaggaacaagaataaaaagaagactacaaaaccaaagacggagaagaagaaaagattatttttcaagaaagcagaaaacccatctcctgcatatgctttgggtgaaattgatgaaggtgctccaggtgctgatatcgagaaggccggaatcgtaaatcaacagaaactagagaagaaatttgggcagtcttctgtttttgtcgcatcaacacttcttgagaacggagggaccctgaagagcgcaagtccagcttctcttctgaaggaagctatacatgttatcagctgcggctacgaagacaagaccgactggggaaaagagattggctggatttacggatcgatcacagaggatatcttgactggatttaagatgcactgccatggctggcggtctatttactgcatcccgaagcggcctgcattcaaaggttctgcgcctctgaacctttccgaccgtcttcaccaggtccttcgctgggcccttgggtccgtcgaaattttcttcagcaagcactgcccactttggtacggatacggcggcgggctaaaattcctggaaaggttttcttatatcaactccatcgtttatccctggacgtccattcctctcctggcttactgtaccttgcctgccatctgcctgctcacggggaagtttatcacaccagagcttaccaatgtcgccagtatctggttcatggcacttttcatctgcatctccgtgaccggcatcctggaaatgaggtggagtggcgtggccatcgacgactggtggaggaacgagcagttctgggtcatcggaggcgtttcggcgcatctgttcgcggtgttccagggcctgctgaaggtgttcgccggcatcgacacgagcttcaccgtgacgtcgaaggccggggacgacgaggagttctcggagctgtacacgttcaagtggaccaccctgctgatacccccgaccacgctcctcctgctgaacttcatcggggtggtggccgggatctcgaacgcgatcaacaacgggtacgagtcgtggggccccctgttcgggaagctcttcttcgccttctgggtgatcgtccacctgtacccgttcctcaagggtctggtggggaggcagaacaggacgccgacgatcgtcatcgtctggtccatcctgctggcctcgatcttctcgctcctgtgggtccgcgtcgacccgttcctcgccaagagcaacggcccgctcctggaggagtgtggcctggactgcaactgaagtgggggccccctgtcactcgaagttctgtcacgggcgaattacgcctgattttttgttgttgttgttgttggaattctttcctgtagatagaaaccacatgtccccggcatctctgctgtgtccatggcatctctgcgttttttttgaaccgaagacagtccatgtctgatgctcctgctgctggttggtggtggtggtggcaaggcaggcagggattgatattgatctgcaagccactggagcaggagagagaggtgcctgctgctgtttgttgagtaaattaaaaagttttaaagttatacagtgatgcacattccagagtatggccagtgtattccctttttacagtctgtatattagcgacaaaggacagattggttaggagtttgattctcttgtagcaatgtgtcccgtccccccactgttgttgtaaaatccgcccatccgctgagaaccgcggtgggcggcgctgctagctttgtgatcatatagaaaacgacttgggttgtttttggacattttgaattgaaggaaggatgaagaaggtatgg

SEQ ID NO: 45193 - DNA, 323 bp, Zea mays
  Clone ID: MRT4577_141225C.1
cgccccttgtcgtcgtcaaggcatgctgcgtcgtaaggtaggtgtctcttcgaacgatgctgtgcttggctaccggaaccctgataaggtcaccgtcgctacgactgcatgctgaatatgtcgatgaggctactggggcttacactgaccatgctactgctgcagctcacttgacgtgcggcgccaagaagcgtggcatctctgctcctacgcaggattcccaccatgatgccggtgcggtcaacgagaaggagtacaagtctgacattaacattgacttcatgctagctcacaaccaactgcttgtcctcttgcaaggcatc

SEQ ID NO: 45194 - DNA, 350 bp, Zea mays
  Clone ID: MRT4577_141226C.1
attcggctcgaggtccatccgagctctttttttagctgatgctccggagctttaggggggactgttctaccgccttcgggaagacactgtccatcgggccgtgcacgaagaggtagccggagtccgcgaggtgaaagcccatcctggccggcaggaagctgggcatcaacccctcctggatgtactggacccagcacccaaggtagaccctgccgtacacggcgagggggttggacagccataccacggtcaggtagacctctcccaccaggaacccggaaaggcccactccaaccgcggtggcttgcgcgcggaaccccagggcggcaccgttggagcaggcaacccag

SEQ ID NO: 45195 - DNA, 274 bp, Zea mays
  Clone ID: MRT4577_141227C.1
aaaaaaacaaaaaatataaataaaaagaataaataaaaataaaaagagtaataataaaaaaggggggagaagtcatcctgtgataatggaagagtgatatacgtgataaaagaggtaaatatggggggctgcctcgttagagagttttaattataggtaagtgtagtataatgctcaggaaagttttttattaaaactttaatttaataagggggggcggtttttaaaaattaatattttttgggagcggtttgggtaaacaaaattttttttt

SEQ ID NO: 45196 - DNA, 291 bp, Zea mays
  Clone ID: MRT4577_141228C.1
ggtcattgaaacaacggtgcactatggataagccgctacgttaacccaaccctttacaacgtacgacaggacagactgcagggaaaaacacacttacctcgcgacgggggaacgaacaaataagccagccacgctatcgggggtacgctcatgctccaaacagactgttgaggataacacggggagtgcactctacggatacgagactcatagtgctggcccctagctggatgacaaacatccatacacgatgccgaagcgaatgggctggaccgaagagactgcaagatg

SEQ ID NO: 45197 - DNA, 505 bp, Zea mays
  unsure (1)..(505): unsure at all n locations
  Clone ID: MRT4577_141229C.1
gggggggcgctacaatgtatcattgggggggccctatgtncttgttgggatttattgcgtaccaaagtcgagtttatcttattgacatttttttttttttttttnncnacacattttttttgtttgtnggggggttttttttcttntnatncttctttatttgggtggtggaaacaaaattttattatccatacctaatgctcattataatagtggtgctcattttttttaatttttatttttgttgtaagatgtttttgtgatatacactgtatctgtcttctagtttgcgctgggtgtcctctttgttaattttttttttttttagtttttttcttttttctctatttattcttttttgtttcttttttttttctttccttgttctctttctttcttttttattattgattatttcttctttttttcaatggtatttgtgtgctttttttcttttttactttttttttggtggttattttttattttcttatttttctttttt

SEQ ID NO: 45198 - DNA, 1308 bp, Zea mays
  Clone ID: MRT4577_14122C.1
cattgatcctctcgtccgtgggccccgcggctaacggatcggagtcggagtccttcttgtgcttctcctgctctgctggtgccgctgccatgggtttccccagcacccccaacctgaagctggagcctcgccctcgcacgcggaggctcctgcgctgcgccctcagctctgagcctgtgcctcccatgactgtttccatcactggagccacaggtttcattggacgcagattggttcacaagcttctatcggatgatcacaaggtttgcatcttaacaaggtctgcctccaaggctgcgtcagtttttcctgcttccacctatcctggactcacaatagcccagcaaggggattgggaggcatgcgtcagaggctccactgctgttgtcaacctggcaggcatgcccataagcactagatggtcacccgagattaagcaggaaatcaaacagagccgggtcaatgttacatcaaaggtggtgaagtacatcaaccatgctggaaacgctgatactcgaccctcagtgtttgtgagcgcaacagccattggctattatggtaccagcgaaatccatagctttgatgaatcaagtccctcgggcaatgactacctagctgaggtgtgcagagaatgggaggccacggcatgccaagtaaaccaggaggatgttaggcttgtacttctccggattggggttgttcttggcaaggacggcggtgctctagcaaagatgatacccctttttatgatgtttgctggtggtcctctggggacgggacgccaatggttttcttggattcatctggatgacctagtcaacctcatctatgaatctctaacgaaccctacatacaaaggtgtaatcaatggaactgcacctaatcctgtgcgtttgtctgagctatgcgaacgtctggggcgaatcgttgggcggccctcttggttgcccgtgccgggatttgctctcaaagcggtgctaggagaaggcgcttctgtggtgttggaaggacaaaaggttgttccggcgaaggccaaggatctaggcttctcctatagatacccctatgttgaagacgctctaaaggccattgcccgagacctgtagagctaggttgaggacgatacaggcaacttaatttaattatttcttatcttaactaggaacgtgcccgtgcgatgccacggaatacaaattgcgaccctttaatagacttagggccctgacgacgtgcggcgtgagtacaatagtgacggcaaaatatgtgattgttaaacatagatatagaacgatataaataagtctaccc

SEQ ID NO: 45199 - DNA, 228 bp, Zea mays
  Clone ID: MRT4577_141230C.1
gtaaataaaataaaccgttttatttcaaacttaaacttttattaaaaaaaaaaagtggtggtgccaaataaaagaggaaccatatttaaatagggggtgggaaacataaaaaggcggggacatacaaacgagtattctggaacaaattataaggcgtggtgaacaacaatttagataaaaacaatatatatatgtgtacaacataaaactggtagggacttaaacaaa

SEQ ID NO: 45200 - DNA, 408 bp, Zea mays
  Clone ID: MRT4577_141231C.1
agccccaatttttctttgaacaaacccttttgaggtgaactcaccccgggcaactgtaagtcttggatcaacttattgcacattactcgtccccatcatgggagactacatatttggcgtgcgcgcgagcacttgatctccttattgacatgctgggattttacgagtgcctgtttaagggctccatactggaggtctgcaaatacctcaggcccgtcatgcttgatgggcccaccaacaaaaaattggaggttgcttgaacttgttcatgtaggaaacttgtggtgaaaccttctccaccctttttcgaactgataccagtttctctggtttcaaaacaacagtgagatacactttgcattacttgaaaacagacacaaattattttttttaaaaaggaggttaata

SEQ ID NO: 45201 - DNA, 358 bp, Zea mays
  Clone ID: MRT4577_141232C.1
gagcaaaatgcaaagaaactttgcatagatgtttgtctttcaattccaaccatcctatgtacaaagttgcaaaaacaaaatttaggatatgtacagttcttctaaggaatagccccatcaccgaaactcttaattcctactcttaattcctacgggccaacctgccttttagggctagtttgggagccacaaaaccggaagtgactcccaaactagcccttagagttggtttgagaacttcattttccaagggatttatattttcccaagaaaaaatgaactaattttacttgggaaaatggaaaaaaaaaacttaggaaaatagggttcccaaactagcccttaagagaaaaatgcc

SEQ ID NO: 45202 - DNA, 286 bp, Zea mays
  unsure (1)..(286): unsure at all n locations
  Clone ID: MRT4577_141233C.1
gcacaggtgagatcgcaaccctagaggagcggttcttgcgcgcgatcagctatcgcttgttcgttggcggtcaagagttcaggggcctctgcgaggtcctggagaaggtgcccctgccgccgtgcgggtgctgtgccagtaggaagaggcaggcggacgccgttgtcggtgacgaggaggagcaccgccgcgtgcgcgctcgcctgccatcacccgtcgtgatgcccccatggccccattacgaatctntttaggctgaaatctaacgaattcaattcaagtcgat

SEQ ID NO: 45203 - DNA, 283 bp, Zea mays
  Clone ID: MRT4577_141234C.1
caaggaaaacaacccttttatgctcgggcttacgggtccaaaactgccccaatggcccaaccccatttagtttggggaattataaacaaatttatttttccaattttaccacaggggggccctcctgtccagttagacttttgtcaaccagcccgactagatcccatcctttgttcgtttggctccaaacaattcctacgtttcacctgcaaatatgagcgattttcttccttgataaaaaggggagatcaaccggggggcttttgccctttttgggccaaaa

SEQ ID NO: 45204 - DNA, 303 bp, Zea mays
  Clone ID: MRT4577_141235C.1
tcgcgatctagactggaatcagctatccgccattgtgataactttcaagtcacagagagtgatgtcgagaaaatcatcgatcgcgagaacacatttcccaagctgtctgagatacctatcaagccagcgagatgcattctaatggacatcactgtactcccacgtgttgacgaacctgcaggtatgcgtgatatgacgccaaagttgccttgtgatccctacaagatcaatgcattgattcccgtgaatgctgttattaaccatgcatggcgagtgtatgctgcaacgacctattatgcattt

SEQ ID NO: 45205 - DNA, 344 bp, Zea mays
  Clone ID: MRT4577_141236C.1
gaggaacttagaagtccagagtaccttgccgaaggtatagatttaagaagaggcgctcaagcaaccggcatgacacccatatagcttgccctttctctgtgtgatctttggtacatgtatggatgcacagctcgacctgcgtacaccgtatgtgaggtgacgaatggctacaacacctttgtcttaacataaacatgccaactgggactacgttgagcaaaaatctctcgcatgaatatatactctgctgactacattatttcaggacaccgtatttctcagcccctaggaaagggcacaattcactgcaaggtcgagcttattatcaacttctagaatgcctt

SEQ ID NO: 45206 - DNA, 725 bp, Zea mays
  Clone ID: MRT4577_141237C.1
gatcatcttctcatctctcatctgaaccggtctgctgctctgcaagactgcaaccaagtctgtgcccacaagagtgtcccgatctcgacggccctcgctgacatcagcccatgaccaggtgaccaaacctaagctctcacggccatggcgagggcgaaggcgccgaggcggaagccgccgcaggcggtctcccgacggctcctcggattttgcgggctgagcttcgcggcggcgttgtacgtggggattgactacctgcggtacctctcgccgacatggcacaaccggctgcagccggtgctctgggcggcgctggcgctcgccgccgccgcgcgcgcaccgttctaccgccactgggatgtcgagctacgggcggtgcttcccttcctcggttccatcgtcttcatgctcagcgccttcctcatcgagatgatctccgtccgcttcgtctccgtcctgatggggctccagtggcacggatctgctgctccacttcctgacactggccaatgggtgcttctagctttgaatgagaagcttcctggaagtgttgttggtctattgagagctcatgttatcactcttcaccattatttgatgttatttatgatgttgcggctctcagggttgcttgattgcatcaaagctcctgggcttggaatacccacaagatatttgtctcccatggcaggtcggacggtttgcttcagccccgcaacttttgg

SEQ ID NO: 45207 - DNA, 487 bp, Zea mays
  Clone ID: MRT4577_141238C.1
atgatacccacagaatgtggtaaacattgttgcgcttcttacaacaactacaatatgtgccatttagccaacatgctttgactaatccaccaaaatggtggaccttcttcatccacaatattatgctttaatgtactaatgaatagaacgactatgcttattacttttgaaagctgcttgaaacgtatacagcggctgcaaatttaattcctaataaaccaattgtgcgatcataacactttacaatatgcactgataactatgactatatctcataagaggtgttaaaaagcttatatcctatacgaactactatctgtcaaaatacatgtcacgatatatttggtccttgctggaaaaaaaaaaaataacgtcccacattatagaggatctaatgtaacatccgttttcatacacatcgaataccttcgtatatgagctctctactaaaagtcactgtaccatgttctacaaatcagatactgtt

SEQ ID NO: 45208 - DNA, 221 bp, Zea mays
  Clone ID: MRT4577_141239C.1
gtatggcactgaacaatgacagcgcaacctggtaagacagactggcaaaccatgaaccctgtgaacaggcatacaaccatgctagagtttccaggcgcaaggtaacagcgacgctaagggtgcagctccttctctacctagggtaaacggcgacgataccaaaagtatgaaaactactgccagcggggctgtgatcggggcttgttttcgggtcctatcga

SEQ ID NO: 45209 - DNA, 443 bp, Zea mays
  unsure (1)..(443): unsure at all n locations
  Clone ID: MRT4577_14123C.1
gcgttcgatcggnaagcactgcagnactgcagcgaccaagcggacgacgcgagagantgagggcggtggtgatcacgcgcggcggcggcggcccggaggtgctggaggcgcaggaggtagaggaccccgcgccgctgggcgacggcgaggtcctcctccaggtggtcgccgcgggcgtcaaccgcgccgacacgctccagcgccacggccgccacccgccgcccgccggcgcccccccccccccncccccccttttcccggggctcnngtgctccngcnccttcctcgcncttggcccctccgcccctccncggtgggccgtcggcggcntggtctgcgcgctgtttttcgggggtgggtccgccgngttggtggtggtgccggcgggtctgctgttgtcggtgccggtgggcgtgtcccttgcggtcgcggccggctttccc

SEQ ID NO: 45210 - DNA, 1848 bp, Zea mays
  Clone ID: MRT4577_141240C.1
agcttcttgggtaaccctggactttgaggatattggcttgactctgctccatgcccacgaattatgcaatgcatagcacatgaagagatcctttagagcaaaggcctgaatgcttgcagctattggattcggctccaaattgctggctgttatgctcgttatcctactagttcccagccgtccgcataactctccagtgctcaaagatgtctctgtaaacaaaccagataaccttgcttcagcatcaaacaacattcatcccaagcttgtgatcctccacatgaacatggccctctatgtatatgatgatataatgaggatgactgaaaacttgagcgaaaaatacattattggttatggagcctcaagtacagtctacagatgcgacctgaagaactgcaagccaattgcgattaaaaagctgtatgctcactaccctcagagcttgaaggaattcgagactgaacttgagactgttggaagcatcaaacaccggaatcttgtaagccttcaggggtactccctgtctccatctgggaatctccttttctatgattacatggaaaatggcagcctctgggacattttacatgcttcatcgaagaaaaagaaactcgattgggaggctcgcctcaagattgctctcggtgctgctcaaggcctggcttatcttcaccatgaatgcagtccacgaataatccacagggatgtgaagtcaaagaatatcctcctagacaaagactacgaggctcatcttgctgacttcggtattgccaagagcttgtgtgtgtcgaagacgcacacatcaacgtacgtgatgggcaccattggctacattgaccctgagtatgcacggacatcccggatcaacgagaaatcggatgtgtacagctacggcattgtcttgctggagctgcttaccggcaaaaagcctgtcgacgacgagtgcaaccttcaccacttgatcctatccaaagccgcagagaacacggtcatggagacggtagaccaggacatcaccgacacgtgcaaggacctcggcgaggtcaagaaggtgttccagctggcgctcctttgcagcaagaggcagccgtcggatcgaccgaccatgcacgaggtcgcgcgcgtcctggacagcctcgtctgcccagcaggcccgcccccgaagcaggcgcaggcgcaggcacaggcacaggcgtcggagaagccgtccaccacggcgccgagctatgtcagcgagtacgtcggcctacgaggcggcggcggcggcagcgccctctcctgcaccaactcgtcgagcgcgtccgacgccgagctcttcatgaagtttggcgaggtgatctcgcggagcacggaatagtccaatagatcgacgatcattttgtgttacagtttacaataggtgtctgccgccctgtgatgtgatgtgactcgctgtaaatatcctgctgccttctcgttgggactccactagggactagtagctatttttctccgttatgcacgtctctctctttttttttgctgggaaactcgaactgtaactaaaggaatggatttatgtgcaggctgcgtttactgcgacgatcattttgtgttacagtttacaataggtgtctggccggcgccctgtgatgtgactcgctgtaaatatgctgctgccttctcgttgggactccactaggcactagtagctatttttctccgttatgcacgtctctctctttttttttgctgggaaactcgaactgtaactaaaggaatggatttatgtgcaggctgcgtttactgacatgttttgtgattcagctgggacggttatgctattgctctgctcgatcggagccc

SEQ ID NO: 45211 - DNA, 440 bp, Zea mays
  unsure (1)..(440): unsure at all n locations
  Clone ID: MRT4577_141241C.1
cgcgcagcgggcgcgcgggcgggcgccggggggaccggaagcacacacggcggcgaggaccccagagcacgggcaccacagcgcgcgggggagggagccagccagcaagcagaaaggggagagggagccagccagccaggggcgcaagcgcacgccgaagacgaccaccaccacggaagagggggggagacccgcacaaggccaacagcaacgagaagggcgccacgcagaaggacccagacgccggccgccaccgagacaacggccacgggcgccccaccaacaggaccggcaccgagcagggcgcgagcaaggaccccaacgccgcacagaggggaacgncgccccacgcccacaccacgaggacgccgaacaccaccgccagcgaagagaagaggcaccagcccccggccacagaggaaaagccacccaaaagagag

SEQ ID NO: 45212 - DNA, 572 bp, Zea mays
  Clone ID: MRT4577_141242C.1
ccctacgcagtacgtggatgccacgacaaggggccgacggtgtccgaggcgctgacggtggctacgctggtccctctgggcgggctgctcctgctgctgctgggcctggcgctggcgggcttcaccgtggggctgcccctggccacgcccgtgatcctgctcttcagccccgtgctcctgctcatcgcgctgctcatcggcacggtcgtcacggggttcctcacgtcggtcgcgctggggctctgcgtcatgtgcttgctcacctgcctgggcaacacggtgcagcacgcgttccactacacccaggactacctccaggaggcgcgccacacgatggcggacgccgcggagcacaccggccacaagaccgaccaggtcgagcacaggatccagaacaaggcgcatgacgccggcgctggcactggcaccagttgctgcaggactacctcatcaataagcaaatcatgcatggatgcgtgcgtgtcaatgtcagcaagatgctcgcggaatgctcttctatgcacgtgggtaaccgtctcttggtacgcttgctcaagtgcctgataaatatc

SEQ ID NO: 45213 - DNA, 568 bp, Zea mays
  Clone ID: MRT4577_141243C.1
ggccgcttttttttttttttttttctttcttttttttttttttttttttttttttttttttttttttgtgccattattcttgacccctccttttttatcttcattaactgataacatttaaaaaaaacacgggccgcacacaaaaaaacaaccccagtttgtaatttcaaaacaaaagcacaaaaaagaaagactcccggattcaacaaccgggcggggccgccttaaacaaaaacaaaaaaaagacccccccaaaaaagaagggggaccaacagggggggggcccgactaccatttgttgcgagacaaaaaaaccacgcaaaatggggtggccacacaaggcgccggacaacccccccaaccggggggaaaaaaaaaaccctttaaaccccgcctaaaaaaacgagatgaacgagctgaaaaaaccggttctgaccccccaaaccaggttcccccccaaaaaacccctgataaaggggggggaaaacaaaaaccccgcccagaccccaaaaaacccccccctggggccccccgaaaaggccgtaaaaacaaaccttattacaacgga

SEQ ID NO: 45214 - DNA, 189 bp, Zea mays
  Clone ID: MRT4577_141244C.1
ggcactgcggcgtccgggcgatctccggtcacctacactgcattggccgcgacgacaccggtcttcctccggggcgatcggcgggtggtagcacgtgcgtactgggagttcttcatgagctggtattcccatatgctcctgtcgcacggcgaccgcatcctgtcggtggtcacggtcgtcttcaccggg

SEQ ID NO: 45215 - DNA, 423 bp, Zea mays
  Clone ID: MRT4577_141245C.1
gcgtccgcatcatccttcggcaccggcgctttgtgtgttgcgcgtctgacccttgactcgacccgttgatgacgccgtcgcggccgtgttgactttgacgataacatccgacgacgacgatcacgacgacgacgaaaaggacatagcgcgccgtgagcacaaaccaagatccaacagatcaagggggggggggaatctggagcaatttaccctgagtcggatcaaaataatattcttatctcgacctccaactagaacgcgcttctcacttaatcatactcttcaccatcaccgccatatagccgaataatagcaagcatggttgactttaagagtgaaaccgtcaggggggtgtcggaaaaggtccattttttttctgaaaagagggcgatatgcttgatcaggccgtggctgggtagattt

SEQ ID NO: 45216 - DNA, 399 bp, Zea mays
  unsure (1)..(399): unsure at all n locations
  Clone ID: MRT4577_141246C.1
gtcaggcccgacggggtgacgttcgtggcgctgctgtcggcgtgcggccaggccggcctggtggtcgaggccagggagttcttcttccagatgctgccggtgttcggcctaccgccccagcccgagcactacggctgcatggtggacctcctgtgccgcgtgggccacgtggacgaggccgcgcggctcgtgcaggcgatgcccggccgccccaacgccaaggtgctcggagccctcctgctcgacgcccacgtcctgcancggtggcaagaggacggtgtgaggctgggctagtgggccgctcggcggatatcggagctggacctccacgacggcgcggcgtacagtctgtccaacgggtacgcgtcgctgcagcgatgggatcgcgttgaggaacac

SEQ ID NO: 45217 - DNA, 138 bp, Zea mays
  Clone ID: MRT4577_141247C.1
cctgttcctagtgttaggttgttgttagtggtaaataatgaatgctggggctttcggcgagtcttgagttacttgcggttgtaaaactagtgtggtttcttttctatataaaaatgtatatttacatggttctgctcc

SEQ ID NO: 45218 - DNA, 319 bp, Zea mays
  Clone ID: MRT4577_141248C.1
tacaattggtaccaaaaaaaatatgtctagatgagaaaaccaaaacacaaaaaaaaaagaagaaaaatgctcgttcgttttatgtatactaaaagcatacgcccgacttcaagcaaaaataaaaaggggtgtctggttgtaaggtatactaaatttcattggcctgcgtgtaacatcgtcgttcctggataaggtcccggagttaccaaacctggtcgccttgctaaaaattcccttttgggcagatcccggtatttcccaaagttcctgtccgttcgccctttccaccatttgcccagtcggaatgtagaatggggcc

SEQ ID NO: 45219 - DNA, 137 bp, Zea mays
  Clone ID: MRT4577_141249C.1
ccggccgggggaacagcattgtacccgtacgcggcgtacccgcggcagccttacgggtaccctgctcctccagagcacaggagcaaggccggtttgacaccatgattgccaatctgctctccgagctctactatctc

SEQ ID NO: 45220 - DNA, 169 bp, Zea mays
  unsure (1)..(169): unsure at all n locations
  Clone ID: MRT4577_14124C.1
ggtcgcccaccgttctccgcccgtggcgcccaagcgggggagccggggaaaaaccgcgccgggagaagcggaaaacacccaggaagagcccaggccgagaaggctgccccgtccaatnctccgcaggtaggcggctagtaagaagggaagaagaagccaagagaggggg

SEQ ID NO: 45221 - DNA, 877 bp, Zea mays
  Clone ID: MRT4577_141250C.1
aattctacttgaggtcggctcattatctactcttctccacctagcctgctgtacctatatatcctatcagctatcactcccatcttccccccatcgtcactacctacctcctccccgtcctgatccctcctccgctcgcccatcggcgccaggcgtgggcgctctcaggtgggtggagcttgacctgccgggatggatcgcgccgagctcaccaccgagcaggttctcaagcgggacattccatgggagacatatatgtcaactaagctgatcacttcgacatgccttcagcttttaaggcgttatgatcacaaaccagaaagtcagagaggtccgttgcttgatgaggatgtgccatcgtatgttcgtgtttttttgaatattttgcgaagcatctccaaggaagagactgtggaatatgtgcttgccctcattgatgagatgcttgcagcgaatcctaaacgagcagcactgttctacgacaactctctctctggtgaagacatttacgatcctttcctaaggttgctcttgaaaggtaactggttcgtacaggagaagagctgtaagatattaactcacttaataagtgcgagacctaagcttcagaacggcatggttccaaatggagaggcttcaaattcaaagagcaagcttacatcaattcatgatgtgttaaagggcttagttgattggctctgttctcagctcaggagccccacccatccgaactgttctattcctactgctacccattgtcttgccactttgctgagggagacatatgttcgaaccttatttgttcaggcagatggtgtaaaactgctcattcctttgatatctccagcctcaacacaaagtcaattcagctcctcta

SEQ ID NO: 45222 - DNA, 452 bp, Zea mays
  Clone ID: MRT4577_141251C.1
gggaaaaacaatttgggccccattttccatttttggggcaaaaaggccccggcccgctcaaaaccaaaggcataaacgggggtacaaaacccaaaccaaaaacccacggaaagaacttcccctaagctaccgcaaggaacccaagaagcagcatttaccacggggggggggcacccccgcaaatccctgggccccccccggggcaagcaaaaaaatttgtttggaggggggggccccaaaaaagggagccattcccccccaagggggggccccaaaaaaaaaaggcgcccttgaaaaacgggggatttccaaaaaacccccctcaagggcaaggaaagggttttggaaaacctatgaaaatcccgaggggcaccccttttttttccgaccttaaccacgggggggggaggcccaacttggaggatcccaacaacaacggggggggggcccct

SEQ ID NO: 45223 - DNA, 372 bp, Zea mays
  Clone ID: MRT4577_141252C.1
ggcagtctggctacatcttcggcaccatctggtggggcatcgcgctcaacctcatggcctacttcgtcgccgcccatgctgtgggcgcgtgctggtacctgctcggcgtccagcgggccagcaagtgcctgaaagagcagtgcctccaggcggccgggtgcgcgcgcggcagcgcggtggcctgcgcggcgccgctgtactacggcggctccccgtctcccggagtcgtcggtggcgacaggctcgtctgggccgagaacgcgcaagcgcggagcacttgactggccagctgcgacaactactattacggagcgtacacatggactgtgatgctggtggccaaccccagcccgatggagcggatgatgctcc

SEQ ID NO: 45224 - DNA, 602 bp, Zea mays
  Clone ID: MRT4577_141253C.1
agtacatacatgtttacagtgttcgtgtccttcgatgaacaaaattcaattcaactcaaaacagtaagatttctctctggtaccttcacatttcgcgtccaatggcacctatggtttgctattactattactctgctagtacatgaggccttttccactgccggagctgcggggcgactccggcgagttccgccagctgaccaccgagaccccagacagcttgaggaggcgctgcgccacctccccggttgtgggacggcgcgctgggtcttgcctgacgcacctctcgatgagcctgaccaccatgaccacggcgtcctgcggacagctccccgccggcagcgccgggtccacgagttcctccagccgctgcagaagtagccaagcagaccggaggagttgtgctggttggtgcagtcggcgatctggctgccgtacggctgctgcgcctggacttgcagcggcgccaacccgccggagaggatggaaaagagcaagaggagcacggcggtggcggtgagatcgtggaacgaggccatcgcacaagcagcatgcggcgttggcttgcctgcagagttcgtggtttctgctcaagctttatg

SEQ ID NO: 45225 - DNA, 311 bp, Zea mays
  Clone ID: MRT4577_141254C.1
cgcggtgctccctccatagcgcctgggcagtctgtcctccgatcggagcttgtgtgcgtgtcgtagtcacgcttgcttccccgtggcgcccggcgcggcaagaccccaggcgagaccctgccgagctacgccccgactccacgtctactggtcgggctctggttctatgcctgatgccgatgttacctggtgctgcctgctcggtccatggccaaggcctgactacagctccaggtagaggcgtacccactggttagccaggaaaggcgtgcctctgcatgctggctttccctacgcgcgtgctcggtggc

SEQ ID NO: 45226 - DNA, 472 bp, Zea mays
  Clone ID: MRT4577_141255C.1
acttacacccgcgtgcgaaccaagtataccacagcctcaagcagtagtctccgccgctccgaaaggcgcggagccagatgtcgtggctatcctacgtcgacgaacatctgatgcgcgagatcgaaggaaacatctcacggccgccgccctcgtcggtcacgacggcagcgcttgttggcacccctagagcttccccgagctccatgctgaggtcgctgctgatatcataaaggactttgatgaacctggtactcttcgcaccaactgctcttttcctcgcatagatctcgtgcatgatgatccacggtgatcctggagttgtcatccgatgaaagtatgtcactgcgggcattactatcgagagatacggtctgcccttgattattggtgtctacgacgatgcaatgactccagcgccttgtcacatggtgccggagaggctcgagcgactacctgatcgtagcaccgcttc

SEQ ID NO: 45227 - DNA, 446 bp, Zea mays
  Clone ID: MRT4577_141256C.1
cgccttccagtattctacgcatattataaagatacacgtgcccccttccatttgcacccacgcctctctctacttaggagtatacttcaaaagcgccgaaccagataggcaggcatctcgatcggcgacggctccagtcaaggggctggttggcatggagggcgagaagaaggcggccgccgtagcggaggatgaggttgtggttgtggctgctggcgatgtcagcctgaaggacctgtcaaagaagctcaacgacttcgccagggagagggactgggagcagttccatagccccaggaacctactgctcgccatgatcgccgaagtcggggagctgtcagagctgttcatgtggagaggggaggtgcggaagggcctcgcgggctgggacgaggccgagaaggagcacctgggcgaggagctctccgacgtgctgctctacctgg

SEQ ID NO: 45228 - DNA, 302 bp, Zea mays
  unsure (1)..(302): unsure at all n locations
  Clone ID: MRT4577_141257C.1
aaaaccggggcggaccaacccttccgngaacccttggtttttcctgaagttggcctttaaactcctaagccccccccggcggcccgttccaattgtagattttttcgggtgttcccatccaacccagttccagttaacttgggcgggcgtcctggccgggccaagcgccgggaagtttttttaccaagccgggctttttcctcctttgttgggggctccggtttaagttggccctgggcgcagccggggttttttaatgacccgtggtggagctccattttaagcggccggacggtccggtt

SEQ ID NO: 45229 - DNA, 452 bp, Zea mays
  Clone ID: MRT4577_141258C.1
aaaaccgggaaaaaaaatcccccaaatttttttttggccaggggtttttttatcacaaaaccggggcccaaccaggggtgtattggttttggcagggacacggggggggaaaattaggcctcaaatcatagcctcaaggtcctcgttgtaggggcatccaaactgggccaggggaggggatccatttccatttgggtgggccccggggtgaattaggatcgaggtgttggccccccccctggggccccccggggatttccttggggggggcaaatccctttttggggggaacccggacggctttttgagagtcattgcctgtccgccccggggcaaccaaggggggcccctcccctggtttctttagcgggggtttgggcgcgggctgttttttttccggcttggaaagggggttgttgtgggacggggagttcaattcttttttggaaaaa

SEQ ID NO: 45230 - DNA, 359 bp, Zea mays
  Clone ID: MRT4577_141259C.1
aacggaatactggggaaccaggtatatcgttccattattcaatgcagaattgcacactgcacatggcacatcaaagtctcactacccacatttccagtgaaggcatgttttacccgcaaacaaacacggatcagtaaaaacatactatggctaatctaatgtgtaatatggactataacactgtcttcctcaccatgaatcactcatgatcgccatacatgtaggtatgatgcttatggctggtggaaggcacacacaccacttgaggccctgctggatggcagctaatgtttgcctcacccacctccgatctgtacagttatggtggttggacataacccagacacaagtggaacaca

SEQ ID NO: 45231 - DNA, 607 bp, Zea mays
  Clone ID: MRT4577_14125C.1
agctgaagctggaagaaggacaggacgtcacagcactcgctctagaccaagaaaacaccacccttctggtttcgacagctgataagcagctaatagtctacacgggtccggctccaagtaccccgtaggtcaatccattagctccccggtgcttggttggaaaattgtaatggagatcagcgctagctatcttgacggcccaactgacagtgagctcggagacgacagtacagataatgcacgttaggcgacgggcttctcttgccgtgagcatggcgctgctgtacgtagaggctccaatggattgtgctgtaatacaagactgagactggaacctgaaatgggcgacatgtgcaccaaaaggtgaagagccgttgcgctgctggaaaactctcctgtacagggacctcgttgacattttccatgtagtcgtagtgaaacctgccacgctgcggccaaaataattgttagaagcagcaatccgaatgtaattattgccagtgcctcgtgcaacggcgagccggcacgcaaagatttgttagcttgttgtcattgcatctgtgtacaaagtctcgtccaagaaattgattcactttcgcttgcgcac

SEQ ID NO: 45232 - DNA, 434 bp, Zea mays
  Clone ID: MRT4577_141260C.1
cccgctgctgcaaatcccggggccgcccggggcgccgccgccagcagcgccagcggtgagacatgacgccgccggcgaccgggcaagggggaggaggccataaaaatagaaccagactggtgttggccattgcattgcctttagctgctgcaactgcaatattagctctcgcagtagcatgtttgtattaccggagtagaagaagaacaacagcgcaaagggactcatcaggaaagccatgttctcctagtccagatgacattgataagagcatcgattcgctcctttttgacctaccggcattacgggcagcaaccaataacttcgctgaaagcaataagcttggcgaaggagggttcggtgcagtttataagggaatcctttctgaaggccaacaagtagcagtgaagaggctctcacttggctctacacaa

SEQ ID NO: 45233 - DNA, 2390 bp, Zea mays
  Clone ID: MRT4577_141261C.1
gataccgaacaggaacccattcccaattcccctctccggccttcgccgccgccaaggcacgaagccagagcgcgacggcataaatcgcgggagcgcccgccttcgaatcggtttcccccacgccatgtcctccccctgcgtctcgcaccaacagcaggtccgtctccgtctccgcgctgccagccgccttcccgccccagacacggcctcgttcgcgccgcccgcgccccggcggcttcgggtggcgcacgcggcgatgagcgccaaggcgcccctcggcgtggcgccggcggaggagggggccgggacgccggggcagcaggccgtgctggggcagatggtggatgatgccgccgtgtggtgcgccgtccacgggctcgtcgtcggagatcgcgccaaccagagatcaggaacggttcctggggttggcctggttcacgctccattctcgctgcttccagcgcgttttccggcatcgttcttcaatcaagcatgcgagctggctcctatcttcaatgagctcgtggatcgtgtcagcttggatggggagttcttgcaagctgctttgtctagaacaaagcaggttgatgaatttacttcaaggctgctagaaattcatgataagatgatgtctataaataagaaagaggatatacgcttaggattgcaccggtctgactatatgctggattctgaaaccaattcactacctcgagttgagctcggtgctatcgcatcatcctttcctggccttggctcccttgtcagtgaacttcacaggaccttactcaaacagtatggaaaagtattaggcctagatcctaaaagggttccacagaattgggcagccactcaatttgctgaagcattgggcagagcatgggccgagtataacaatgacagtgctgttgttttgatggttgtccaacctgaagaaagaaatatgtacgaccagtactgtcttgtcaatcatctgaaggaatcatatggtgtggcaactataaggaaaacattggcacaagtagaggctcaagggcaggttcttacagatggaacacttgtggtagatggtcggacagtggctgttgtgtatttcagagccgggtatgcaccaactgattacccttcggaagcggagtggagagcgaggcttctgatggaacaatcatctgcagtgaagtgcccttcgatagcctaccatttggtaggaacaaaaaagatccagcaagaactagcaaaacctaatgttcttgaaagatttcttgacaacaaggacgacattgccaaactacgcaagagtttcgcagggttgtggagcttggataatgaagagattgtgagatctgcaatacagaaacctaacctgtttgtcctgaagcctcagcgagaaggcggagggaacaacatatatggtcaggatttgcaggacacactgatcaaactccagaaggaacagggggaggcgcttgcggcgtacatactgatgcagaggatttttcccaaagcatctcttactcctctagtcaggggcggtgattgctttgaggaccttacaatctcggagctgggaatatacggagcctacctgcggaacagagacaaggtgatcttgaataaccagtctggctacttgatgcgcaccaaagtttcttcttcaaacgagggcggcgttgctgcagggtttgccgttttggacagcgttctcctgactgatgagtgagacagcagcgaggtggcagagctatgggtgacacctgacctgcattagtgacagtgcccacagtcaactcaaacgatgacaatatcaactgcaatcgtaggggaaactatgaaattgcttacagaattgcggacagtcggagaagatggcagtgttacgttatgatatagtttcatgtttgtatgctggttgaaaatgtagggaaactcttgttttcactagaaaggaacccctggagggggggagtaacggtgtagaaggtttatgttgtcacagttggcatgcattcatataggaatagctagctgatggcaccgttatgccaacacagttataacaaatatcaattgtaaattttatgattggttatcgactaagcaaaacaattttataagaaattgttgtgcggcaatatcctttgactaaatcttagtcagatgctcgaatattgctatggtttgtaaatataatatatcatatttatagattttgttgtaataaaacataaaaataaaaaaaaaaggcccctagggcctattagttatgtgggtgtggaagtagggttaacagctaagattagtctgcatttggaggattgtgtaaagtaggaggcatagaactgtagataatatattttttatatattaattgaaatatgatgtgatataag

SEQ ID NO: 45234 - DNA, 642 bp, Zea mays
  Clone ID: MRT4577_141262C.1
accacttagctgccataacagttgcagcatgcacaaacacaccattggccacccactaccaactacctaacaccaatggctaccaaaatattagccctaccttgcgctagcttgacctcgtatctactggacctacaccagatgcagctgattgattgccagcatgggcatgacattgtctccctacgcgcacattatgccacagtggactcacaccagctgctgcagcgggtctgcgaacatgcacaccagcgatcctacagtctacgactagcgctaccggcgagcgccttacagcaaccaattgcccagtagcgacagcatgtgcctgggacagctaaccctacagaccattggaacgcagcaacagcctcaacagatgctgtcatcactgacccacctatccgacgggaaccctgtcacctacttgcgacagcagctgcgttgcgtacaacccacttgctctgccgaacgcaggtgcataccagcaacaacagcacgcgcaacagtgttctgcctgtgctgactcgactagccatggggaaccctgccgtctacctacaactactttcatctatcccgctcgccgtgggcagtgcacctacggacctacaacaacagttgctgcaacaaattgtacct

SEQ ID NO: 45235 - DNA, 191 bp, Zea mays
  Clone ID: MRT4577_141263C.1
atgtaatttgattctgtaaagaatccactttagtcttggcctggcagtatataaatggtgctttatttaacagaatacctgtggaggaaatatagcacacttgatgtaaaaataattgttttatatgtattgacatgactgattgattgattgctattctgtgcacttaattaaactgattgtgatgactt

SEQ ID NO: 45236 - DNA, 349 bp, Zea mays
  Clone ID: MRT4577_141264C.1
ctcggaattcggctcgagctcgagcctttttttttcgaggcattattgctgatgaggaatggctacattttgaggaggctgtccaacatgactttgttactgggtctgggaagaagctcagcagccttctggattgatgcttatctgagtatgacacggaggctatttatcttgactgaaggtagtataagcttatcaagacaacaacttgcttctaaactgctacagattgttacctctgccatatcaatcttttctaggtcacttacacactagaacttaacatgcattcatggagtactttggccaagcccctaataaggtgggacttgcttttgctacttgcaca

SEQ ID NO: 45237 - DNA, 260 bp, Zea mays
  Clone ID: MRT4577_141265C.1
gtgagaactgggatgaagaaacgaagggacaagcacacgaggggatcgaagagtaaaggctaagcatggcgcaacaaaggccgacaaacatacctccatagggaaggaggacgaaacacacacgctcacggaaatggtagacaggcaaggcgtagtagatgaaaaggaatgacatacacgggacggcaggaccagtgggggggacccctgcaaactcttaggggcagaggagccacgaagcaaaggcgggcaaagaggct

SEQ ID NO: 45238 - DNA, 277 bp, Zea mays
  Clone ID: MRT4577_141266C.1
ctcccaagccctctgcccgcggatcggagcttatctgcgtgtcgaaacaagactaccatcccatggcacccggggcacaagtacaccgccgagaccctcgcgcgctccgtcccagacccctcgtcatcctggaccgggggggggggcatattcctgagttccttgcaccctggcgctccctgcccggtcactgcccacagcatgactacagctccagctcgcggtctcccctctgcttagacaggatagcatagcctccgctccctggccctcccta

SEQ ID NO: 45239 - DNA, 281 bp, Zea mays
  Clone ID: MRT4577_141267C.1
cccagtttgagcaggatacacttgatggttaggggaatgttcaggagcatatggaccaaccttttatccactgtaggtcttaccataacccgcgtgttcggtgtcgacctttgaataaaaattcttctgatcatgctcggttacatcgccgaggtcaatcacgccctctacataattgtcaaatactatgccagaatggatgagggaccacccatccctattactgcaaaggaggatgcacgacgaactggtaacacacggaccgatttatgaggtgctcc

SEQ ID NO: 45240 - DNA, 133 bp, Zea mays
  Clone ID: MRT4577_141268C.1
catgatgcatatgcactattatgggactacctttctgaaacggaacagaggggcagaggttatccaaacctcggttgtcctgttcaacgggcaaaagcgcatcccagttctttaccaaccatacatgagcgtc

SEQ ID NO: 45241 - DNA, 548 bp, Zea mays
  Clone ID: MRT4577_141269C.1
cgtcccttgacggcgtcgcgctgcctccgatgctcgttgtggccgccgcgcgcgacctgctgcgcgaccgcgccgcggactatgccgcgaggctcaaggccagggggaagccggtggagctcgtggagttcgaggggcagcaccacgggttcttcgcggtcgagccgtacggcgacgccggcagcgaggtggtccggctcgtcaaacggtttgtctacggcaacggcggcgcctccgactaaattggagatcgagcaaagctgttgagggctcctttgattcaaaggatatctttagaatttttgaaggattgaaatttttaggaattttttttatattggccttttgattcatagaattggatcctataggaatttatcctatgaaatcttttgtattacatttcataggaaatctaacatccacttcaacctctttttacattttctttgttttttacgtggtatcaaacactctttgttaattttatagaattcaagttgacataccactgcaattctatatttttcatattcctacattttcgg

SEQ ID NO: 45242 - DNA, 740 bp, Zea mays
  Clone ID: MRT4577_14126C.1
actcctatagggcgattgggttcatcgagggcggccggggagcggccttgaaatcgcgctccgatttgtgcttctgcgacttcaatcggccagtccgaaaaatccaaggacattgccgggcggaaccctcccctccacccacatcatggcggcgacgactgtggcaagccggaagcgagggacggcggccttcctcgatgaccccttctccttccccggcgacctgccgtgcctgcagacgaagcgcggccggtgctcgtcgtcgattgttgccgccgacctcggcctcagcttcccgctggagttcgacccggtcgaggcactccatctcatcttcccgggcgaggatcggcaggttctacaaaaccatttacaagcgtcaggaaatgtcctggatgctgcgatcagagcatacaaagattatttggcagaaagaagcaaagaatctgcttctgccatcaactatgttccatccgacaacgaggaaggagatagcattctatctgaatctgaatctgatgtttacctaaaagaagaaaccattcccaccaattgctctggatgggctgaggtcatcgtcaaggagatgtcctctgcttcggatttgaccgatgccaagaaccgcgccttcaagatactcaaactgtttgagaaatcggctgacaggagcagtagcccagatgaaaagagagaagtgaacaggagcacgagatagtgaagcagatgctaggatccctgct

SEQ ID NO: 45243 - DNA, 287 bp, Zea mays
  Clone ID: MRT4577_141270C.1
gtctcagtcggttgtcgagttccttcggtcccggtcgtgcgtgcctcttgtcccacgcaagtccagcttgtaccatgccggtcaaaggaggtagcaagtgcatcaaatacctgctctttggatttaacttcatcttctggctcgccggcatcgcagtgcttgccattggactatggctgcggttcgactctcagaccaagagcatcttcgagcaagaaactaatcattccagcttctacacaggagtgtacattctgattggagcttgggcctcatgatgctagtgg

SEQ ID NO: 45244 - DNA, 291 bp, Zea mays
  Clone ID: MRT4577_141271C.1
cccacgcgtcccgaaaaaaaaaaaaaaaaaaaaaaaagaaaaaacaaataataaaagaaaaaaaaataacaaacaaaaaaaaaaaaaaaaaaaaaaaatgtaatatagagctacactaaattaacttccctggccgacgttgtacaacgacatgtctggggtgaccctggcgaaacccaacttattcgccttgcggctcttccccctttcgcgggttggcgtagtccccacacagctcccttctggtcgccccttctccaccagcttgccgcttccgggaatggcgattgg

SEQ ID NO: 45245 - DNA, 289 bp, Zea mays
  unsure (1)..(289): unsure at all n locations
  Clone ID: MRT4577_141272C.1
gttgccctcggtcccagcaacatccagggccacactaaccccttccctttccacccaacacgctgtatcgnccgggagggacagagtatcttcaggtaaccatactgttgtaagggcctccagggatcccgttgcatggctctgcttgctcccctaggccctgcatggccccacctctccctccagccctgtcctcgcttcatgaactacatcaagggccactatagactggctgccttgcttggaacaaaaggcatagcaatgaccatgcatgtgcgtgtgtgcgtgg

SEQ ID NO: 45246 - DNA, 1468 bp, Zea mays
  Clone ID: MRT4577_141273C.1
agcagttcacagttaagtcttctcattcccatcatctctcgccatgcgcccaacacgctccgctgtgtcggctacggcgctgctcctgcttgccgtggcactggcactggccgccacggcggcggcccgccactcctacaccaccaccaccacccgcgtcccggcgccagcggagcgggcggacgaggaggtgcggcgcatgtacgaggcgtggaagtcgaagcacgggcgcggcggcagcagcaacgacgactgcgacatggcgcccggcgatgatgagcaggaggaggaggaccgccggctgcggctggaggtgttccgcgacaaccttcggtacatcgacgcgcacaacgcggaggcggacgctgggctccacaccttccgcctcggcctcacccccttcgccgacctcaccctggaggagtaccgtggccgcgtcctcggctttcgcgcccgcggccgccgcagcggcgcccgctacggctccggctacagcgtccgcggcggcgacctccccgacgccatcgactggcgccagcttggcgccgtcaccgaggtcaaggaccagcaacagtgcggtgggtgctgggcgttctcggcggtggcggccatcgagggggtgaacgcgatcgcgacgggtaacctggtgtcgctgtcggagcaggagatcatcgactgcgacgcccaggacagcggctgcgacggcgggcagatggagaacgcgttccggttcgtcatcggcaacggcgggatcgacaccgaggccgactaccccttcatcggaaccgacggcacttgtgacgccagcaaggagaagaacgagaaggtcgccaccatagatgggttggtggaggtggcgagcaacaacgagacggcgctgcaggaggcggtggcgatccagcccgtcagtgtcgccatcgacgcaagcgggcgtgcgttccagcactacagttcgggcatcttcaacgggccatgcgggacgagcctggaccacggcgtcacggcggtgggctacggcagcgagagcggcaaggactactggatcgtgaagaactcgtggagcgccagctggggcgaggccggctacatccgcatgaggcgcaacgtgccccggcccacgggcaagtgcggcatcgccatggacgcgtcctaccctgtgaaggacacctaccaccgaccccggcaccgccacggctacggcagctgccatggatgtgatcaagatggttcttgcttaggagggagcgagcggagcaggcagcagagagccgagggtcttgtcgtgttgaactttacatagggtagctaggtaccactggggataattaagttaatccgttatggtgtggcaagttaattaatatgcacgtatctcttttgatgagtgccatatatgatgtaatgaagttacataaactcaaataaagtcgtaatcgtaatggtaaaaaaaaaaaaaaaaaactaaaaa

SEQ ID NO: 45247 - DNA, 504 bp, Zea mays
  Clone ID: MRT4577_141274C.1
ccaccatgtgtcttctttgggcccacgcgtccgcccacgcgtccgaagatctctccggaaaataaatgtcgcacacagtttgcatgagatagaggcttgtgttctgagcaagttatcaacaataggagaaaccttgactgttttaagactcgacggcctcgaaatcttcgcctcgaatctccaggcaattggttctacctgcaagaatctggtcgagattgggcttagcaaatgcaatggcgttacggatgatggtatcgtttcgctagttgctcgttgccgcgacttaaggactatcgacgtgacgtgctgccatcttcttacaaatgctgcccttgctgcaatcgccgagaactgtagaaagattgaatgccttcggcttgaatcctgccctttcgtaagcgagaagggactagagtcgatcgcaactctctgttccgaccttaaggagattgacctcaccgattgtcgtattaatgacgcagctttgcagcagttggcaag

SEQ ID NO: 45248 - DNA, 809 bp, Zea mays
  Clone ID: MRT4577_141275C.1
gccaggtctgccaggggcggttcaaccgccttagggggcggttcaaccggtctcaggcagaaaaatctgcccaacggctagttttgagctccacctatatatactacctcctacctctctccccaaagcagtgagcacgatttgaactccatttctaacccaagaaacacctccctctccctcacacacatctcttgcctctcccatttcaaatctttggagaggaatctttgagtgagcttgagagctgcggtttttgtgcttcatctctaaatctctcttgctcttcttcttgattcgagctttggtactacatcgagttctttgtggattcattactcttggagcttctagctcctagacgactaggtgtctcttgtgagtctccaaatcttgtggaagaccacaagaaagtttgtattacccgctcgtttgagcaaagattattgtgtgggcttgacctttgtggtcggcaaagggaggattagggttgaaagagacccggctctttgtgggcgcctcaacgaggaagtagggcaccttggtggtgtgaccgaacctcgggataaatcttgtgtctcttgtgttcttgctcattgtgtttgttcatgttcttcgttctctcaccattccgtggaagatttgtttatatctttttggtgtgtggattttgagaagtgcccctttctcagaatcttactacttttgaaacccctgtggatcatttagaacatctcatttccaaagttaactgggtgaatttcgagatcaattcagttttacccagtttgcttctagtttttgttgaa

SEQ ID NO: 45249 - DNA, 267 bp, Zea mays
  Clone ID: MRT4577_141276C.1
cagattagtcagcaaggatgggaaaagtaaagggattgcttatattgaatttaagacagaagctgatgcagagaaaacctttgaagaaaagcagggaacagagatcgatgggcgatctatttccctgtactatactggagagaaggtcaaaatcaagactatagaggtggaaagaatagcacttggagtggtaagaaattaggcttgttacaaggtttcagaattggtggagggaactcctttgtgtctttgtatttcataagttta

SEQ ID NO: 45250 - DNA, 145 bp, Zea mays
  Clone ID: MRT4577_141277C.1
aaccgaccactcgtccaagggacaatcagcaaaattaatcttgttatcctccacctttatattccgccgccgttttaaataataccaatatccaaaatccaaaatacattacaatcatttatggcattaatacataccaaaccta

SEQ ID NO: 45251 - DNA, 322 bp, Zea mays
  Clone ID: MRT4577_141278C.1
gggccccaaaaactaaaatttggcttttttaagccggggggttcacatggcgttcttaaaaataacttgttttagttccactgacaaatttttctcttggttacccccccctttaaaaaaattcaacaaattcccatcgtttttttggccatgcaaaaaaaaatcggggggggaacccatgcttgggtaaaaatggttgttgccccgcggatcaaattttattgggggttgggggtattggaaaactcaaactttactcccttggggacctttttttttaggtttccaagctggcgctaacttgaattgccctttccttttt

SEQ ID NO: 45252 - DNA, 278 bp, Zea mays
  Clone ID: MRT4577_141279C.1
ctggcgcgtgagctgcgaggccgtgtggttgaaggccacgtcgcagatcttcagcgagggtgagctggactaccgttgggacccgagcctgatccacgcgcagagcatggttgccatctgggcctgacaagtagtgctcatgggcgccatcgaggggtaccgcgtcgccggcggcccgctctgataggtcgtagacccggtctaccccaggagctgcttcgaaccgctaggcctggccgactacaccgatgccttctgggagctcaatgtgaaggagc

SEQ ID NO: 45253 - DNA, 759 bp, Zea mays
  Clone ID: MRT4577_14127C.1
cctcgaagccggccggggataatttaccctgcagtcactagatatcacgcacattgtataagtcgccttgcttaacatcaacaaggtgtgcccaccctgccacgagcacgagtttgaataacttgcaatgaacctgtccgatgctgaaatttcatcgctacttgcttgcgccatgcttttgatcaaacatttcacccatatgacccattgcttgtcataatgttgcgaacctagcttggtgccctttgctctaacaggactggatcatgcccatgcttggctcggtctacacgtgagctagtaactggactcgattcacatgttgtcatgcctctatccatcttgcttttatcgcaaatattatagactgctgccgagtgcttagattgtctgacccattatgaatataatgtatgcagcttgtgccctccttcaacagggatctacggaatggacttctacgacctgctccagcgtgtgtgctaccgtgcggaacgccgcaggagttgcaagatgcgcgtcggcattcagcaccgctacaccaaggaggactccatcaagtgcttccacgtcaagaacgaatagttcatcctcaacaaggttcacgacaacacattgaaaacctcacctgtggtcaaaacatctctctggacacttctcctcctccgtggcaacggaagacctccacccagctcgacaggctgtcttagtgtataatttgcgctctcagccctcatgtttattctgctatcgctctgt

SEQ ID NO: 45254 - DNA, 377 bp, Zea mays
  Clone ID: MRT4577_141280C.1
cggccggggcacagacacacaaactcaagctcgtcgtaggcagcgagcgactctcctctcccacgcatcgcgccaaggaagagagagagatcgccgctccccttctcggtgtcggtggtgctggcgccctccctcctccagcgagatctggctggacacagatctatctgacaaaatggtgaagatctggtgcataggtgctggatctgagggtggtccaaccatggatcgaagttggcctcaagtgcccagacattgaggtcgccgtcggtgacatatccacgccccagattgaggcctgcaacagtgacactctatcaagctaccagcctcgtctcgatgatgatgtgatgcagtgcaggacctggaacgtcata

SEQ ID NO: 45255 - DNA, 634 bp, Zea mays
  Clone ID: MRT4577_141281C.1
ttccggtttattcgggctcctacctcttgttacaacttgcgcggtgggggcagtgaggcagcaagacgtgaggtccaggatgatgaacaacaacagtggcggcacgacgacgaggctgcgctcaccgagttcctctcatccctcatggactacacccccacgattcccgacgagctggtggagcactacctcggccgcagcgggttccactgccccgacctgcgcctaacgagactggttgctgtagccacccagaagttcctatcagacattgctagcgattctcttcagcactgcaaggccagggtagcagcacctatcaaagacaataagagcaaacagccgaaggatagacgtcttgtattaaccatggatgatctttctaaagctttgcgcgagcacggcgtgaacttgaaacacgcggagtacttcgcagacagcccttcagctggaatggctccttcgaccagagaggagtagactggattaggccaacttgtacggaactagggagggatcgcgtggaatggatgggcatgttggcattcttgcccgatcagatcgatgggatgtattactattaagtactgctactatgactagtatatttctcaattaccattgtcactgagac

SEQ ID NO: 45256 - DNA, 367 bp, Zea mays
  Clone ID: MRT4577_141282C.1
attcgtctcgagctcgatctcacagcaatttgtttactacatgcacatactgactctccaggggggcttctaaagagtgatgtggggaatcgaactgctcttgataactgctatttgctacttgaaagcattaaccaaatacaataccgcacaacgaacctgccaacagcatcaaacaccatagctgggtagcctactaccaaagctaacgaacattcatggccctgctctgaccggacgatatctaatgcactaaccacaggtaccaaccacattaaaagatctttactcacacgaacaaccaccaatatggatgacatatccaggggggaaaggttgttctacagtaagacaaggatctttgcat

SEQ ID NO: 45257 - DNA, 942 bp, Zea mays
  Clone ID: MRT4577_141283C.1
gcacattgtttgtttggagaaatccaattttctactcacggacgccgcccctgtgcctcgccatcgcctcaggtacgcaaggcggccgaacacgagcgcccgccttcgttcttgcctgcgctgcccctctcctcgccgtttattcgggctcctacctcttgttacaacttgcgcggtgggggcagtgaggcagcaagacgtgaggtccaggatgatgaacaacaacagtggcggcggtgccggaggccctggagggggcatgggtacgggagtgggtggagggggggacgggcggcacgacgacgaggctgcgctcaccgagttcctctcatccctcatggactacacccccacgattcccgacgagctggtggagcactacctcggccgcagcgggttccactgccccgacctgcgcctaacgagactggttgctgtagccacccagaagttcctatcagacattgctagcgattctcttcagcactgcaaggccagggtagcagcacctatcaaagacaataagagcaaacagccgaaggatagacgtcttgtattaaccatggatgatctttctaaagctttgcgcgagcacggcgtgaacttgaaacacgcggagtacttcgcagacagcccttcagctggaatggctccttcgaccagagaggagtagactggattaggccaacttgtacggaactagggagggatcgcgtggaatggatgggcatgttggcattcttgcccgatcagatcgatgggatgtattactattaagtactgctactatgactagtatatttctcaattaccattgtcactgagagaatccagacacaagtcgttttgcccatgcgcttttatttgtacaaactgtcaatcatctgtaaccctatggggcccaaggatgattgggcaaacatcatgagttttttgttttct

SEQ ID NO: 45258 - DNA, 559 bp, Zea mays
  unsure (1)..(559): unsure at all n locations
  Clone ID: MRT4577_141284C.1
tttttataatttaaaacgacaacaacaaaaatcttttagaataggctagagttgaaactcaacaaaagccaaaaactaaggttcatacagccgtttctcatacgctcatattaagacaatcttttaagtacgttcaaatatttaagagctgcatagaatccctggtcactactacaaaggaagattaaacttcttgttcatttcaaggataacatccccaaatatctcacagccttgcacgttcttatcccagtttaacaacctattatgaagatcaatcacaaaatctttatcttgatttggctgttccaacgtcttaaataatgacttcacgcacttgagcaggtatgggcctgtcttgtttctgagttggctgacaaaactatgacatttatcttcgcaatcaaatatcaatggggccatatcctcaactacgtcaagccagccaaagatgagatatgctccagtcaatgcccatctctcagcagtaccaatgcagctgcctaagaaaccatcattagtggcatcatcttttgtttttactcgtgctncatttgac

SEQ ID NO: 45259 - DNA, 611 bp, Zea mays
  Clone ID: MRT4577_141285C.1
ccggccgggctcttactctccctacccaatcctcccaatgctcaccttccccttcacactcagaacacgcctcatcaagcatcccgagaaggccaaaaaccgggtacactcggcgaggggcggagaaccttcctgcgggcggagacatgccgccgctctctacaggcaccaccggatagtcatctgacaccgccgccgaccaactccagttctccgagcggcgaagccggccgaccctctaccgtgcgatggggtgcacgaaaggcactggaacgaggacaaggacacatagtacatcctctacctccgcgaggccgtcctcataggcgacaggaccgtggcgctcatcaacaacgagacgtctcaaggtccccagacgagcacgagcttgagaacattcatgcacgtcgtggagggcggcgcggaggggcaggcggataaactttacaggaggattgcctcaagaagaaaggatcaagggcgtccactcggtgaagtgctggaagaagtgacagacatctttggatgaccgaaatgccctccacggggggatcgaggttactggatgcggagcggacgaccaaacacgtcactgactgtggactgcatgc

SEQ ID NO: 45260 - DNA, 264 bp, Zea mays
  Clone ID: MRT4577_141286C.1
gtgggcgccgttgagggtcaaaatcttcttgtggcttgcctggaggaggcggctctggaccgcagacagacgacggcgtcacggactcgatgcgagaaccacttgccacctctgcaatacagcggaagaaacttgcgaccatctattggccacttgcagcttctcccttcgagtttgggatggcattttgtcgcaattggggcttcacaaaccgtcgctaacggactgcaattcagtccttggttggtggcaaagagtgcggga

SEQ ID NO: 45261 - DNA, 536 bp, Zea mays
  Clone ID: MRT4577_141287C.1
aaaaaccgggaaaggaaccccttatttctggggggccccccaccccacccaaaaaaactattattgaaatacccccaaaaagccccctaaaaaagggcccccccccagaggggttgtggggaggaggccgcgggggttgtcaaaacaagggggacaaagggcaacaaatgtggtagttgtaaaaggggggcgggggtagccccaaaccccggggaaaaaagcaccaaccgttgctgtgtcaaaaaagaaacaccgcttgctgcacctagctggctaaaagggagaaaaatttgctgcggcaaaaaaacaccgggggtcaaagcggcccaatgggtaaaaagaaaaaaatgttgttgataaaaaaaggcacaacccacccggcggaaagggaaaaaatgttgccgcaaaaaaacaccaggggtcaaaggaaaaaggggggggaaaggaaaaaaaattgttgctcatataagggaaaaaaggttgccccaacactcgggtgatcaccaggagcacaagttgctgcagctgctgtgccc

SEQ ID NO: 45262 - DNA, 423 bp, Zea mays
  Clone ID: MRT4577_141288C.1
acgccagagtgaaatcctccatgctgaacaaaatgattacaagactgctgacatctacttggttggagcatttgaagcttggggttcactggatgacccaaaagccatctttatcctgaagtacatactctagtgtaaaataatggctaaccaaactgactatgttacaggaataatctcacctatagctgtcctaaaatatctgggtcctaataatcatgctatgaacgctgattcttatacatactctaatagatctctcaagtattttgaaactgcccttcgtgattataagtcccatctgtacgatgaccatattgtgcacagacatatttcatctctatatgatacacttctatagcataatctgcacaggattactgaaccctaattaatgccagatattgctcatatagctgatat

SEQ ID NO: 45263 - DNA, 446 bp, Zea mays
  Clone ID: MRT4577_141289C.1
tgcaggggcccggccggaacgggggggacccacgcgtccgcgaggcggcccggccgtcgttcgtcgtgcgcgccgcggcggaccccagcgggccgatctggtttcccggcagcacccctccgccgtggctcgacggcagccttcccggcgacttcggctttgatccctggggcctgggatctgacccggagagcctgcggtggaacgtgcaggcggcgctggtacactggcggttgtcgatgctagaatcggcgggcatctttataccggagtgcctgaccaagaccgccgtgctaaacacgcccttctggtacaccgtcggcgagcatacacacttgagacgctggaccaccgtattcattatagagctcaggctgatcggctgggccgagggccgtcgctgggctgacatggtcaagcccggtagcgtgcacacccaccccata

SEQ ID NO: 45264 - DNA, 174 bp, Zea mays
  Clone ID: MRT4577_14128C.1
acccgcgcatcttcaaccacacgcaccgtcaagacatccgcacacttaccaaactacaacacgacacttggactccccacccaaccaccggctggctcccaacagccaactcaccaaccactgtcccatccttcacagcccagaccatcaccctggaataagctccctccccca

SEQ ID NO: 45265 - DNA, 879 bp, Zea mays
  Clone ID: MRT4577_141290C.1
cattgggtacctcgaggccggccgggagaccccttctttactctaaccatatctgccgcaaaccgcaacacacaatccagagcgaggtcgtggcgtggactccaaatccttcctcttcaggactcaacagcggagttcgctccgaccacgggccctgctgccatggcggcggcggcagatcttgagcctcagttggggatatcgccggcgacacccgacattgtccgcaagctagctcgaccgtccgggacaaccaccgcagttggctattgctgcactgctctgtacaccagcacggctgctggccccggaaaggtggacggcgatggccttgcctcggtgccgttgcatgcccatgaacattctcagtccgccgcactggataatttggtccaagtggactgtgatcccgtgggcactcaggagtccagcaccttgcctgcactggtgggcgagtcctctggcaaggttgcacagcaagagcagcagcacaaggaaggtgttgatagtgccagagatgcaggtgctgcttctcctgcccctacttctactccggagaacatggagcccacacctcggaggagggggaagaagtcgaccaagggggttcaacgtctcaaagtggccaaagataaagtgatgaagctcaaggtgaccacgcctagtacagtaaaaaagaagaaaatgacagaggatgatattcaacatattggtgcccacaggtctaatagtgcaagacgcaagttagatttggatttacattcatcagaaagtaaaacatgtttcagcagagccgagctgatgattaatttgaagtgcattggcaaagagtatggtttaatcagtgaactgactacaccatagagggagcagagaggg

SEQ ID NO: 45266 - DNA, 704 bp, Zea mays
  Clone ID: MRT4577_141291C.1
atcgtcggagctcgcatagattggcgctctctttgtcagcactatctgactgatcatacccgtgccgttttcccctccatcgtccacctctgtttccaacctccacaatccacatcaaccttccagcgtcgcccgcaagcctcatggccgaaagtatcgcgatcgaccgagcgagtttcccgatcccacactgatgcgtctggttccctctctatcgcgtagagcgtcggagatcgcctaggggaagaagaacggcggagccgaccagagcgccaccaccgggcgattcaccgacctgcatgcctccaacggctgctacgacacccgcgccactctcgataaaggatagagattaataccactgtgctgctgtgatatggatgcacagttgcttgccgttccctcaaccttttggtgcaggttatcctcgtggatccacctgtggatttgaaatctgcattagtatcactaatccttgagacaagggaaaggtgagaatatcgcacaagaattatgcaggcgccatacacatgactggactcggacgtcacactcttatttgctatggctgtgaaatataaggaattgctgctaatgttggtgatcgacacataaagcgactcactagtatagtatggagctcatctttgactcgctaggacagtgcatgcataagcaccggaagctcatgccgacgttattac

SEQ ID NO: 45267 - DNA, 387 bp, Zea mays
  Clone ID: MRT4577_141292C.1
aaaggggggcaggggtttatcatttggaaacaaaacccaccactattgcccaaacatggttcatcttaatgttcaacgccaacttattatttcgactggcctatgcaatgcaacgggaaacaaaaaacacacatgcctttcgaagcatcaatcaatccacgtacgtacaccctatccgatcccaaagacaatgaagtttcctaacataatccttgagcttaattgccggggacgaacttggtggcatatgcccatactttgactaagactgggacaacgatgtcgacaagtacgttctcgagccggtcctttccggttactatggcccgaaccaatactccgaccatggaaaacatgggaaagcggcccttcttgagctccttcacc

SEQ ID NO: 45268 - DNA, 1321 bp, Zea mays
  Clone ID: MRT4577_141293C.1
agcttacactatcaaatgcttttgaaaagtcaagttttagaacaacagtgggagttcgcctcttgtgccaacattgccccaactcagttgcatatacaaaattttcagagatgggccggcctttcaggaaacctgtttgatccatatcaacctgtttgagtgtttatcacgtcgccctccggccggggagcacactccaattcggtgctcggctgacaccaggtagccgcccctcctctatccaccccttcacttgcttggtcttccactcacccctctctcgttattcacccggtctcctctcctgcaaagaggaagatgagctcgctacacgccacacgagcggagcttggcctggttgtcctgtacctgaacaaagccgaggcccgggacaagatctgcagggcgatccagtacggctccaagttcgtaagcaacgggcagcctggcactgcgcaggaggtcgacagatcgaccaccttggctcgcaaagtcttccggctcctcaagtgggtcaatgatctgcatgctcttatcagcccgccggccaaagggactccgctcaccctcgttctgcttggcaaatccaaaaacgcgctgctttcgacgttcttgttcttggatcagtttgtgtggctcggacgaacggggatcgtcaagaacaaggaggcgacggaccgcgttgccaggttatccctgtactgctggatggcttcttctgcctgtgcaggtctagttgagcttggagagcttaaaaggctatcgagatcgatgaggaagcttgcaagagagctgagggacacagataaatatgagaacgagcagtaccaggacaaaatgaggcagtcagatgaacggctcctggccctggtcaaggcggccatggacgtggtcgtggccgtcgggcttcttcagctggcgcccaagaaggtcactccgagagtgacaggagcctttgggttcgtcacctcgcttatctcctgctatcagcaacttccttcccgcgctcctgttgccaaagtcaaagtttgagaggtgtcgccgtcctagtaaaaaaaaaagaggcgacgctggaaatcgatctctgcttcaacaatggatcgtaatataattttattatgcgaatataaggcaggctagctatgtattttttttattaaaaaaatagtacaacaaaatagaacaccagtgattgcacgtatgggcttatcactatcttctctttttgcctagcaatggacaagtaatgttcacgtgattatgtcttaaaatatgcttcctcgaaaaaaaaaaaaaaaaaaaaaaaaaaaaaaaaaaaaaa

SEQ ID NO: 45269 - DNA, 568 bp, Zea mays
  unsure (1)..(568): unsure at all n locations
  Clone ID: MRT4577_141294C.1
agggtggtcgcggccggggtgcgatcgtgggtctcttcgtggttgtggccctggtccgacggtgctcagccgaggagactgccactttgttctcgtcccncttgcggtccttaaacgccatttcccacagctctggatcttgggcggtgttttttttttcttcggcgtgggggtgatcttcatcatccgtgggggggtcgnnttggtccccccccggacacttatttgccaaatcttgttgcgcgtccgtgggggtcttctcttgcgtcttgctgacatggtccaggtggccggcacccttgcctgtcttgccccctcgacttcttgggtgcttggtctgttggaattggttgtttgctgcagtgttgattgtttccttatgtcttgaatcgcgtctcgctgcgtattcttgatgctgacatggtgcttcttctgaacgttggccagggccttgtccggggccttggcctcgcccaagggtggggttctttggctgggttaaccgctccttctcgcttttcgcggggccgtgcttcctgctttaccgcgcggtttggcttcttttttg

SEQ ID NO: 45270 - DNA, 764 bp, Zea mays
  Clone ID: MRT4577_141295C.1
ccggcgcccttcctcgagttttttttttttttttttttttttttttttttaaggaatactagtatcgacgttggaacagtaggagccacatacaagcaaagcatatccaaagacataatcacgtgaacattacttgtccattgctaggcaaaaagagaagatagagtgataagcccatacgtgcaatcactggggttctattttgctgtactattctttttttaaatagctagcctgccttatattcgcataataaaattatattacgatccattgttgaagcagagatcgatttccagcgtcgcctcttttttttactaggacggcgacacctctcaaactttgactttggcaacaggagcgcgggaaggaagttgctgatagcaggagatgagcgaggtgacgaacccaaaggctcctgtcactctcggagtgaccttcttgggcgccagctgaagaagcccgacggccacgaccacgtccatggccgccttgaccagggccaggagccgttcatctgactgcctcattttgtcctggtactgctcgttctgagaatggccacctgataaacactcaaacaggttgatatggatcaaacaggtttcctgaaaggccggtccatctctgaaaattttgtatatgcaactgagttggtgcaatgttgtcacaagaggcgaactcccactgttgttctaaaacttgactttgcaaaagcatttgatagtgtaagctggaatggacttctcgctgttttacgggca

SEQ ID NO: 45271 - DNA, 1360 bp, Zea mays
  Clone ID: MRT4577_141296C.1
tttgctcggctgacaccaggtagccgcccctcctctatccaccccttcacttgcttggtcttccactcacccctctctcgttattcacccggtctcctctcctgcaaagagtattcttgggttcatggctgtctgcagattgtcgcccttgctctgcctgctctattcggcctcagttcattctgtcgtaaacctcacctcgtaactgaaataagccatatgcgccgcgcgtcgaagcttagtgtctgatcgatacgctatccctacaattttctgagctgttgaactcctgcgcccgtctcctcgtcgaggacaggaagatgagctcgctacacgccacacgagcggagcttggcctggttgtcctgtacctgaacaaagccgaggcccgggacaagatctgcagggcgatccagtacggctccaagttcgtaagcaacgggcagcctggcactgcgcaggaggtcgacagatcgaccaccttggctcgcaaagtcttccggctcctcaagtgggtcaatgatctgcatgctcttatcagcccgccggccaaagggactccgctcaccctcgttctgcttggcaaatccaaaaacgcgctgctttcgacgttcttgttcttggatcagtttgtgtggctcggacgaacggggatcgtcaagaacaaggaggcgacggaccgcgttgccaggttatccctgtactgctggatggcttcttctgcctgtgcaggtctagttgagcttggagagcttaaaaggctatcgagatcgatgaggaagcttgcaagagagctgagggacacagataaatatgagaacgagcagtaccaggacaaaatgaggcagtcagatgaacggctcctggccctggtcaaggcggccatggacgtggtcgtggccgtcgggcttcttcagctggcgcccaagaaggtcactccgagagtgacaggagcctttgggttcgtcacctcgcttatctcctgctatcagcaacttccttcccgcgctcctgttgccaaagtcaaagtttgagaggtgtcgccgtcctagtaaaaaaaaaagaggcgacgctggaaatcgatctctgcttcaacaatggatcgtaatataattttattatgcgaatataaggcaggctagctatgtattttttttttaaaaaaaatagtacaacaaaatagaacaccagtgattgcacgtatgggcttatccctctatcccctctttttgcctaccaatggccaagtaatgttcccgtgattatgtctttggatatgttttgcttgtatgtggctcccactgttccaacgtcgatactagtagtctttaaaaaggctatggtcctgtttgattccccc

SEQ ID NO: 45272 - DNA, 495 bp, Zea mays
  unsure (1)..(495): unsure at all n locations
  Clone ID: MRT4577_141297C.1
ctccaagcttttttcttaccgtggacctcactcctgctccctagccatgctgaaactaaagactgacgaggatgctgccgtggcgacaaagacctacacctgaccctttcagcctgagatcaaccagcgtgctttactcatcatcaacaccttctattgcaacaagggacatcttaacgttccggggaggcatcatactcacacanttctctaacgcatggccgtctaggaacagagaatgcagagcctcggaacacgccgtgacgtcgacaagcatgcagacgctcgtatgcaccagcgcgcaagctcgttcatcgcacacttgtaccagcacagggtcttacgaacactctgtccatcatccacagaggaatgccaatgaccaagtccgaccttcgtaacaacctagaaaccatcgacaggcccgtgcaccaagagtacaatgaagcccttgctgctaacgctgatgtgtatctgaactaccagaccggtgtc

SEQ ID NO: 45273 - DNA, 313 bp, Zea mays
  Clone ID: MRT4577_141298C.1
taaacgtgttaaaaatagcccttacagagatttattggatgtctctcaacattcgaagactgtacattaagtaaatgcgtgctattctatcaatccaaagtcatataatagattccaagcttacaatcttgctaaacatattctattctacacaaaatcatctgaacgaaagggcggcatattctacaatcaatgactctaccactgctgtaaagataaactcatcaatataaatatgatgataaaaggtcaatgataacttactacatacactaatctttccttgctgctatacgtgccttttccacgatct

SEQ ID NO: 45274 - DNA, 168 bp, Zea mays
  unsure (1)..(168): unsure at all n locations
  Clone ID: MRT4577_141299C.1
tttntttttttntacttatcggtagctgacgcttagcattatcaagtgatcggaagagttttctctgccaatattatcaggttgatcacatctaaaacaatgtactgactacgttttcgcaagtttattgttaactaaaacgtgataaataaaaaagaatgtggagag

SEQ ID NO: 45275 - DNA, 168 bp, Zea mays
  Clone ID: MRT4577_14129C.1
tttgaaaaaccatgcgtttgacatgcgttggaccacttgtagcgggactcacaaacttcacgggcaacacagtatcgaggaggtacaagacgtgaagatggcatcccaagacatgcacggtctcctttcgttaaatgctaaatttcaaccagggccagttctttctaa

SEQ ID NO: 45276 - DNA, 351 bp, Zea mays
  Clone ID: MRT4577_1412C.1
tcgcttattaggctgctcaaactgagttgtcgttagatattttttttatttctcagtcatttaaagtttgatctagatcatatgtaaatttaagatgcagaagatcgagatcaaacctacgtgacacgaattgacgtagtacatacccgttagactaggttaggactagggtgtacgacagactactgagaaatggtggccttacaggttacatcagtacacaggtggtggggacgacgacctgcgaacgacgtgcgaacaggcggccccaagatactaccgaaaaaaaaactctgggccaccatcgaataccgcgccaagagcaagttctggtacttcctgaggaagttg

SEQ ID NO: 45277 - DNA, 429 bp, Zea mays
  unsure (1)..(429): unsure at all n locations
  Clone ID: MRT4577_141300C.1
aattcggcacgaggttgattctctatttgactctttatttgtactctataaagattaaactctaaatataacatcttacttacaacagactctccaacatgcaagttagcttggctagtgagggagtcaatttagagagctggatagcttgtcaattaaaggtgccctggtgtggaaaagctattttgctattaagtagctaaaatttagcttgacaagctatttagctagtctcttgtagatgctctaagcctggatccttacgcgaatgattcttatgtgcaaatgcagtattctgcggatccctacagtaatgttattaaaaaatacatgggaaagtgggagagacatgagatttaccagtgttctaaccaaagtcngctnncntagccncnagcctagctgagtagcttgngaagctaaacagta

SEQ ID NO: 45278 - DNA, 318 bp, Zea mays
  unsure (1)..(318): unsure at all n locations
  Clone ID: MRT4577_141301C.1
aattnttttttttttttttttttttttctttttagggggagttttcacagaataagttggttcccccatagccatatttaaacacatttgtcattaaacttggaggggcaaaaaacttattcactgtttctttaccggttatcctggtgttgcaatataaaaacttaagtaatgccttttacgccgacgagctaaaaacgtttctaaggtgacacgccttgtacagcttccttttttgtccaggtcgcggcagtggtaaacggacctaaaaacggtttggccataaaggtgacgagccccgggggactccattatgct

SEQ ID NO: 45279 - DNA, 521 bp, Zea mays
  Clone ID: MRT4577_141302C.1
cggccgggccgggaaccgagcgcccttgcccctgcccctgccctagcgcgcgtctgggagcgccgccgccgcctgcgcgtgctctccccggccggcctgctcgcatttgcgtagccgcgccccaaccgctgcagccacgtcgcgcatgccgctcatccctgcccacgacgtcgccttaaccccctcccccacgccggttccatttggagccccagcaccccatttccctctccctctccctctccctcacacgcgcccacacctccgctgccaccgccgttcgcaccgtgctgcatctgcagccacgctgtcgcccgtcacctggtgccccgccgcgccgtttttgtatcgttgcccgccgaggagcctgcgtggagccattgtcgagattgcgatccatttctgagctttgagggatcgaagatcaagcgttggcgaccaagtgatctggctcttcgagttctacaaggttgaagaccctgagcatctgtttggtgaaggttgttgcacaaagatggtgg

SEQ ID NO: 45280 - DNA, 377 bp, Zea mays
  unsure (1)..(377): unsure at all n locations
  Clone ID: MRT4577_141303C.1
agcagtggtaacaacgcagagnactttntttttttttttttttttttttttttttttttttttttttttttttttaaaaaaaaagttttttgttattggcccaaagatggaaagaatgttctttcttgtttgaaacaaatgaaccaaacatggttttcaatgaacaatgaaattccagtgtactttgagtttatactaattttgaagggtaagttctgatgatttgtaaagagaggggggtccatcgagaatctaattagttgcctcatatttttcatattgggagatctcacacaatccactggttttacattgaaatctattgttatgcataatttctggcactatccactgtttttacttttttagacatgcct

SEQ ID NO: 45281 - DNA, 332 bp, Zea mays
  unsure (1)..(332): unsure at all n locations
  Clone ID: MRT4577_141304C.1
tttgtataccttcattagacttagacatgattagaaacggcaacgcaataacgcaaagattcggctgacaatggggaaggggttcgcgtcgtacttggcgatgaagacggggccagagggcggcgacggcgcttttgtgntttgcgcagggtgcgctcatcgacgctgacctgcggaaccttgccttcgccgcgcgaaagctcgccaaccacgccttcgtccttggaggcgggttggggttcggccctactttcctaaagtgggtggcctttctagccgaagtggttctgttgatattggaccgcacgaacctggaaaaacaacatgctgac

SEQ ID NO: 45282 - DNA, 646 bp, Zea mays
  Clone ID: MRT4577_141305C.1
ggaccaacatgatgaatcgattaatcacttgcttctaagctgcacgatagttgggggaatgggtagttaaaaccatgcatacatttgacaggcacgtcaacggtcaaaatggcattctggcatcccagttgcaacctagctgaacaacaaatgctactgcatcacactaacaatcaggcaaaagaacactagaacatccttcgaccagcaacaaagatctagccgctgatgtaactgcagagcaccctgcacttgagcagcctgtcctggacgtagaacccaggcaccaccatgagtttcacccgcgccgatggcggcggctcatggtcctgcgaccgctgcatgtcgagcagcacgtcctccatgtacgtctgctcgaacgccctgccctcctcgacgcgcaggatcgccagcggcgggctgaaggagaaggccagcaggtggagcagccagacgcacttgcacgccacgaagaagcactgcagcagcggctcggcccaacacggccgcgaccagttcatcagggccgacgccacgcagcccatcttctggtcgcagaagcggctgagctccttgcagtggtgcctggtgcccttcctcaggacctcgctccagctcaggttgcgcagcgccacgaacgacgcga

SEQ ID NO: 45283 - DNA, 604 bp, Zea mays
  Clone ID: MRT4577_141306C.1
gggggtgggggggtttttttttttttttttttttttttttttttttttttttttttttttttttttttttttttttttttttttgggggaacacatttttcgcccaggggggattttttagacaatcgatttacatccggaaaaaggggttggggggggccccattttctcaaatgaggaatatttgcccccagggggggggggactaattacacattccttaagccgggaaggggggaaactaattattcgccgggctgccctggcctcgctaaaggtatttatttggtacggaaaaaaacaaaaacccgggaaatgaggaaaggggggataaatagctttggctacccaagatcctcaccgaaatcaaaaaaaaaccagcaaaggggtgcagctgggcaactgcccaaatgccgggcggaaacaaacactggggcattttgggcgggggggccgggtttcccaccggggggacatagggggagggatggcccggggggaacataaccggggtgccaacgggcgccggggccaccatgggcccggggaccggggggcccatgggcgcgtgcccctacatgcccattgggggaaccgggggggg

SEQ ID NO: 45284 - DNA, 557 bp, Zea mays
  unsure (1)..(557): unsure at all n locations
  Clone ID: MRT4577_141307C.1
ggtaatgagtgccagtctatctctgtggatggatgtagcaatggccattccatatcggttgaataggacgttgatttaggtgacacatgctgtgtacaagagcttgctcattttatctacttgtccagtgcatctggcacttaaatatttcttncagtgatctccctgctgatgttcatatgcctgagaacgtgaactagtgactattatgtaatgccggacccaccaatactgtgcgttgcaagctctgagacctgaagagaaactgtacctatgctatgaatgatgacatctattgcgcttatttctatgacaaacatagtatcagctattcaatagttctctatgcatctgatcaaaataatgaaaataaatgctataccacaacaaaaggatcttaacgagctcatatactgtctcttaacatttatgatagccaactcattagatgtattatactgacatgatctaaaaagttagggttgactcatgaagtgaacaagaacttattgctgaaagaagctaaatattgttattcattaaggcgttcatcatga

SEQ ID NO: 45285 - DNA, 341 bp, Zea mays
  Clone ID: MRT4577_141308C.1
aactaaaaaagggccaaaaaacagactttttataaaaaaatttttaaacaaaactttttatacatatggggtttgaaatacatttttgatttaaaggttaaaggtatataaggcggatcttttaactgtttttatcctgaaaaagccaaccaaaaacctaaacttatacatgtccttattgaaaaattcaaaccaaacgggcctttattgaaatcccacaattgcctaccctgcccaaagggttaaaagtcgcaatccacccccccccgttgacagaggagccaagcggggcacacaaaattttgcccacccccctaaatagggaatacttgggcccaagg

SEQ ID NO: 45286 - DNA, 349 bp, Zea mays
  Clone ID: MRT4577_141309C.1
ataaggaatgttgattttaatgcgggttttaaaaacccatgagtttgcgggtatgagtagtgaaagaacaaactcatgcccacgtacctgttgggttttcatttgaacccattaacaaacctatgagtagagaaattgacccaaactcataccctaatagagtaacacatcaagttttgggtaaagggtacacattgcaatctctaatcggatgggagtccaatcactggtgtatgggcgaaatacatgttcaaaaacctttacgttaaaaaaagatgcaaaccggtcaaaaggtgaatttcttgttgggaattgggatgggatatttcttttttccctgtgggggggc

SEQ ID NO: 45287 - DNA, 753 bp, Zea mays
  unsure (1)..(753): unsure at all n locations
  Clone ID: MRT4577_14130C.1
tcatccctcaatttttccaagccgccacagctattctcctccctgtcttcttctcttcttcacggcagcgcgcagcagggcagcagctcgtccacctctccctcccatggcagccgaccagccgagcgccctccctatcctcctcctggcgcgagttccctgttcctcagctccatggacgtgagcccctgcttctccttccccacggcagcgcacagggagctcagctcctccccttcctccctcccttttgctgtccatggcgagcaggagcttttccctcccatggccggcggcttccatccccatcagccgccctggccgagctcccttggagcaggcgctcccagccatggcgtccagaaaaatctccccagccggagccctctgccctccattgtttcagcgcttgaaacaaacccatggcgcccctattgcccagccgtgcagctccctgctggttctccaccccgccgacagcttggagtccgagcaggcacaacaggagcatatccccatgacgcctagcnagctctgcggtcccctccccatagcgcgacgcctctgctcggctccctctctcggcagcgcagctcctcgcagccgaatttcccctgcagcccccagctcgagagnggagctcgccgtcgcccatggcgcccttgtttccctctcctagctgagcgccccttactgttctcctcaagnccattggctgttcgacggatacccgtgagaaaatatgtgttgtgc

SEQ ID NO: 45288 - DNA, 352 bp, Zea mays
  Clone ID: MRT4577_141310C.1
agcggccgaccggccggcctttgggtgcccagacttaaacgtttttgaacaccacagctagaaggacccggaggacgggggcacaacgaaacgacacggcgggggaacccccacggccgcaggcagaaaacagaaaccagagacaaggacacggaccgcggaacgaaggcagaaagcaagcagaggaaggaaccagaaagcacaagcaacgcaccacaccagcgacgcgcactaaaaaaccgagacgcgtcgaccaacggactggaactgtaccgaacgggaccatccacagggggcacgccagcgaaagcctgaggaggcagccggccagggcgaagaacgacgcggaggc

SEQ ID NO: 45289 - DNA, 1565 bp, Zea mays
  Clone ID: MRT4577_141311C.1
ccggccgggccggcgttctaattctcacgcgctcgccacagatctagccctgccgacagcgctctcgtcgccgcgtgtcccgttcacgtcgtcgtccgcccccggcccttgcctcaccgactcgtggccgtcggcagctccacatggggcacggccacgcctgacgcctccacctccacgactgagctgacggctcctctccaagggacggtgcacgacagcgccatggcggttcaccggctccaaccttccccttccggcctatagtgctccaccgttcggtcaccagtggtcttctatgggccacggctgacgggtgcacgcaccgtttcgccttttccagtggtaatacttggcagagaaatcctgagccaagcgcaaaccttctacaagtcctggtaacttattttaggggctagaaacaggcgacgacagtttaggacttgtttttttacaccaatccagccctggattagcaatgatttttatgcagctcttgtttgttacgaccactcatggcaccatttatgcatacatctgaactatttatgctgttgatatgtttctagtgtggcaatgatttttttacatatagatgcttaccaaaagttcataatcttttcggtcggtagcagtagaagcagcacacccaatttgtcatacactctgtaatttttatttcctaaatatgtctttttatgctaatttgaatactctattatgcccaattactagatcacgtgtatgctccgctttgtaaacacgtagaccacaaaattgtacattttttatgttcttccttttatgcttttatactgagttgaattggtcctcacatgatcatgcatcagtacccaatgattcagactcatctaatgcttctgcttccttacatgaatatgcattagcaggtcagtcatctagctctacttactataacaagcacacattatccaccgatgtgattcttattcctgctaatttgaatgtgttattatgctcaattatcagatctcgtgtacgctccgcgttgtaaacacgtagaacaattctcctacattgtttttgttcttccttttatgcttttacgatgatttgaattggtccttttcataacaatgcaaccctagtacctagtccactgtagagcagtatacgacatatacgcccagtacccctagtcattcgtgggcattggtaatatcaccacacgctcccggagtcctgctgtgatcccgcccgctggcccgacttcgtccctgggtgcaggaatgagagggtagagctgataagcataatacatgtacggatttatgctctggatgtggagacaagtagaaagtggtttgtggagcattgagttgtcttcatgagattcagcctattcaggtcatgtactcatgtggcacagcctagaggactaactaaccaagaatactaaagcacataagatgtttaattttctgattttaatttttgaatttctatccaaatatagactctttagtatgacaaccttgcattggtttctttgataacatactagacatggatgactgttgaat

SEQ ID NO: 45290 - DNA, 1394 bp, Zea mays
  Clone ID: MRT4577_141312C.1
tagacacaacaggcaagaaatcacatccacgttctagaaagtctatttttacttcaaaagtactccttctgttccaaataaattagtgttagcatctctgcactctattgcccacttcccccctcatcggtgttttttattgttgcatatcaattttgtggctcaaatgcccctttgaaacatatagcaccaaaattatcctaattaattaattggtttctaactggctactctatttgcaacaatggggatatataaccttaccatgtctgtttatcacagtgcatcttagattgcatcgtattgtaattgttttagttccttgacatactgtttgtgcaacaggaactgcttgatgtacttacggttgggtatctgtgtagctgtagctgccaagttgcctaaagaaaagttcccgacctttcacatgctgccacattgccacaataccttaagagcttttctatacttctatgatttgtgttttcgagatctgagttatttaaatgttgtctgctattttgaatttttatatgaagatcaaagttctcaattgataaagtaattaatataacaagcgaacaacacatagacaaactaattaatgtagcatatagacgaataaggaatcctgaaacattgaccgtgaagaaaattattgtgcacatatgcactctttctccaaaatttggcatttaatcttattgcaacatacttgtacagaggggcgagggttgttcagtgctttgacatgtgtgcaactattcaagcacaatggttagatgatatccccattcattttagattattacattgtggtgttcggcttcttcagtcaagcagcaatcatgcaacatgccttactgtagttttttatcactgcacatgttgctggataaatttatagactggaggattatagaggactaacaagtgctactgggagattctcgagcaccattgaactaagagattccaaatagttctttggagtctattgttgatgttggcggggataatctagcagagatttgtcagattttttgtgcaacacggaggctacatgaggcagcaacgatcccattcttctcgcatgccactttacacaagctaaggatagcttctggtctcactcatggttgtggcagggaaagccgagtcagtagggtttgtcatgtagctggagttatctcagaccgcatattagatgcagtgatgatgtttacatttaccgtgcaagcaagatgacttatattatgccttaggacaataagtattgttttcactctaatgaaatacttggtaaaaagttgtctctgtagttgtatatttgactgtgaatatttgaacccactattataattgttgctaattgaggtcagatttcagaggcc

SEQ ID NO: 45291 - DNA, 368 bp, Zea mays
  Clone ID: MRT4577_141313C.1
cccaataaaaaatcccgcatttagtacaaagaaaatttgcccccttttcaactaaaacaaaggttatgaatcggtttccaattttgcgcaaattcaaagtgttcaaaatttgggttttttttttcaaacaacagttaaaaaaaaatggccctaaaaactgcaaccttttatttaggttactattggtcctggaggaaccagtacaaaaattattgcttggccctaaaaaaagccttttaagcgatcagacccaaaacccggttgttgtagccccacttgtgggtataccaagacacgagctcttttaaggaaaacctaagttcaataccagcgttggaataaaaagggaccctttcagaaaaccttgg

SEQ ID NO: 45292 - DNA, 2443 bp, Zea mays
  Clone ID: MRT4577_141314C.1
gtgtgtatgtatttttttagtacaatagtattcaaaatgtatgaggactctttctttttgattgttttgaacaatgggcgtatgaaccggtggaagaacaattcatttgatagttgtttgtggccaaaatggaactaaatctaaaatttgtggagcaaaccactcaatccagatctctatttaatcaaacattttttgtgttatgatgcaataccacacgtgaaatagccatatggatatgtaacaacataaatttgttcagtggcaaataactttgtataatacatttgttcaccggagtcaattgttgaagttggctgggataatctagcagagatttgtcagattttttgtgcaacacggaggctacatgaggcagcaacgatcccattcttctcgcatgccactttacacaagctaaggatagcttctggtctcactcatggttgtggcagggaaagccgagtcagtagggtttgtcatgtagctggagttatctcagaccgcatattagatgcagtgatgatgtttacatttaccgtgcaagcaagatgacttatattatgccttaggacaataagtattgttttcactctaatgaaatacttggtaaaaagttgtctctgtagttgtatatttgactgtgaatatttgaacccaatattataattgttgctaatttaggcattatagtacaaaaagtgcaataccttgtgaattaattttgtacctcattgtcatttacgggttaactgtccatacattgtattacatgttttctacaacctgttcttatttctcaacgaacagtagcaatcattggtcaggacatgtagcttcatttgttaggacatgtagcttaatgctatcttgttgttttctactgttcataaacgcaggacctgagatctagaaggacacaacaggcaaggtggatgtattcgtagttgattatatgttaaaagcaaatttcggatgacattggtggagattgcttatctctaagacacatctactcattctttgaatggaaatcacatccacgttctagaaagtctatttttacttcaaaagtactccttctgttccaaataaattagtgttagcatctctgcactctattgcccacttcccccctcatcggtgttttttattgttgcatatcaattttgtggctcaaatgcccctttgaaacatatagcaccaaaattatcctaattaattaattggtttctaactggatactcaaattgcaacaatggggatatataaccttaccatgtctgtttatcacagtgcatcttagattgcatcgtattgtaattgttttagttccttgacatactgtttgtgcaacaggaactgcttgatgtacttacggttgggtatctgtgtagatgtagctgccaagttgtctaaagaaaagttcctgacctttcacatgctgccacattgccacaataccttaagagcttttctatacttctatgatttgtgttttcgagatctgagttatttaaatgttgtctgctattttgaatttttatatgaagatcaaagttctcaattgataaagtaattaatataacaagcggacaacacatagacaaactaattaatgtagcatatagacgaataaggaatcctgaaacattgaccgtgaagaaaattattgtgcacatatgcactctttctccaaaatttggcatttaatcttattgcaacatacttgtacagaggggcgagggttgttcagtgctttgacatgtgtgcaactattcaagcacaatggttagatgatatccccattcattttagattattacattgtggtgttcggcttcttcagtcaagcagcaatcatgcaacatgccttactgtagtgtaagttatttacaccaacttcaattcttcataccatgcatctattgtttccttttagtttcaatctatttttcttgatgttatctatgtttataagaaaatctcaagttttgtatatattttagtttttatcactgcacatgttgctggataaatttatagactggaggattatagaggactaacaagtgctactgggagattctcgagcaccattgaactaagagattccaaatagttctttggagtctattgttgatgttggcggggataatctagcagagatttgtcagattttttgtgcaacacggaggctacatgaggcagcaacgatcccattcttctcgcatgccactttacacaagctaaggatagcttctggtctcactcatggttgtggcagggaaagccgagtcagtagggtttgtcatgtagctggagttatctcagaccgcatattagatgcagtgatgatgtttacatttaccgtgcaagcaagatgacttatattatgccttaggacaataagtattgttttcactctaatgaaatacttggt

SEQ ID NO: 45293 - DNA, 836 bp, Zea mays
  Clone ID: MRT4577_141315C.1
gggtacctcgaggccggccgggaaccgtcgacgactccgaccagacatcaagccgtcaaaatgtccgccaactcgctgaacaagatcgcgcccaacagcccttccaggcaaaacccctctgagattgagaccagcatcgccagcgcgttgactgacctcgagaacaatgttcctgacctgaaggcttctctgcgccctctgcagtttgtctctgctcgcgagatcgaggttggccacggacgcaaggctattgtcatcttcgtcccagttccccttctctccaactggcacaaggcccagcagcgcctcacccgtgagctcgagaagaagttctctgaccgccacgtcctgatcgttgcttcccgccgcattctcccccgccccaagcgttccaaccgctcccgcacttctcagacccagaagcgtccccagtcgcgaactctcactgctgtccacgacgccatccttaccgatcttgtctaccccgtcgagattgttggcaagcgtctccgtacccgtgaggacgggagcaagatcctcaaggttgtcctcgacgagaaggagcgtggtggtgtcgactacaggctcgacacctacagcgaggtctacaagcgcctcactggcaagggtgtcaacttcgagttcccccagagccagcagaccgactactaagtgtagacgggttgttgggtaaggtctcgttatatctacatggttcaggagtacggcagggcttcggatatgcatcatgtaccggcatcaaaaaggaatgtgaatgagatgacatgagcctgtaatgggcgcctcttcagataaaaaaaaaaatgacccctctt

SEQ ID NO: 45294 - DNA, 793 bp, Zea mays
  Clone ID: MRT4577_141316C.1
ctcgagccggcgggatctgatgtctcgtcgcttccgttcgcacgtcgggaaacgcttcgtgctgcgctcgcagtatcggatgcactccactactgctgctgctaccgagacgcgggcgatcggcacccgtgctgctgctcgacgacccgccgacggaatccaacgcggcggtgatccgcttcattgtaaaacgcctctgcgccatgagtggataacgcccactcctgtgccctcccatgacaaacaaatcggccgggagacaatggatatcgtggccacctgcactccctccgatatccgtagatgtgctcggggccacattgttaggagtgtcaagaacaccggtcgtgcattgtggtctctatgacgcatcgtctggaactactattgtagatagaaatgatgacctgatgtagtgactgtattggaatcaacattgcacatatgtgtgagatatcatgtgatgtattctggaacgacgtgctggtgctaggggtgtctctgtatagtgcttttcctggaaaagatatataatacgattgcttatgattgctcttgctaccgatatcgacctccgtgtggctgcaaaggtatgcatgcctatgataaataatatcgtgagtgcgatatggaaggagacgttttcctccaagagctttcctgagattatatggacctacacatgctgctttccacttgcttacgatgttagctatcattcatcatatatggccagaattagctgccctcagactccatactataatcccgtaagagagagttacctgaccgc

SEQ ID NO: 45295 - DNA, 455 bp, Zea mays
  Clone ID: MRT4577_141317C.1
ccctttcgacccacgcgttcgcccacgcgtccgcccacgcgttcgcggactcgtgggctctattttgaattttgatgatagggctttaattgaaattgcggatatgttgaacataagtcttgggagtaataaagaagaaattaaatcaaatcttaagtctatcaaagaaatggagaaagataggcaaaataataaggtctcggaacctgaatctaaattgaaaagattggaacaggatagagataaacttttagaaaatgaatgtgaaggagatggaggagatgattcaaagtttgttagaaagtgggtctgagaaagaagttgaggaaccattggacaaagaaaaaatggtcagaaaagagaaaaaagtttctcttagaaaaaaaggaaaaattattcccccaaaataggtgtaaaccaaataaagggaggaaacataaacaaaaaaatatcag

SEQ ID NO: 45296 - DNA, 1635 bp, Zea mays
  Clone ID: MRT4577_141318C.1
gggtacctcgcggccgggaggagacctgccttttcttcttcagcgtgcacattccttccccacttctctctctctctcgtgacgacggcgacggcaacgactggggcgacagtcgctgccgccctacttgccggttgctcggatcttcttcggcccgttagccgtcgacgagcaccaccagggcaaccagatacttcagtggcttcgcaaggatgtcctggtgcactattgagtctgatcctggtgtgttcactgagctgattcagcaaatgcaagtgaaaggtgtacaggtggaagagctttactctctcgatgtgggctctcttagtcaactgcggccagtatatgggctaatttttctcttcaagtggatacccggggagaaggatgaacggcctgttgtcagagatcctaacccaaaccttttctttgcgcaccaagtcatcactaatgcatgtgctactcaagctattctctcagttctcatgaatcgccctgaaattgacattggcccagaattatctcaattgaaggaattcacaggagcttttacaccagatctgaagggcttggctattagcaacagcgaatctatccggacagctcataacagctttgcaaggccagagccatttatttctgatgagcagagggccgcaactaaggatgatgatgtttaccatttcataagctatttaccttttgaaggtgtcctgtatgagctggatggactgaaggaagggcctgtgaatcttgggcagtgcgatggtgctgatgatcttgattggctacggatggtgcagccagttattcaagaaaggattgagcgctactcacaaagcgagatcaggttcaatctcatggccatcataaagaacaggaaagaggtgtacagtgctgagcttgaggaactggagaagagaagggagcagattttgcaggagatgaataatgcttcctccacagaatccttgagcagttcgcttacggaggtgatatcggcaatcgaaactgtcacggagaaggtcatcatggaagaagagaagttcaagaagtggaagaaggagaacattcggaggaaacataactacatccctttcttgttcaacttgctgaagatgcttgcagagaagcagcagctaaaacctctggtcgagaaggccaaacagcaaaagtcagcaagcccgagcacgagttgatggtgaaatgtcaatagactggtagcttttgccgatgtcttctgagcgtcgtgttatcttatcagatacattgccaagtcggcagctcagataagataaattatgaccgatgttatttataccatgttgcacgccgtgatgtatcagcagctatgccattttttttttgcagagcacgtgcgttgttgaagtggttaattttagtcgtttagagagattgtttgagagtaagggtaatggaatggactgaggaggttgaatcactcaatattcaattttaaataatgatgggttccagccctctcaatcccctccattccacctactcctaaacaaactcttaggtctagttttgcaactcttttttgtcaaggaattttcattttatcaagagaaattagttcatttatacttagaaaaatggagttgacaatct

SEQ ID NO: 45297 - DNA, 259 bp, Zea mays
  Clone ID: MRT4577_141319C.1
gcaagagcacgacctcttatgggctaggggccccttttagctctcagactcatgcagcagctgtaaccggggcacggggaatgaaacccacatcatttggactcgtcacatttcaacgggctactgacatgcggatacataggcatgccttgattctatagctgtaggggcactgaatcttcatcacgatatctgatccatagctgcggatcactgtacatacctgagggcccagcaccgagagggctacctgggaact

SEQ ID NO: 45298 - DNA, 562 bp, Zea mays
  Clone ID: MRT4577_14131C.1
gtgctgtgatggctgacaccagctagcgtggtgggcatgaaggcatcatgtgctagagaccggcggcgctgatccacacgagcgacgcctctccatgctgctcctgactctgttggttcgagacagcactccggtgctctaacctgtctggacagggccatgccggctgacttggtctccttaggcgccacaacgctcctaatgaccgtttgagggggtggcaggtcacaccttctgaacatgctcgacgctgatggtcctcccacaccgctgctggtgcgggagtcaaccctgctcccactgtgccttacaccgattactctaaccacttgggcccagggtatactctgcatatgcagccacactgagacgactgcctgccaccacagaggaccttgccgaacataaggaacatgatcacctagaacctgtccaacataaaacatgttcccaggactcccttccatgagccaccgtacgagcctggctctgccgacgagaactactgggacatgaacaaggagtcaccccatggcagcaaaatattgagcgaaagagctta

SEQ ID NO: 45299 - DNA, 209 bp, Zea mays
  Clone ID: MRT4577_141320C.1
gttctttttttttttctttttttttttttccggacattctggtctggttaaaacacaaaatttttaaatttaaaccacaaatgtccttagggctagtgccccaatcccaactcaaggagagatggcttgagccaaacctaaggggcgaaacattccctggcgccaagggcaggattcgctccaccacaaacagactttacaggtcaatg

SEQ ID NO: 45300 - DNA, 587 bp, Zea mays
  Clone ID: MRT4577_141321C.1
tcgagcggccgcccgggcaggtacaagcttttttttttttttttttttttttttttggctttttttttttttttttttttttttttttttaatttttttttttttttttttcttatttttcttttacaacctaaggtccaaatacagtaaaggccaagcccaaaggaggggacaccaacacaaaaccaaccaagccgaaaacaaaggcaaaccggtcaaaggtgaaaaattgttatccggtgaaaattccaaacacaaaaccaggccgaaaaaaaaaagagccaaaaccgaaaaaacaaaaaaagaaccaaaataaaaaaaaaaaaaatgaaaacactgcccccaaaccaaaaaaaaaaactgccaaaccagcaaaaaaaaggaacaagccaaaaaaagaaaagagccaggcagcggaaaaagaaaatttgccaatggtccctaaataacacacaggggtaaggggtccctgcgaggggagcggcctcaacccaacgaaaggcgggaaaaccgctaaacacaaaagccgggcataacgccagaaagagcaatgaaccaaaaaaaaccaaaagccaagaacccaaaaa

SEQ ID NO: 45301 - DNA, 446 bp, Zea mays
  Clone ID: MRT4577_141322C.1
ctgattcttcttttctacggattgtattggccctcctgctggcgaaggaaactaccactatgcctttagcggccttggggcagggtctcctctgccccacctctgcacacggcgctacttggaaggtagattctgcatgtcgtgtcgcagactgacaaggctgtcaatcgattcccacccaagccctatgcttgacgcccccctactatgcatcacctttgcatatcagattcaacaacctcatgtccctgagcttgtctttcgagacagctccatcgcacttacacgcacagaaagtggcataacatttgatcttaacgggattgacggagaccaggaatggaaaaaagaggcacagactcctgtcggcgtaccggcggttcatcaatggaagatcatgagaatcacttccgaccagccgatacttaattaccactatagctttc

SEQ ID NO: 45302 - DNA, 140 bp, Zea mays
  Clone ID: MRT4577_141323C.1
cggaattctcgctcttcttctgctgctaatttcaaataaaacctatccctgtgttgcggcgggtgaccttttaaacaagggctcgcgccgatacttatcctactacttgatacccttcttattaaataacccacttcatt

SEQ ID NO: 45303 - DNA, 478 bp, Zea mays
  Clone ID: MRT4577_141324C.1
ggccgctttttttcctttttttttctttttttttttttttttttttttttttttttttttttttttttttttttttttttttttttttttttttcttttttttttgaacccccgagggaaaaaccttgttattttaaaaacaggggggacggggcacaaatcccccggcatccaatttgttaaaaaaacaacaacctttgcatagaaaatctctgggggatccccccctgaaaaagacccagagtttctaaaaacaacaaaccccttgaaaaccccccgactagttggaccccatatactgggggggggcactgaacttcgggtaacccttgaggaccttgttgacagcaccgaaaaaatcctttttcgtcaccgttttccggggggggggaagggggaacctcccggtttcgggggaaacgccccttatatcccctcccccaacgcgggggcaaaagcgcgccaaaagctcaaaaag

SEQ ID NO: 45304 - DNA, 455 bp, Zea mays
  Clone ID: MRT4577_141325C.1
ttttggttttgtgttttgttgtggtgtgtgtccttgttgttgttggtgcttttgcttttgaggcgaaggaagaagagacgggggccgacaaagcagagagcatgccggcatgtggtggagccaatttgactggggttgagaaaaaccctggggtatcggtaatcccccgccggagcagaggcctgagccttggttttccaggggggactttttctaggttctttgcagctaagaacaaggtagacgtccaaccatggcatcctaggtttttgcctgttgtgccgggagtaaaaaacaggaccaccggattttgcccatgctactatgaagaggctacctcccgttacctgaatgcttactgccttgtcggcacacgtcgattttttcttcgctcaagatgaaggagcccccccagcaaaaggggcagttgccaaaacaaccacaccgccaccgga

SEQ ID NO: 45305 - DNA, 442 bp, Zea mays
  Clone ID: MRT4577_141326C.1
cgacgaattgaaccgagcactagttgagattgacgacctcgccaaggatcttgaagacgtggcagtgcaaactcagtgggaggtagaaaatatggctaagagtgaagtgaaagaacaaccacaacaagaggaagcagtagaggaccttctcatacatgatggttcagaagacgagctactgatagacgaagagtcaccaattaactatgaagaccttgtgggctacgacgatggtcgtgactactcaaccgacgacacatatccgtactagtgttctaggttaaacttcagtacaagtattgtagcatgtttaggtctatgttcagctgtagttgtcggttggtatgttcatgcttttgggggagtttaatgttctggtctatgtaaactgaatccggttcaattactacaataattattgtgttaatgtggactatgtttg

SEQ ID NO: 45306 - DNA, 149 bp, Zea mays
  unsure (1)..(149): unsure at all n locations
  Clone ID: MRT4577_141327C.1
gtgcgccgctcgagccggcctttttgcgagcaaccctagcgcccnnanttttccacaaatagntgnaagagaaaccgccgcgcgcacagcacgcggagacagggttgccgcctggccacggtctgccctcgcgggcgcttgatctccta

SEQ ID NO: 45307 - DNA, 2608 bp, Zea mays
  Clone ID: MRT4577_141328C.1
cattgggtacctcgaggccggccgggacttcccctctccctctcccgtccctcagtccgctgccggtgctgcatcagttaggtcagcggcggcggcgccgctgatcaggtcaggtggtgcccaggccgttcacggaccgagtcctcccgtcctcgtccgacgcgagggcaatcacccacacgggacgggacgccttccgaagcgacacccctcctctggccagcgtcccagcaacaacgaagctggctgatgagatatggatcaactgcttccaagacaagctcgccttcagacatgatgaggagcgaagtaactgaagctgcaaagctactgaacctgtggaatgaatgggggttacagatcctggtccttgtaagcttcgggttacaagtattcctcctcgttttcggaggagtccgccgtcatagcagctccactgccctgacgttcttcctctggtcggcatacctactggccgattccacagcgatatacaccctgggccacctatctgttgacagtatgtcagacgagcaccagctggtggcattctgggcgccgttcctattgctgcacctcggtggcccagacaacatcacagcgtatgcactcgaggacaatgcgctctggctacgccacctgcaaactctcgccgtgcaggtcctaggagctgcttatgtgatatacgagtacatcgccagcagaggggcattgctttttctggcctccttgtccatgttctttgccggtcttctcaagtatggcgagaggatatgggctctcaagtgtggcaacatcagcagcatccgcagcagcatcagcatccggaagatcaagactgacccttatcagctattgactttgggtactagcgaagaggatttgctgcttggagcccactcccagtttgatatctgcaaaggtgtcttcgccgatatcataatgctaccaactcccttagttcgttcacagcctaaaccacgttctgtgatatcttatctgggagaggatctatacaagttggttgagatggagctgtctctgatgtatgacttcctgtacaataagcatgcagtgatccacacatggtatggctgctacatccatttcgattcgcggtttggcacaggcacaactttccttttgtgtcggtgaactatcagaaacaatggaaatcggtacagcagagtggatgtggctatcagttatgttttactggttggggctttggtcttggaaatcatatcagtgtgcagagctgtactatccacctggacatgttctttgttgcaccgcaggggcaggggatgggagtggtctctccacattgtcacttcccttggtcagcgtgtccatccagcaagtaggagactctggtcgggctccattgggcagtacaacttgttccacctgtgcacccgcaacaccaacgagatagggagcagactagcaacaaaactggggctcgaggactggtggaacaagatgcacttctccggaactttcccacacgctaactcgtctttgtcaatacaagatatcaagaaattggttctgcaagcactgcgaagcaaagagcaagcactgcaacaccaggatactgatttgaactcaagaggcagctttatactgaaacgtatggaggcctacaaggactttgctcgctggagcgtcaacattgacttcgacgagagcatccttgtttggcacattgcaaccgaggtgttcatcaggaaatccaaggccagacatgcaaaagaactccttgaggctactgaggacactgtcgaacgcgatttggtgataaggacaacccagtggcgccatcccctgcaagctggaacccgtactatattcttaaggaattgttccaccatgatggtcccagttgctccaggataccacggagggagaagcttgcagaggtggcctggagtttctcccaatttgcactgggatcagtaaaggcaccaaatccacatggggactccatccgtgacagtgctaatatgtatgcaatcttgctcgccaacgagcttatgagcatagagttgcagtggcaagatcagcgtgacactttggaactgatcctgggggtgtgggtggagatgttgttgtatgctgcggaccattgcagccaagagtcccatgccaggcagctcagtaatggctgcgaattcatcaccatcgtgtcgttgctggcacaccacttcaagtactactctggggccttcagggacgccgacaacctaggtgaagataaacccgcaagtgaaaataaccccgttactgtaaataatcccatgagtgaaaattgtgcaaacttggtttagatgagttcgcacaattttcatttgaaatgacctctctgtcagttcaggggaaaaacctgaggattcatgactccaaacaagagtaaatatatttatctgtagatgaacatagtaattaaagtgctaggattcatcaatgttagctttggactctacattcaacagtttgtaaggtgagtctgactgtgtgtgtgtgtgacatgctcatatatcttccatgatcaaggtaatgatcggcgttgagtgtgttgctcaaccgccagtatacaatatgc

SEQ ID NO: 45308 - DNA, 512 bp, Zea mays
  Clone ID: MRT4577_141329C.1
aaccccacccaagggcccacattaaaaacaaaaaaggaaggaaccaaaagggggccccccccaagggggatttaggggggggaaaaattctttggccccaaaaaaaaaaaatggaaaaaaaggcgggccccccacaaaaaataaggggacccgaaatccccccggatatcaccaaacgaccaaagtcgggtccttttcctggaaccaaaaaaccaggggggccacaaattatttttggcaaactaaacattgttaaaaacgggaacggcttcccctttgggaagtgaaccccgcaaagggggccacccagggccttgttcatgggaggaggaccacatttaaggattgaaatgccccaaaagggcccggaacaaagaaaagggataatttctttaaaaaaaacccaaaccaccgttccatttttaaggaggcggattaacccaaagaaaatttaaaaggggccaggcccagttaaccggggttggcttttccccccttttccaaaccgtttt

SEQ ID NO: 45309 - DNA, 521 bp, Zea mays
  Clone ID: MRT4577_14132C.1
ttttttttttttttttttttttttttttttttttttttttttttttttttttttttttttttttttttttttttttttttttttttttttttttttttttcgggcacccgggggcggccccggggggaaaaaaaaggggggggtttgggggggggggggtcccactaccgggaaatccgcacaaacgggcagccgggactgggaaagggggcccatggggcccagggccatttgagcgggggaaaccagaatgggagggggaaaaaagccctaaaaaaaaattggaaggggtggggaaaaaccggacaggggactccaggccccttcccgttccgttatggggggaattggagggggagggaaaaatttaggccagccagccaaaacaaaacccgccaaaaaaaaaattaaggggccccataaaagggggattggggggggaccaaaggggacaaaatgccccacccccaaggggggaccgggtaaaggggaaaaaaaaatactggggagggggggtgggg

SEQ ID NO: 45310 - DNA, 269 bp, Zea mays
  unsure (1)..(269): unsure at all n locations
  Clone ID: MRT4577_141330C.1
ggtaaaantggagccagaatctctgttgaataccacntntttctcatggttactcaaacagctattgaactgtgtacacaaaaataataattgcatattgtatactggcggttgatcaacacactcaacgccgatcattaccttgatcatggaagatatatgagcatgtcacacacacacacagtcagactcaccttacaaactgttgaatgtagagtccaaagctaacattgatgaatcctagcactttaattactcggacgcgtggg

SEQ ID NO: 45311 - DNA, 918 bp, Zea mays
  unsure (1)..(918): unsure at all n locations
  Clone ID: MRT4577_141331C.1
gnnaaaangaaattctttccgttgtgcgcgtgcagctgccacctccacctttcctcgttctgtcgccgccacccgcccacccccacctcctgtcgccgcctccacttccaccatcccaggccctctatcgtccctcagtccgctgccggtgccggtgccgcatcgggtagttcagcggcggcggcgctgctgatcaggcggtgcccaggccgtccacggaccgagccctctcgtcctcgtccgacgcgagggcaatcacccacccgggacgccttccgaagcggcatccctcctctggccaacgtcccagcaacgaagctgactgatgcgatatggaacaactgcttcctagacaagctcgccttcaggtatcgaagtcgaaccaaaggaggttgaagccatggccctcatcgtagctgcagctggaggaaaccttcttgtcagaaagttggtcaatttaactccctcgcaaacatgatgaggagcgaagtaattgaggctggaaagctagtgaacctgtggaatgaatgggggctacagatcctggtcattgcaagcttcgggttacaagtattcctcctcgttttcggaggagtccgccgtcatagcagctccactgccctgacgttcttcctctggtcggcatacctactggccgattccacagcgatatacaccctgggccacctatctgttgacagtatgtcagacgagcaccagctggtggcattctgggcgccgttcctattgctgcacctcggtggcccagacaacatcacagcgtatgcactcgaggacaatgcgctctggctacgccacctgcaaactctcgccgtgcaggtcctaggagctgcttatgtgatatacgagtacatcgccagcagaggggcattgctttttctggcctccttgtccatg

SEQ ID NO: 45312 - DNA, 239 bp, Zea mays
  Clone ID: MRT4577_141332C.1
ggcccggacgagcggaggaggatgactggatggctgccggacgagcggctgcggcagccaagggggcggcagcggcgcaagccatgctcgagggaggcgcggacaccgaccgctacaacgacacggttaaagaccgcaagaacaaagacaagtccacaagagactactgcagaaacgcctgggacaagacccgagcgcccgacgcggggccccagggccccgacgccggacaccccaaa

SEQ ID NO: 45313 - DNA, 353 bp, Zea mays
  Clone ID: MRT4577_141333C.1
gtcaagcgtacttccacgcgtccagattgggaagctgctaagtgggctgcaaaagtatgagaggtcgagtgcccatgctgatcccagtcagctattgtcaaaactactatgcagagtggtcattttggtgagggtgggcgtttaacgcaatgagatgaaacatccttcgagtgtgcgtgtgtcatgaacgccttgggtgtggatgacgtagctgagatgtaccgtgctcatgcctgaggattatcaccgatcatgagtgttggtgactcttgaagcaaagactgagatagtatcctttagggacatgctgatggataacagtgtattgtcataattactgagtaagagagctc

SEQ ID NO: 45314 - DNA, 806 bp, Zea mays
  unsure (1)..(806): unsure at all n locations
  Clone ID: MRT4577_141334C.1
gccggccggttcgggggacgtttccgttgtgcgcgtgccgcgtgcggttatctcctcctgtcgccgcctccacttccaccatcccaagtgctccctctcccgtccctcagtccgctactccgctgccggtgctgcatcagttaggtcagcggcggcgccgctgatcaggtcaggtggtgcccaggccgttcacggaccgagccctcccgtcctcgtccgacgcgagggcaatcacccacacgggacgccttccgaagcgacacccctcctcctctggccaacgtcccagcaacaacgagaatggtagttaactgtttaaagaggaatgcgctctgcttcgcatctgtgtccatgggcgcaagtataataatgacgccatatcaactgtacagagctggctgatgagatatggatcaactgcttccaagacaagctcgccttcagacatgatgaggagcgaagtaactgaagctgcaaagctactgaacctgtggaatgaatgggggttacagatcctggtccttgtaagcttcgggttacaagtattcctcctcgttttcggaggagtccgccgtcatagcaactccactgcccttgcgttctccctctggtcggcatacgtactggccgattccacagcgacatacaccctgggccacctatctgttgacagtaggtcaaacgagcaccagctggtggtgttctgggcgccgttcccactgctgcacctcggtggnccagacaacatcacagcgtatgcactcgaggacaacgcgctctggctacgccatctgcaaattctcgcc

SEQ ID NO: 45315 - DNA, 1172 bp, Zea mays
  Clone ID: MRT4577_141335C.1
ggactggtggaacaagatgcacttctccggaactttcccacacgctaactcgtctttgtcaatacaagatatcaagaaattggttctgcaagcactgcgaagcaaagagcaagcactgcaacaccaggatactgatttgaactcaagaggcagctttatactgaaacgtatggaggcctacaaggactttgctcgctggagcgtcaacattgacttcgacgagagcatccttgtttggcacattgcaaccgaggtgttcatcaggaaatccaaggccagacatgcaaaagaactccttgaggctactgaggtactatccaactacttgatgttcttgctggtggtgagatgtatcatactaccaggcgctgcacggcataacatacatctcacgtcctgcgaacaactagaaggacactgccgaacacgatttggtgataaggacagtccattggcgccatcccctgtaagctggaacctgtgctatattattaaggaattgttccaccatgatggccccagttgctccaggatcccacggagggagaagcttgcagaggtggcgtggagtttctcccaatttgcactggtatagcttccctgaccattcaactgaaaaacatttcgttgggatcagtaaaggcaccaaatccacatggggactccatccgtgacagtgctaatatgtatgcaatcttgctcgccaacgagcttctgagcatagagttgcagtggcaggatcagcgtgacactttggaactgatcctgggggtgtgggtggagatgtcgttgtatgctgcggatcattgcagccaagagtcccatgccaggcagctcagtaatggctgcgaattcattaccatcgtgtcgttgctggcacaccacttcaagtactactctggggccttcaggggcgccgacaaccttggagaagataaacccgctagtgaaaataaacccgttactgtaaataatcccatgagtgaaaattgtgggaacttggtttagatgagttcgcacaattttcatttgaaatgacctctctgtcagttcagggaaaaacctgaggattcatgactccaaacaagagtaaatatatttatctgtcgatgaacatagtagatagagtgctaggattcatcaatgttagctctggactctacattcacagt

SEQ ID NO: 45316 - DNA, 890 bp, Zea mays
  Clone ID: MRT4577_141336C.1
ggccgcttttttttttttttttttggtagtataatcaattagaacatatttatagtcccttttttacgaagaaaatcttttgaatggcatttgtgcgaagcgcaatgtttcgagtcccaaatatgcaattatctccctgggctctagctatacacgggatactgtcaaaccagcccttaagagggaattgagggaacctgccgacagaaatgaaagatagagcagcgaccacgactctatgattgcttcggtgcttcctccccgttccgttctcccaatcgcggctaagtctccgcctccagagacagatgtcggcggcgacggaggttgcgccagttcagcaaccgagccatccggcggcggcggggtggctcggcctcggtctgctcttccagatcctgctccggatcatccgctcctcctgggcgcagcttctctccttcgtgcgcctgcgccaccggctcctcccagttaccgcgtcgcctgagctggccttcgtgcagctcccacccgaggcgcctgctgacgcgtcgcctccgccgcttcggcggctcatggtacggacctccatgccttcggcctgctgggcacgcgaaatgatggtgactttggtagtttggacatttggagggccaaggatcagttggaaattggaactatatatggggttattcgtaataagactggttgcaacggttcactcttggcctcccctcccctagtcctatagctcgcgtaggggctacacagcaactcttgaacccgcaacggcgtcctctacaaagcgtttgaaagaaaagaaaagaaaatagaaaatgaagttagttatgttagttatgtagaaatatatatttaatgtgtagagggatatataagaggatttatagggg

SEQ ID NO: 45317 - DNA, 612 bp, Zea mays
  Clone ID: MRT4577_141337C.1
gaaaaaagaatctaaagagcaaggagcgcagcctgaagcaccacttcctgcactcactgtgctaactgctcaaaccggagtaaaaacagcccatcaccacaaaagcctaccaaggatgcgctcttccttgccctgagcctcctgtattgctgaccaccgcatatgtcatgttaaaccaactgaactggcccagtccatccaacatcgccagtcaggtcgaatccctccccttacagccacgggagctgcccaatcgacgcgctcaatgtcaaggggcgcgccaacatgctaggactctccaaggccgctctaccccaatacgaacaatgctgcacgatgatgcaagcactggcggacctcaacgccttattgtgcctctgcaccgccatctatgccaacataatcacaatccacctcaaaacgacccttaaactacacttcatcatccacaactgcaacaagatttgcccagaggacttcacttgacccaaataacctagtgatcccttgagtgctccatctcgcgaatctactcacgagcatgactaactcttacaacattaaagaacaagactgtcgttgcaacaaaaaaaaaagaaaaaggccctatgg

SEQ ID NO: 45318 - DNA, 284 bp, Zea mays
  Clone ID: MRT4577_141338C.1
ttcctcctagcacagctagcgcttgctccctttcgtctgagatcatgacttgcgggagctgggagtgcatctgcggcgtcagcttctcctgctgcagctcatgcaactgcatgttccttgacgtggagaccgccgtcgtcagcatcatcaagaccatggttcttgctgtgccgaccaccaaggccagcgctggcggtttctatgcggtcacctagggcggtggcttcgactgcaacacctgcaactgctgtaccagctgtgctttcttctgttctagctgcaac

SEQ ID NO: 45319 - DNA, 376 bp, Zea mays
  Clone ID: MRT4577_141339C.1
attcggctcgaggtcctgtgctgccttttttcccatgggagcatctctttccctgggggatggtcgtgatggtgttggcacatgacaagagttgtgctaagataagaacatatttgacgagaggccatgctggcggacgctgtcctgtatggcatatactgtatgaggctggagcatactggtgcacttggatacacagatggaccacgtgtatggcacgactctgaaaagaagcggcctggtatggccccctaccatggaggcggtaaggggatccatgttggcatgcaggagtgaacgacataatttattgtacgttatcaagccattgcctgtcaattgaagtcactgaaggataacatccaggctgctctga

SEQ ID NO: 45320 - DNA, 508 bp, Zea mays
  Clone ID: MRT4577_14133C.1
ggccggccgggccgggtcttcacctcgccgactgccttctgcgcctccctttcggactctgtacctagaatctcatctctctccacgtggaaaatcaaacaatcacatgtagtgtgccacaggatccgagattttgaccaccacagaacacatgaatctacatgattgcattcccgaccagacgcgcgtaccacgacgcccgacaacgagactgccgcctcgaattcgtcttcctcctcgcacagtctgatacctcccacgaactcttagttgagcgagtagagaggtgtcaccattgtcacctgtcagctgaagtctgctatcaccgagcactactgcttttgcgactgtactgccccctgtctttctctgcactctctccttattcgtactcctgccaccctccaaggcgtgactgtggtaggcattactcattgaccttcacacactggatggctttagcgtctcggactcatccagagatggccagacccgcgcacatgcctct

SEQ ID NO: 45321 - DNA, 407 bp, Zea mays
  Clone ID: MRT4577_141340C.1
aattcccgggtcgacccactcgtccgcccactcgtccgggggacactatcctgggttatagagcggttcaggttaattggaaagatctggactattgcaatgtttgtgatatggatgaggagtatgaagacaacttattcttgcaatgtgacaagtgtcgtatgatggttcatgctagatgttatggtgaacttaaacaattggatggaggactttggctttgcaacttgtgtcgaccaggtgcacctcgtgtgtctccaaaatgctgtctatgtccagtcacaggtggtgcaatgaatcctacaacagatggccgttgggctcatctcgcatgtgctatatggatccctgaaacatgcttaaaggatgtaaagagaatggaacctattgatggactgagcataatc

SEQ ID NO: 45322 - DNA, 651 bp, Zea mays
  Clone ID: MRT4577_141341C.1
aatctcagtttccaaggtaaacttcagagaagcgacgaaggtagacgacgatggcggtgtcggtggagctgcccaaggagtacggctacgtggtgctcaccgtggtggcctacgccttcctcaacttctggatgagcttccaggtcggcgccgcccgcaagaagtacaaggtgttctaccccaccatgtacgccaccgagtcggagaacaaggacgccaaacccttcaactgcgtccagagggggcaccagaactcgatcgagatgatgccgctcttcttcgccacgctgctgctcggcggcctgcagcacccggtcgtcgccgccgcgctggggctcctctacaccgtcgccaggttcttctacttcaagggctacgccaccggcgtcccggagaaccgctacaagcttggggggctcaacttcccggcgataatggggttgatcatctgcacggcgtcgttcggcatcaaccttgtcatcagggaagcgatctgaggctccggactgatgcctgacttgatagccgttgtgactggatcactggagtcatttcggcgtggtggtgatgatgtcttttgaagtgtcaaatgtgtgtgtgcgtttgttttactctcagaataaagctggatggagacagttttgcagtccg

SEQ ID NO: 45323 - DNA, 300 bp, Zea mays
  Clone ID: MRT4577_141342C.1
cccttacgccttcgctcgcgccgccgccgtctacaccgctacgccccgcaccttgctggaggtcgtgtcgccaagatgacgaaacgcaccaagaatgccggaattgtaggcaaatatggaaccaggtatggtgctagcttgcgtaagcaaatcaagaagatggaggtatctcatcataccaagtctttatgcgagttctgtgggaagtttgctgtgaagtaggaaagcaatttgtaattttgtggtgcatggtctgtggtaaggtgaatgctggtgatgcttacaccatttatactgcta

SEQ ID NO: 45324 - DNA, 181 bp, Zea mays
  Clone ID: MRT4577_141343C.1
ggaacaatacctttttctttttatattaatagattaatcagggtaatggttaaaacggcaccggcaaccatgggggagtatgaaacattattaattaaccactgactgttaatgacttaacataacttagtaagcaaaggctattctacaagaaaatatttcttcaacgggggacaccccc

SEQ ID NO: 45325 - DNA, 730 bp, Zea mays
  Clone ID: MRT4577_141344C.1
atctctctcgtttccaggaaggaaggaagaatatccagagaaactccagagaagaagaagaagaaggtcgacgacgatggcggtgttggtggagcggaccaaggagtacggctacgtggtgctcaccgtggtggcctacgccttcctcaacttctggatgagcttccaggtcggcgccgcccgcaagaagtacaaggtgttctaccccacgctgtacgccatcgagtcggagaacaaggacgccaagcgcttcaactgcgtccagagggggcaccagaactcgctggagatgatgccgctcctcttcgtcacggtgctgctcggtggcctgcagcacccggtggtcgccgccgcgctgggggtcctctacacagtcgccaggttcttctacttcaagggctacgccaccggcgtcccggacaaccgcctcaagcttggggggctcaacttcttggcgatcatcgggctgatcctctgcacggcgtccttcggcatcaaccttgtcatcagggaggcgatctgaggctccggactgatgtgcctgacttgataggcgtttgtgactcgagtcatttagacatggcggtggtgtcttttatagtgtccaaaaatgtgtgtgcctctgttttactctcacagaataaagctagatggagacggtttgtaacatcgaggttttgtagcttttgcagcacagttttaaatatggaggtgaatctccttccaattg

SEQ ID NO: 45326 - DNA, 308 bp, Zea mays
  Clone ID: MRT4577_141345C.1
ctttttattttttttttttttttttttttaccccttgggggaaaacaccgagaaacatgggttgttcgggtttaaaacaataccgtatccaggggataaaacacggcatttgaacatggaaataagttccctcttggccggggccctcgaacagataggaagccaaatggcatacttgaagatccaccctcattgactgctttctagaagccattttaaacttatgagcacctgccctcaacccctttgccaagttctatcggaagacattatcttcttaacagcttgggcaaatttcctctttcaga

SEQ ID NO: 45327 - DNA, 269 bp, Zea mays
  Clone ID: MRT4577_141346C.1
gaccatctaccgtcgtttctccctgaggcatatcaacccgaccgacaacctctaggtggtagattatggcatccccatatattggcatatctatagaatgccgagcgttataacacaaacattgctattgtctacttcaaagacagaatctttatcatctacctccactacaatttctgggacatgaccatcagctgccaccatcagaggcttttgaatatgagagccgccaggaagaatcagaacaggtgccatcgcattgtcatgag

SEQ ID NO: 45328 - DNA, 698 bp, Zea mays
  Clone ID: MRT4577_141347C.1
cactagcgtctcccgagcccaccaggacccgacccagatcttgccgttggcagctcaactcccgtgtaggtgagccggctactcccctcccacccccaccacccgagagtacacggcgcctcttcttcaaaagccctccctttttgttttctcggcgctcctcgggggttttggtccgccgaggaggggtttggtgcgcccggtaccggagaatcttggcgagaagtgcctagtttccgctaggctggttggtgggaggcgggtgcctggtgccgcggcttcagccatggaggcagtcgcaatgtcgccgtcctccgtctcgtcccacaacctcgacgccgcctccaccagcgacgacatgccgtcctcgcaagagggcctcctcttctcggacagcctcaaggacttgaggaatctgcggtcgcagctatactcagcggcagaatattttgaagtattctacacaaacaactcgcacagatctacggtggtgacgagtttaaaagactacgcagttgaggcactcgttagcacggttgaccatcttggctttgtgtcgtacaaggtggataatctcgtcaatgaaaaggctgacgaggttaatgaaacagaatttcgagtatcgtcggttgaacagagggtaaagatttgccggcaggcaattgaccaggagggaagatctcaacagtctcttctta

SEQ ID NO: 45329 - DNA, 673 bp, Zea mays
  Clone ID: MRT4577_141348C.1
ccggccgggaagcaacaatcatcaacttagtcctaccaccatggctgacatcaaagacctacatatcgccatcatgggcgctggcatgggtggcctaggagctgccctcgcccttgctaaacggggcttcaagcatatcgacgtatatgagacagccagcaatcttggttttgtcggagctggtattcaaatgcctcccaatgtgggaagaatccttgatagattaggatgctggaacgacattgagaaagaggcaactcgtgtcgctggcagcagtattcgacagggatcgaccaatgaagaactcgcccatgttgatatgccagacctaaagggtcaatatggttattcgcacctctgcggtcacagatcatccctggctggccacatgtacgaagcctgtaagaaacaagatagcatcaagtttcacttctcaacaagcttggtcgaggtcgaaaccttctcacccaaggtatccttcaagctcaagcccagagacggagagccctacacaagccaagccgacattcttctcggtgcagatggcatcaagagtgtcacacgctctcaaattctacagcaagtagatgccacgcctgaagaggccgagactggccaggctgcctaccgcataatgctcaacagagaagacatggctcatgaccccgagctc

SEQ ID NO: 45330 - DNA, 620 bp, Zea mays
  Clone ID: MRT4577_141349C.1
ccggccgggatagccgcctgtctcttctcctccagagctcggcgccaccggccaccggcaccatctatcacgagccccgcttacggaacgtcagcatggtgttcgtcagtgtgatcaacgatgcagctcaagaccatgtacaacgctgataagatccgcaagaggaaggtcatgatcaggacgcctgccaaggtcatcatcaaggtcctgacggtcatgcagcaccacggctacattggagagttcgagtacgatgatgaccaccgaacggtcaagatcgtggtcgaactcaacgggaggatgaacaagtgaggcgtcatcagtcctcgctttgatatcggcgagaaagacattgagggatggactgcaaggctgctcccgtccagggagatcggatacatcgtcctcacaacttcggctggcatcatggaccacgaggagggccgccggaagagagtcgtatgtaatgctctaggtttcttctattgaagaagctgagaatcatcgctatagactgcctgtctgtctgactctctcagactagagtacctgttattgtactttaacatgtctctctcagactagagccgccttcttttacttgaatattggggactgca

SEQ ID NO: 45331 - DNA, 356 bp, Zea mays
  Clone ID: MRT4577_14134C.1
agggaactccttcttcaaacatcacttcttttaggggttctacaagtcaattacatatagatgaatgcttgctatggtatggaaatgcatttgaagggaacaaacaacccatccttaatacacttttctaccaggggcataaaactagtcaaaacactgtaggattatcaagggcacgagaacatggctggaaaggcgctcggcggtgaaaagcttggccggacccggacagacggcgctagctgaccatgaacgcgaaaatagggtcaggataggaagctgcgctggaaaagtctgaaggggggcagttacgctctggggggggcagagacgagagcacccacgaactctatgaa

SEQ ID NO: 45332 - DNA, 568 bp, Zea mays
  Clone ID: MRT4577_141350C.1
ccggccgggtgatcctcaagctccagccaggttgcagtgtgtgtgagggtagggaaatcttctggccacaccagtggtcacctctccccttcccgagtttggccagaccctaggaggcgaccatcagtcagcagttagtccacctcgccgtgatcagaagtcccagcacgaggagctgaagattcaggctgaagtcgcatacatgaagaggaatctactccggcggctgctgatcaagtggaggagccatgtaactgggtagcttgaatagggcatctagacctcttcactgcaacagaggatatagttttgtgctgctgctgatgtcgctaagtgccggcggtctcgggcttcttatataagtataccccactctttatctctcttattgaggatgggcacttgagctagcatatattttacacttataaataattgataacagtttagacgttatttctttgaatcacctttgtaatcaccccggccgtggacaatgcataagttttgtaacctggaaaatttggtactaagatttccgctgcaaagaaaagaaaaaacaccgcac

SEQ ID NO: 45333 - DNA, 473 bp, Zea mays
  unsure (1)..(473): unsure at all n locations
  Clone ID: MRT4577_141351C.1
cgggacgacccacgcgaccgctcgaacgangctaccccaactcgacggccggaacacgacaaccggagctccagaggcgagggggacggcgacaagaaggatggggcgcaacccaaagcactcacacgggaacaatacaagaacatgactcggggcgacagacacaacacgaccggcaaaacgcagggcgatggaacggcgagcaccacaaaccctactgacctgcgtgtacgaataaaagagaacaccggaacggatgcacccaacaggcctagaagaatagcgtatacagaaacaggaacgagaggacacatgccgaggctccggagaagacaaaagaatcatgtgaagaggaagcctacaatttccaagaagactattactcacaatgagagcatcaaaggcccgcatgaaggagaaggccagcaagtggactccttgggatgaactaccttctggaatctcttactctc

SEQ ID NO: 45334 - DNA, 252 bp, Zea mays
  Clone ID: MRT4577_141352C.1
attgtctccacaagtaaaaattggaggaccccaaaaagttctccggaaaacaagaaacgggctcgcacgagagacgcggcaagctctagaaacaacgagaacagacggccgaaaaaggagggggggaaacgcctggtaaaaaacgaaaacagcccacaacgggccacaagatttacgctgaaaacaaaaaaaaaaagggcgcggggggggggggatagcctcaacaggcaagggagaagaaccgggccccgg

SEQ ID NO: 45335 - DNA, 370 bp, Zea mays
  Clone ID: MRT4577_141353C.1
gccggccgggctgcccacacagctattgattgcgaccaactatcaacatataaagcacgatattgtaccaacaacggcagaaaaatgattatgacgttttatgctccctgtagtttctttgagtgctgttacggcgcaccattctcccacaatgatcgcgagctgctatagcttcccttcgtcccccgttcatctcccgagcggtgtcttcatgatagcacaacccaattctccacctctacaggatccaacacggaagcgcagctggcatcttaccttcatcatactaccgccgccaacagtgatgcagcctattacagcactgacctttggagcatatattggaacaaaacagcgggggaccacaact

SEQ ID NO: 45336 - DNA, 444 bp, Zea mays
  unsure (1)..(444): unsure at all n locations
  Clone ID: MRT4577_141354C.1
ttttttttttttttttnnnnnnnnnnnnnnnnnnnnnnnnnnnnnnnnnnnnnnnnnnnnnnnnnnnnnnnnnnnnnnnntttcaaaacgaatgtaatgaaagtgaattttcattccactggtgcactagacaaaatctgtagccaccaagttctgtacaaaaccaacaaataccattccagacacccttaccacccgtctccagcgccatgccatgcttgtaactcttcttgagacagtactgaaaacttcgtcaaagccggtgtacatccagagggaccagaacccagcttatctgaggattaagccattgatacccatgcccccaacacctcctatatcagacatttgattctgactttctgagcatctgaggaatgatgtttcttctgctcagcatcttatgtagttcaatggtttaccaaccaatttaagtgctgcgct

SEQ ID NO: 45337 - DNA, 148 bp, Zea mays
  Clone ID: MRT4577_141355C.1
ttttgtttttattgcgtaaagttccaaacacggttgccttgtatgcttataggatccaaaatatttacaaaacaaaaagactacgaatgttcttcagaatgcaatgtgcagcaggactcagccatccaaatacaaccggttggggggg

SEQ ID NO: 45338 - DNA, 339 bp, Zea mays
  Clone ID: MRT4577_141356C.1
cggccgcccttttttttttttttttttttttttttttttttttgtggtttttttttttttttttttttttttttttttaaagcaaaatcattaggataggacatgcccccgcgggatcaaacccccagaaaagggcaagggcaaacaaaggaaacaaaactggaaacccttcgaaaaggaaacaaaagccccacccctgccgggctagcttgatagcttcctaatgtacaaaaaaatatactgcgctttgttttacaaaaaccaacaggacccaccccacccccttggaaaagccgggggcgataatcgaacacaaggggacccttgggcggttccccc

SEQ ID NO: 45339 - DNA, 305 bp, Zea mays
  Clone ID: MRT4577_141357C.1
actcgtttgaattgcctcttgaggaatggctgaccggcaacaatatatgtactttgaagtgctacaagacactatacaacaaaatggatacataatgacactaaacacgggaagccaatattacatgtatattaacagtgagccatatacatcaaggctttttaacttcaatgaatgtcgagaccagaatacaggactggcgtaactataatacataggttgggctacctgtacacctacaaaaatgtgaagacgaatttcactattgctgactaagtggcttcaactctgctaccgaagcacgg

SEQ ID NO: 45340 - DNA, 321 bp, Zea mays
  Clone ID: MRT4577_141358C.1
acgcgtacgcgtaggatgtactaacaaacgtttgcattcaataatcttactaccgggaacgctggttcttgatgattcaaaccaacatgcatgtggatgaggcggctagagtctgctaactggtagctgaaataatatgggatagtcgacgaattgcaacatctgatctggaaagcgtaattcctgccacgaaattcaactgccatgtggaacaatgttctattaaaaagctgaacttgttactaacacaacaacacctgctgtcattttcaataaaggcagagactaaatggagaatgggtcgactactgtagcagttga

SEQ ID NO: 45341 - DNA, 605 bp, Zea mays
  Clone ID: MRT4577_141359C.1
gccggccggtttggggctccttccatcccaccaccaccttctagcccaacaagagaaagactgagagagagagagagagagagctccactgcaccctgcagcaccctgacctaaactggtccctctctgctgcctccgccccaccactcgtctcccaccgagcaatagcatgcggcacttgcaggccaccgtcgagcacctggccggggtggcggccacgcccccgccggcgtccgcggggggcggcgtgcacacggacacgttcctcatcctggccgccgtgctctgcttcctgctctgcgtcgtcggcctggccttcgtcgcgcggtgctcgcggctgtgcaacccctcgtcctactccgtggacgcgcggaccttgccggacgtcagtaccgtaggctggcgatgcccagcgagcgtccaattgacgccgacaccttgtacatactcgccagattactagtgaagttgtgtacagtgcgcgatggtgcattagacaaatcacttcacttgtactcctactacgtctgactggttgcctagctgtaaattttaccggcgatggcgagtttgtcctccaaaaaaaaaaaaaaaaaaggccccta

SEQ ID NO: 45342 - DNA, 732 bp, Zea mays
  unsure (1)..(732): unsure at all n locations
  Clone ID: MRT4577_14135C.1
ttgggtacctcgaggccggccgggtccctggctccctgctgcgtgctgcggctgctgcccttgtgcagttgtgctccttccttccttgccccgtaccccgccggcgcgccctgagccaaatcgcaggttgccatagtgccatggacgaaggtgcgacgacgagcgactcgtccgctgccgagacatttgatccggtgcctttcacgcccgaaccacaaccgaccctccctccctccgattttttttctttcggatgaaactcctgttatgcgttaagctgtgtcgattcacctgatgacacgcttctgggattttagcaggacctggttcacgccatcttcaagctggtgtggaggcggcgggcggggaagggggccgccgccgccggcggcattgaggacatcgacgctgagcgtgctccagagacatcgaggagaaatcggagcacaactggtaagcgagtcttttttccttctttattactagagctggcggcatgaaaaggtttccaggaagtgcatgtgttggtgcagtcaaatcaaatgtctcatgggggcacccatttgaacgtcggctgcaagaaggctgtgtcagccacgctaggccatcagataaagatttaatttgctttgntgtcaagttttagcttggtttgattgttaggattggaactgggtttgntagacatgcacatcgttgttagcttggatggatttgtagaatgactgaact

SEQ ID NO: 45343 - DNA, 1127 bp, Zea mays
  Clone ID: MRT4577_141360C.1
gctagcccaacaagagaaagactgagagagagagagagagagagctccactgcaccctgcagcaccctgacctaaactggtccctctctgctgcctccgccccaccactcgtctcccaccgagcaatagcatgcggcacttgcaggccaccgtcgagcacctggccggggtggccgccacgcccccgccggcgtccgcggggggcggcgtgcacacggacacgttcctcatcctggccgccgtgctctgcttcttgctctgcgtcgtcgggctggccttcgtcgcgcggtgctcgcgcctgtgcaacccctcgtcctactccgtggacgcgcgggggcccgtcgacgacgacgacgacgaggcggcaatgccggcgccgcgcaagggggtcgacagggccgcgctggagaagctgccgaccgtgccgttcgcgttcgaggacgaggacgcccaggacggggagcggccggagtgcgccatctgcctcgccgagttcgcgcccggggacgaggtccgcgtgctcccgccctgcgcacacgccttccacgcggcctgcgtcgacacctggctcctctgcacgtccacgtgcccctcctgccgcaccgccctcgtgctggcgcaggcgcaggcgccgccggcgtccgcggaccccctgatgcagtgctgcgcctgcgcgtcggcgcaggcctcggcggggccggcagagtgccccgtactccccctccccctcgccgtcgtcgtcgtcgagcgcggaccttgccggacgtcagtaccgtaggctggcgatgcccggcggcgagcgtccaattgacgccgacaccttgtacatactcgccagattactagtgaagttgtgtacagtgcgcgatggtgcattagacaaatcacttcacttgtactcctactacgtctgactggttgcctagctgtaaattttaccggcgatggcgagtttgtcctctcgatcgacgtgcagtcgtgcacgaaacagagaagcgttttgttttctgctacatgctcgtggttagccgcagacatacagttccgtagagaaaagaaaaaaaaaaagcgcttgcaaagaaaagactagcatcaatcgataagacgatgggagtgtccctttttgt

SEQ ID NO: 45344 - DNA, 818 bp, Zea mays
  unsure (1)..(818): unsure at all n locations
  Clone ID: MRT4577_141361C.1
gtgcggcgctcaggcggccgtacaaaaagaggcaggagggcgtgtcactccagctcagctccagctccacacgcgggcgccaccaaggagctgagccgagcccggcactgtcggcggccatgtccgcgccgcgtcgccgcatggccactgcctccccgtcgctccgcttcctcggcctgctcaagcaacccgacgacgccagctcccagtcccacggcgtccaggagctggagctcgacgagcgcgacgtcgtctggtccgccggcagcgcgacctcctcgtcctcgacctccgcggcctcctcgccgtccccgaccgcgtccccgaccgccagcctcgggaggccgatttccgcctcgtcccgccacttccccgccggcagcatggggctgtccgcgctcctcgccgacgccgacgaccaccacgcgctgcggcggcggcgtcggtcatggaaggcgccggacgcacactcaagggacgcgacctccggcgcgtgcgcaacgccgtgtggcgcaccaccggcttcctcgacctgtgaaaaaggacgttccttgcctttggaggtttcgtttcgttcgttcgctggccacgtcactccactccactccacttgagctgcctgcctcggatcggacggaccttggccgctgggcagcttcttcttgcgtagcgtagtgctgtgccagctgctaggcactgaaaaaaggtgggagtttccttactaggtttggagtactactaggggcgttatatattgagctanatttgctgnggaagtagccgcnagtgcttcggtattttcatgtaagagaactgct

SEQ ID NO: 45345 - DNA, 540 bp, Zea mays
  Clone ID: MRT4577_141362C.1
ccggccgccgcgcgcccggagaagcagcacgccccgcgcccgtgccaccagtcggcccccgtcgccgtgccggcgtcggtcatggaaggcgccggacgcacactcaagggacgcgacctccggcgcgtgcgcaacgccgtgtggcgcaccaccggcttcctcgacctgtgaaaaaggacgttccttgcctttggaggtttcgtttcgttcgttcgctggccacgtcactccactccactccacttgagctgcctgcctcggatcggacggaccttggccgctgggcagcttcttcttgcgtagcgtagtgctgtgccagctgctaggcactgaaaaaaggtgggagtttccttactaggtttggagtactactaggggcgttatatattgagctaaatttgctggggaagtagccgcaggtgcttcggtattttcatgtaagagaactgctgtgatcagtctgcaactagtatgttttaagatgtctgcaactctttggcaaagaattttctctggaaaaaaaaaaaaaaaaaagcggcc

SEQ ID NO: 45346 - DNA, 1430 bp, Zea mays
  Clone ID: MRT4577_141363C.1
ttttttttttttttttaaaaaaaggcactctattagccacagtggaatacaaaagctatgaacacaccacatctgttctgctgcacactagaccacaggtttagcagtggcatgctgcatcatctccagagaaaattctttgccaaagagttgcagacatcttaaaacatactagttgcagactgatcacagcagttctcttacatgaaaataccgaagcacctgcggctacttccccagcaaatttagctcaatatataacgcccctagtagtactccaaacctagtaaggaaactcccaccttttttcagtgcctagcagctggcacagcactacgctacgcaagaagaagctgcccagcggccaaggtccgtccgatccgaggcaggcagctcaagtggagtggagtggagtgacgtggccagcgaacgaacgaaacgaaacctccaaaggcaaggaacgtcctttttcacaggtcgaggaagccggtggtgcgccacacggcgttgcgcacgcgccggaggtcgcgtcccttgagtgtgcgtccggcgccttccatgaccgacgccgccgccgcagcgcgccgcgcggccatctcgtgcggcggcaccacgggctcgccgtcgtcgtcctcgtcgtccgcggcctgcagctccgcttcgcggcggcgcctgtccgcggccgtcatcgccttgggccaggccggcacggcgacgggggccgactggtggcacgggcgcggggcgtgctgcttctccgggcgcgcggcggccgggacgggcgcggtgggcgcgtggtggtcgtcggcgtcggcgaggagcgcggacagccccatgctgccggcggggaagtggcgggacgaggcggaaatcggcctcccgaggctggcggtcggggacgcggtcggggacggcgaggaggccgcggaggtcgaggacgaggaggtcgcgctgccggaggaccagacgacgtcgcgctcgtcgagctccagctcctggacgccgtgggactgggagctggcgtcgtcgggttgcttgagcaggccgaggaagcggagcgacggggaggcagtggccatgcggcgacgcggcgcggacatggccgccgacagtgccgggctcggctcagctccttggtggcgcccgcgtgtggagctggagctggagctggaggtcgccactggccctgcgctgcgcgtcgcgggtttcggcctctgctttgggagcgttattattggcgggcgtgcggacgccagtggtggcgatggcgggcgtgggcagtgaattattggggcgtgatggcgacgagaggggtcgcccggcgctggcgaccccgtgtcgagcgctcctgtgcgcgccggggggtttgtggtggtgtttgctgcggccgatatccagcttttcgaggataggacctaatctgaatcatc

SEQ ID NO: 45347 - DNA, 576 bp, Zea mays
  unsure (1)..(576): unsure at all n locations
  Clone ID: MRT4577_141364C.1
gctccacaaatttctatttcgtaaccttcatttccaagactatatatacatacattttttttctctctctctctcgaaggtgtacgtacaaatgttgctctttcagtcagcacttacactagcacccatcagtgcatcaggcaaaacttttccagcacacgaattgaattcctaagacctaataacaacaacaataatccccagattatcttgtcctaaaaaagaaatgaactagtacctacaatatagaacccccctaaacacgaaaaataggcacaaaaaaacagacgccttgttgcccgcactcaaagctccgcgagctgctgaacgagctcactcagaagctcgtcaaacacagagtccgccagcctgctccccagacgctcagcgccccgcgggaaatccgtccaggggtcgctcttcgctaggtcgctcgacagaaaccgcgtcgacgtggacgctggcccgtggccgccgtccgtccagacggaggctcaggcccttggggcgcgaacccctaacgtgggtcggggcgggcggcgagcagaggcnccggttgctagcttggattctgac

SEQ ID NO: 45348 - DNA, 220 bp, Zea mays
  Clone ID: MRT4577_141365C.1
cattaacttattaaatttaaggagagagggttacccacaataaaactaacataacatttacaacagcatcccattttacattcacaacaaagatatggttatataactaccccttaaaaacagctgacacccattcaaaaaccaccatcaaaaatacttgttcctcctacccactaccataattcttatcccattatatcccaatttatggcctcatcat

SEQ ID NO: 45349 - DNA, 654 bp, Zea mays
  unsure (1)..(654): unsure at all n locations
  Clone ID: MRT4577_141366C.1
aattcggcacgagggtttgttggtttggttccgctcagcggcgtcgctagttcgctgctggatccgctagtttaacttggcctcgttctccctgagccagaatccagaggctccgtccttcggctaggcgagatcacgtgtctgaatcaaccaaccaaaccctaacccttgcagaggctgcggatgaagccatccaccgccggcgacgcctctgcggcggcggcggcgtcctcttcggggccctctacctccgcgtcgacatccgcgtccacgtctaccgcggacgccacccactacatcgccaagcgggtgctccggggaagcgccgtgctccacgtcgccgagggctgcttccgctcgcccgactccgcggacgtcgtcctcgccaaggaaacttcactggagttggttgctgttggtgatgatggtgttttacagtcaatatgtgaacaagacatttttgggattataaaagatattggtgtattgcaatggcactctagacataatggtttaattccacagatagaatgcaaagatcttctggttgtcctttcagattctggaaagctntctcttctttacttttggtctgagatgcacaggttcttcgcaattgccaataatgagttatcgaaacaggaaatctgaggc

SEQ ID NO: 45350 - DNA, 699 bp, Zea mays
  Clone ID: MRT4577_141367C.1
gcattctcacctggcgtggtgcttctgccagagctgtgcactcctatagcactgtgcgtacagccttgcacatatgctggaggttgaaagaagagtttgctgatggacaggctctccctgccattggtggtgtggatactggcaatgacgctcgctgctcttatttttatcggtgctgctgcagtgcaggtatgtgccggtgctatgattcatgcacctccccttgtgaagaatactattgcagagcgacctgatctcattagagagcacaactttttatgacttgaagagtcttgtggggcctatgttgcgcatttcacgacacgcacagatacggttcaccgcccacaagaggccggcatgcagaggaagggcattaacaagggccttcaatcagacaatgcatggtccgacgaggggttcgtcaaggaaaccgaaagcattgtgttcatctgatgcgtttctgtcaccccccaccgcgccattgcttacaccatgctccaacttgatgtttactaataaacgcgcaccacagatgccacacaccaagcatgtagctctcattttgtcatggttgctgaccttgtggccttgagcctatagaacagggcatgaatgcacacaaaggcgcgacaacgcgtgacattgagcgatatatatgccatgcgaacattaattcgtagcactgagctgcgggct

SEQ ID NO: 45351 - DNA, 229 bp, Zea mays
  Clone ID: MRT4577_141368C.1
cccacgcgtccgccaattccagtcgcccccatccgttgctcatctcaccagaagcgaaccggaggagggaggaaggagatcgcgagcagccggagccggaggccgagaggaagaagacgttcgacccgtggccggacttctattgccgggagtggaagcgcaacaggcccatctacacggggattgccagtaccggcttcatcatcaccaagatgacggccaacttcac

SEQ ID NO: 45352 - DNA, 343 bp, Zea mays
  Clone ID: MRT4577_141369C.1
ccccaccggggtccccgggggaaatggaaattttggggcggcggcccgggtcatgtacaacataaaccctcctaatttgggaaccttggagggcccccccccaggacagaatacccccttattttaaaaccccgagggagtagcccccccccccccttttaaacccagaaaaggcggtttaaaacacacttcctatcctggtggcggggataaaactaaccttctttataatcctcccccggcaaggcttcaatggaagggttgccgccgttaagccaaagggcttgggcaggaaccccgacggcaaattagggggcccaggctgttgacaaggggggcccct

SEQ ID NO: 45353 - DNA, 2032 bp, Zea mays
  Clone ID: MRT4577_14136C.1
cattagagtacttgaggatatacaacagtttcttaattgatggaaggttgaaggactgcgtggatttgttagaaagcatggaacaaaatggactgcttgatatgaggaagatacaccatgccagctttttcagtatgtgtaagaagcaaagagctgtcttggaagctcttcgcttttgcagatttattgggaaccccaagataagtaccttcaatatgcttttgtcggtgtgtgctagttcactagattttgacggagcgctccaagttatggagctcctaaaggaagctgggctaaaacctgattgtaaactttacacaacgctgatatcaacttgtgcaaagtgtggaaaagttgatgccatgtttgaggtattttatgagatggtcagtgctggtatagagccaaatgttaacacatacagtgcattaattgatggctgtgctagagctgggcaagtggctaaagcatttggtgtttatgggattatgagttcaaagaaggtgaagccagatcgagttgtcttcaattctttgatcagtgcatgcggtgaatctggagctctggctcgggcatttgatgttttatcagaaatgacagcagaatcctctgaatctaaaggatggaaaccaatcgttcctgatcatgttactgttggagcactgatgaaaacatgtattttggcgggccaggctgatagagctcgtgaggtgtacaaaatgcttcaggagtataatataaagggtaccccagaagtttacacaatcgcattaagaagctgtagcttgactggtgatttagggtttgcactgaagatatatgaagatatgaacaggattggagtaaaacctgatgagatgtttttgagtgctctagttgatgtagctggccatgctaggagggcagatgctgcctttgaaataatgaaagatgcaagagcaaaaggtttactcgttggaacaattgcatacagttcgttaatgggggcttgctgtaatgcggacgactggaagaaggcactgcagctatacgaggagatcaagtctatcaaattgaccccatcggtttcaatgatgaatgctttgatcacctctctgtgtgatggtgatcaggtcttaaaggctgttgatatccttaatgagatgaacatattaggggtccatccaaatgagataacatactcagtcttatttgttgcttgcgaaagaaatggtgaagcacaactaggtttggatttgtttgaacaattaaaaatggatggcattgacatcaatccgaccataattggttctcttactggtttgtgccttcaaatgttcaacattgatttttcgcttgggaatattattgtcaacttcagctcagggaaaccacagattgacaacaaatggacttcctcagcagttatggtgtatcgtgaggcagtttcagctgggctactaccctcaagtgatgttttatctcaagtgttgggatgtctgaggcttcctcatggcagttctctgaagagtactttcattgaaaacatgggagtaagttgtgacattccacaatacccaaatataaattcacttttcgaaggattcggtgaatatgacattcgagctttttctatattggaggaggctgcttcattaggagcagttgcaagcatttccataaaagaaacccggattgttattgatgctagaaagttaaagatcttcacagccgaggtatctcttcttagaaccttaagatctttgaagcatcgattggctgcaggtgaatgctagattttattttaaaaaattatattagtgtgtttatcctactattttccattgaatcaaagaaacaaagtatacatgctttgcagtaccgacacaggacaaatggacatggtgtgagaaacaataaatatggagggtcaatggattatttgtgcttctgtacattttgtttagattgtaaactatataaatacagaatattggccatttgctgataaggcgagctgacaaatatattctggacattttttctgagtaaa

SEQ ID NO: 45354 - DNA, 363 bp, Zea mays
  unsure (1)..(363): unsure at all n locations
  Clone ID: MRT4577_141370C.1
aacatgtttttccaaaaaaatctgtcccccccctgtttttttaaaaaaggcngccggcctctccgcaatttcgagtaatcgatgagatagcgcctgtttttcgaggggggaggggggagcagctgactcatcagagtcatcagagtcatcagagtcatcatcngaggtcatgcagagtctgctcgaagagtgtagtgctcagctgccctaagtcagatcagtcgcagatgtcatatcgtagcatagagctaccataagacgcagatccactagtagaggaagagccatacaaagactcatacctactcatgatctcttacgatcaagncncncgcggtgggtggtgtgttttttttttttttt

SEQ ID NO: 45355 - DNA, 287 bp, Zea mays
  Clone ID: MRT4577_141371C.1
cgtttttattttttttgacccgaaaatacaacaacaggggaggtaagaaaaaaagacccgcgagggcaagcgccacgcaagcgaaggccgggaaggcacacgaacaacaaagaacaccgcaccgcaaccacacccaaatggggcgagcccagcaaagaacaggcgacggagaaaacagcggcggcccacaagggaacccagcagcagccgggccaggactgaccgacaaaatggccgacgatgacagagccacgaatggccccaggaagacgggagagggcagccgg

SEQ ID NO: 45356 - DNA, 643 bp, Zea mays
  Clone ID: MRT4577_141372C.1
ggccggggtccggttccggccgtcccagtcccactcgaaagcacgacgacaaaacctcgaacgtcaccgtcacgctcacgccttcgcccgaacttctccagttcttccggggagacgagaaaggaaccgaggatctcgttccattggcgcagcgggcagcagaggcctcttcccccgtacccccgactccgccagccactggccccgccagactgaaccagttgcctgtgatacatctcgggaagttgccaaactaaagtcacggctggtatttttggaaaggaaaaatgctgcatttaaaatgcagatgaaggaattgtcaatgaagcttcaattggctggacaaggggaaaatgaggccctatataaggctggtccatttggtacggtgaaagctctgagaacaaatccaacagttactcctgatctatccatcaatcccagattggccagcttattggaacaggttgctgtgaagaaagaactgatagttgcactggcaaactctaacgtgaaagagatgcttgaggtgtggttcactaacataaaacgagccgggatttccaattatctagtagttgcattggatgacaacatagagagcttctgcaaatccaaggacggcccagttttacggcgcgat

SEQ ID NO: 45357 - DNA, 306 bp, Zea mays
  Clone ID: MRT4577_141373C.1
gctactgctcgtcattctcccttcccacacgtagtagagaaaaaaacccatccatcccgcttccttgattcagcctaggacgactgaatcaaacccatacgtgatcggaggagttggattgcctcccgcctctcggaggtcgcttccatctattaatcaagaaattccaaacttctcgcccaaatccgtgcggacttggtgaagcagggtaaattgggccaggagacgtcggtcccggccacggagtccccctccccttcaggccgttcttgttgggggagataaaaggcatcggtgcgtctgatc

SEQ ID NO: 45358 - DNA, 259 bp, Zea mays
  Clone ID: MRT4577_141374C.1
tgtcgctgtggttcaggtaggagcacagaccgaaactgctctgaaggaaaagaaattgagggttgaggatgcccttcatgctgcaaaggcagcagtctatgaaggtatctctgtaggtggtgagcgtacccttttgaggcttgcatccaaagctgactcaattatagagaccgttgataactatgaacacaatgttggggctgatattgtaaagaaggccttgagctatccacttaaattgagtgcataaaaaagcagg

SEQ ID NO: 45359 - DNA, 207 bp, Zea mays
  Clone ID: MRT4577_141375C.1
aaaacacacactagaagcagacgaaccctaacacgacgaaaacgggcatggcaccacctaaaggaaatgccacagcataaatatcccagcagcacgcagcaaagacagcaaacagggacccacagacaaacacatcacgggagacccccacgaaaacattgcccaggacccagagggggccacaaggtggagggaggcccatacacg

SEQ ID NO: 45360 - DNA, 222 bp, Zea mays
  unsure (1)..(222): unsure at all n locations
  Clone ID: MRT4577_141376C.1
tatatatataactgaacagacaacagatggcacgtggnnttcctccgtttcttcctngttcaaaccttccacttccctaccaccccatcccacacctcccactatccacccccaagacccaaatggtaaaggggcccatgcaaacccacaanancgacaagcaggacgccagnnaggaggcccagacgaccacgacggcccgggtgccaccactccctcccc

SEQ ID NO: 45361 - DNA, 772 bp, Zea mays
  Clone ID: MRT4577_141377C.1
tttgaagcatgagagtaaaacctgataaaagcgtctgctcaaaatcaaggttagttcttgtccatgcgagcagacaagttgctggcttcatgcagtagaggaccacacacatgctgaaacagaactaaccaaacgcaaggaaaactacgacaccttggcaagtcaaaatagaatctgaatacaagaaaaaatgaaggcgcaaggcaatgagcacctttttcttgaggagatccctgttgaagatgtcgcggacagaccaaaagaagacatggttgtcaaggtagctgagaccaaacttgtcgttgttctttgcccttgcctccacagcctcgaacccctctgcctaccttcaccgcttcttcttccacgagcgcttaccacatgcattgccactcatcttcctcctcacttttgctgtttggagtcgccctacaaggtaggaggaggaacaggaggcgaggaaaaagatggtaagaggctgttgggtttccttttgttttgttgacgggaggtgaggaagatctagggaagcgccacacgcggggaggtgaggaagatccagggaatcgccgcgcgcggggaggcgagaatggtggggaagatccagggaggcaccgcgtgcggggaggcgaggacgggccttccatgacgggattgacgacccggacggagggaggtgcaggggctgcagtccagggcgcgcagtggcatgccgatctgcgcggcggagactgaggtgcggcagagacatgacgagattgacgaacgttgg

SEQ ID NO: 45362 - DNA, 832 bp, Zea mays
  Clone ID: MRT4577_141378C.1
ccctccccggtctccggccagtccatccaccgaatccgccggacgcgctgagcctcccccgacctctccgaacccgccgggcagtccaggatggactgcaggatggacggatgtgcaattggttctaacggttctggcagcaagtcgtgcgggccgctgtcggactaccgcattccagactacatactaaagccggactctgaacgggtcatcgttgataatgcaccatcttgtcccgtggtagtcttcatcaactctagaagcggtggccaacttggaagtggtttgatcaaatcataccgggaagttctcaatgaagcacaggtttttgatctctctgaagagtcccctgacaaggtgctgcacaggttgtatgccaacttccgaaggctcaagtccaacggtgaccttcttgctattcaaatagagaagagcctgagactaattgttgctggtggtgatggcacggcaagttggctgcttggagtagttagtgatcttaagcttacacactcaccccctgtcgctactgtgcctctgggaaccggaaacaaccttcctttttcatttggatggggaaagaagaacccagctactgaccaagaggcagtgaaatccttccttgggctagtgaaagaagcaagagaaatgagcattgatagttggcatatcatcatgaggatgcgagtaccacaggaaggtccatgtgatcctattgctcccttagagctgcctcattcacttcatgcattccaccgtgtaactggatccgatgagttcaatgtggagggttaccaccattcccggggaggattttggaatactttagtat

SEQ ID NO: 45363 - DNA, 240 bp, Zea mays
  Clone ID: MRT4577_141379C.1
gacccacgcgtcctacctacctcccttctcccttatccatctatttttaatactctccactcatccccttcccggagcactcttactaagtgcttcatctctcccacctacaagctaacacattccaaatccacctcatctacattctcccttcccatcttgtacctcttcctctgccttacaaggttctcactctatcctctatcctcattacatctcttctccaatctaaccactctt

SEQ ID NO: 45364 - DNA, 738 bp, Zea mays
  Clone ID: MRT4577_14137C.1
atactacatcgagtgcagctcaaagacccaactagtattgccatctgctcattcatccgctaacacgcggtatcacgtgagaggcactgacggactttacttattgtttcccacgtgaatttgcagaacgtgaagggtgtcttcgatgcggcgataaaggttgtgctgcagccgcctaaggcgaagaagaagaaaaaggcgcagaggggggcgtgctccattttgtgatctaataatgatcagtagacaaaagaaacaagggcgaaggtgccatggttctattatcgccgcgtcttgcttcagcgaaacagcaatggatgatcccaccccctcccccctagattttactggcggctgcagcgagtcgaggcattcgagagcgatatgtttgtttcatttccctccttcccgccttgtgattatctggtgtgtgtgactgacgaggtcgtggcaatttaggtaactcgcttagaaggtatttcccccgtgtttgagcccccacccccaccaaaaaaaagaaggtatcatgctatctctgttccataagtagacatgatgtaatcgtactaagtgtttatttttattttttttacttatttcacttcaatcaatggaaaattatgcttcccaattaaaaaaaaaaaaatggcagtccccctccctccttgtttgcctgtcaagttctcagtgtctttgtggcaaatggagcatgcatattatttaaaaaaaaaaaaaaaa

SEQ ID NO: 45365 - DNA, 295 bp, Zea mays
  Clone ID: MRT4577_141380C.1
cggacgcgtggcgtgacgcgtggggccaaaaaaccacttgctaggtgttacatttcagagttggagttgggaccatggagccttaagttgcttgtcaacttattgtctagtttgtgttttgtacccgtgagtgtttttcttctcctcgtcacagtctcacaaattacttggaaatgtacgtttagccttttggttattttctgcagagatgatactctatattacatgttctgtttatactgggacatggaataccatctattaacatgttaaatgacttattgtacatgctggt

SEQ ID NO: 45366 - DNA, 200 bp, Zea mays
  Clone ID: MRT4577_141381C.1
ggcttcatcttcctctcgcacgcgatgcgatcatctccctccgatcctctgctccccagctccgatccagagctctgggatgaggtccctctctcctgcatgattcaggtgcaaggggagtgagcctacccatgaagctcctacctctcgctcccgctccaggaactctacgatgccgagggcccctccgatcgcgcgga

SEQ ID NO: 45367 - DNA, 607 bp, Zea mays
  unsure (1)..(607): unsure at all n locations
  Clone ID: MRT4577_141382C.1
cacaccttctggtttgcctcgggacataaatctaccctcctctctgggtcccccngaatagaaggccagcacggccaccgtggcttacatgacaactgctccagcaacagctgaaatcggcaccagggaggccaactgggatgcggtggttgaacaaggccccaccaccgagttcgctgctgccaccctccagcgcgctccgagaactaaccgtccccttcctccgcctccttcccagaggccagcggagcagctgccgggcctggggcaggtacaagcagcagccagcgtaggactgagtaattcccacaaggttcaggtagttccagctccggagagaccacttgaacccagagccagggatgaccccacacctgcccttgtcagcgatggcagcgcagctgctcagtgtcccgcctctgctcctgccgtgcagccaagccttcccgaaaagttgcgggaaggtgcccgggccccaccgctgcacctgcgtgctgagtctgtccccgtgtacccctcttgtggctttcccgcaccagctccccccaccagcagcacagatgctcccagcacttccagttaccacccctttgtcaccgcgtcctca

SEQ ID NO: 45368 - DNA, 329 bp, Zea mays
  Clone ID: MRT4577_141383C.1
tctcattcttcaggaacccaacatgacttgttgagcaggcttgactcatgttgaagaaggtggtagggaggaagcaggcagagccatccattgcaaagctgaaaggcatcatgctcctctgtaataccagaaaagtttgtgtaagcctgtaaataaggcttcttgggtgatagagcttttggcttcagtcacccaatgtaatgtacactagcatttttcctagggagattagcgcgccagatggcgcttgtatgttgttaaccgggatgcgctatgagctgcgtcccaatgccctggtgcccataatccaatcgcaaatgttgacattt

SEQ ID NO: 45369 - DNA, 228 bp, Zea mays
  Clone ID: MRT4577_141384C.1
cccacgcgtccggtattctgcctcatgcgtgtaatgtttcgtcgtctactcatgtagttttattgcgatgtcaaaaaaaaaaaaaaaaaaaaaaaaaaaaaaaaaaaaaaaaaaaaaaaaaaaaaaaaactaacactataaaagatccaaccttacttacgaataaatgcaacttgataacattttctatagtgcaaactaaattgaacaaacattccattgtttaac

SEQ ID NO: 45370 - DNA, 211 bp, Zea mays
  Clone ID: MRT4577_141385C.1
ttatatttaccttaggaccacaatgaacccgtgagttgtttactaaaagaagctgagggacaaaactgacgaaccacatggactgtattacaccacaagcacggtgtgagcagctactatgtgcctacgctatgaagggtagatggaaccgaagctactatcgcactgaggagcctaaaaaggcaggcacgtaagcgctacagatagcaaa

SEQ ID NO: 45371 - DNA, 487 bp, Zea mays
  unsure (1)..(487): unsure at all n locations
  Clone ID: MRT4577_141386C.1
tgcttggaactttgggctgatttatgtgcttgaggagtcggcggatcgggaatataagagttaggagagcgggaaaacgtatgtccgtggatgtgatgcgtatatgataacgtcctcgggggtcgttagaacatcttaggactgtaagagtgattcaacgggtattgcgaagtccgcaccttagttggtagaggagggttagggtggtgtgcatcatgcgtcgtaagaaggtgcctccgatgatgtgctggttacacctggtccgtatgccgatttggtttcttttgctggagctgccctgcttaggttagggtttcctgtggtgatgcttggttggccttcggtgatggctattggtaaaggtgggtatgttgtgacgttttatgaacttactgatttcgccgcagtcgtagttatcatcgctgctagttcttagaagactactcnttgggaaactgacttttcgtagggtgttggcgcgcttgct

SEQ ID NO: 45372 - DNA, 242 bp, Zea mays
  unsure (1)..(242): unsure at all n locations
  Clone ID: MRT4577_141387C.1
gagaaganaatgaatcgcacgggcaacgtttcgtggtagcaaccatgctcaaccacggaggtgccgcgcgacccatactatcagctatggatcacagaccgcccagcaagctcggaacccatctctcggcagcggcagaggaagcccacgctcagattgcacataaacgagcccacgcatgcatgcccacagaccaagagccccagccgaccgagccatataacataaccccacaagatcca

SEQ ID NO: 45373 - DNA, 445 bp, Zea mays
  Clone ID: MRT4577_141388C.1
ctctgtcttccctccctctctcccgatgcggccgctctctcaaccccgacgcgccgccgtcctccgccttcccctgcattccgctcagccaccaccctctcctcctccccccaccctccgccatggtgaatccacctccagatcgagaaggggaggcagcatacgtcgcatccacgcaccagatcgagcagcggcgctcccagatcgatccatctccatcgtcctcgtggttgacgcccatgtcctcctcaaggatggccgtctccgtgctccaccaccatcctttccctcctccctcaccgcatctcacatggcgctgggatcttccagatcgagcgccggcagggtaggcgcctccgccgcccaagtccaagaccccgcctccgccgccggcagggatcttccagaccagcgcaaggtcttccgcgtcactaaccacgccggg

SEQ ID NO: 45374 - DNA, 293 bp, Zea mays
  Clone ID: MRT4577_141389C.1
ccttcttcttctttctatttacatatttagacccaataagaacaaagacggactatgactcttcttattttgcgacccatccccttcccacccaaaggctcctatcgccaactccatcctcgccaccatggcctcgcaccggtcgctgctgctgctgctcctcgccaccgcgctcgtcgctgcgctgacctctgtcacatcctccgactactccaaccccatgcccaccatcctgacccccgtggcacataccccgctggggtcctttgacagcatacaatgcctcctctaac

SEQ ID NO: 45375 - DNA, 334 bp, Zea mays
  Clone ID: MRT4577_14138C.1
gggtgaagaaacgggggatgtgaggctgtccgttgaggccatcttgggcgcgtctcctgttcgtgtcgtgtacttgttgtccggcggccgtcgggccgccgccgtgcgaatcgctgcattgtactggcaggtacatccggaacgcgtgcgcgcgcgaagccgggccggcgattcggccccccggtttccgcgccggattatgtgtaaattgcgtaaccgtctgtcggatctgaaagggttgcccggcgagcatcggtcatcgcgcgcccgggtcgggagcgacgccagcccggtcaagcggggcgcgcggcgcgatttcatgcctgcccgcacc

SEQ ID NO: 45376 - DNA, 185 bp, Zea mays
  Clone ID: MRT4577_141390C.1
ttttgaatttctttggaaaaagcaggtttttgagggtggtctttcgttgcggatcccaggcaacaacaacgattccaagactcacttggcaacgctttgaggctgcatcttgagctgcctactaaaatttgtgtaaaaaatgagggggacccttgggattgccctcgttttttaccttttttttt

SEQ ID NO: 45377 - DNA, 344 bp, Zea mays
  Clone ID: MRT4577_141391C.1
ggaaaaccgcggccgacgcacgcgtccggcgagagactggcagggtagtttaaaagtttatctaaccctagcatccgcggcgctaggggtcgggggttgcgagggccgcggctgttacacaacggaggacggtgaagtggttcaacgacaccaaggtcttcggcttcatctgccccgaggacggcagcaaacatctcttcgtgcaccagtcgtacatcaagtcggacggcttccactcgctcgcggacggcgatgatgtcgagttttccatctaccacggtgactacggccgcactaaggccgtcgacctgaccatccccgacggatcctttctcaggggctgc

SEQ ID NO: 45378 - DNA, 449 bp, Zea mays
  Clone ID: MRT4577_141392C.1
gggtacctcgaggccggccgggatctcgatgctttgctactactcttctcaactgtaagacgcagttgtttatccgtgcagcgtgagtaagttgtatgctgatcctgacatggatgtcatgtcccgtagttgctgaggatgccatatgagaaaaataatgagttctctgaaagtgtggaacttacaaattgaactgaaaaattatagatccacataaggacaagcagtatctgtgactctgtttagatgtcccatatccctcagacacaagatcgaaggtcgcgcactgcttgatgttgctctctagcatagttgaagaatgccaaaaaatggaacttgactacatgcatgataatgctctcatgagaatgaacatagacacaataatattgataagaggctctgccaactaagaactatgactcttcttggaatcagaggccatcatc

SEQ ID NO: 45379 - DNA, 170 bp, Zea mays
  unsure (1)..(170): unsure at all n locations
  Clone ID: MRT4577_141393C.1
ggggggggtttttttttttaaaaaacaaaagcgctgtaatttatacggatacacgcgaggggagcgaaaagcaagcagctaggcccgtatgtttcatggggcgcttcattcatcttacaaaatcacatacatttttttccacacatnnacacaggggggggggggggggg

SEQ ID NO: 45380 - DNA, 1298 bp, Zea mays
  Clone ID: MRT4577_141394C.1
aaaaaaaaagctggctcgggtcgccagcgacgacaacccacgcgcacaccaaccaacaagccacaccggcccacaggccacagctcaccagctaggctagcaaccacctcgatcgcagaggcagaggccgccggaagctcagccgtgaattcggcaggaaggaaaggaaaaagtcttgggtggtttcaacaagagatagaagatggagaaggcagggcagcacgagcatgtgatcggcatccccgtgaacaacagggcgttcggtatcgaggagccagatttccccagcaatggccccgccaagaacgcagccgccggcgccgggggacggcgccgggtgaccggggacagggtcgcccaaggcctgaaagagcacgtgacgctgggcccgaagctgtacgggaccgggaggggcaagctgtcgctgggggcgaggatcctgcgggcgggcggcgtggggaaggtgttccggcgctggttctcctcccccgtcggcgggggcggcgagcggctgctcagggcgtcgcagtgctacctgtcgaccacggccggcccgatcgccggcatgctgttcgtgtccaccgagagggtcgcgttccggagcgaccgctcgctggcgctgccgctgacgtctccggccggcggcggcagcggcacgacgacggtgctgcgggtgccgtacaaggtgtccatcccgctgcgcagggtcgcggcggccaggccgggccagaacagggaccggccggagcacaagtacgtgcaggtcgtcacgcgcgacggcttcgacttctggttcatgggcttcgtcaggtaccaggcgtccctgcaggagctggagaaggccgtcgcgcagtcgcagtcgcaatgacctgaggcgatccgccggccggcccggcgattgttgtgctcctgtgtggtctgcttcatctgtgtgcatatgtagtagggtttcggttttcttgatgatggattattgcttggcgtttttggcattggagcaagtccggtatacattatacaggaggaaaaaatgggatattagattgattgcgtaatcggtgatgctgagtaaatcttctacggcgccagcgtaaaagtgtctcggatgaggtttacatgtaacatgtgtcatgaaaaccacaaatgcttgtgcgacgaactagattgtgttaactgaactctgttccgtcttttttctgagaaggcgccctgacttttaaaaaaaaaaaaaaaaggggggccatcttaagggatccattttttggcactggtggtttccgctgctggccttttttttt

SEQ ID NO: 45381 - DNA, 278 bp, Zea mays
  unsure (1)..(278): unsure at all n locations
  Clone ID: MRT4577_141395C.1
cccacgcgtccgcccacgcgtncgcttacgtgntgtcggacgcgtgggcttgcgcgaagggggttacgccccctgtgcctcgcttccatgagaccccacagcagcggcaggaaacattcccacaccagacgccgagatccatgccagtggctcgatcttcctcaacgatggctgcctatccgacctcgctgtggacctgctgctcgccgtcgcgtgtgcactttttactccgagcagaagccccagatctgcgcaagccccgcgttattatcgacctc

SEQ ID NO: 45382 - DNA, 1067 bp, Zea mays
  Clone ID: MRT4577_141396C.1
ggccgggaaggccgccgcccggccgccgtttcttatcttcctccatcttcctcgcagcgcgggcgctccattttcctctccctcccttactcgcgctcggcacgcaggcggcggcggcggcgctcaggctcgggctctcagcaacggcatcagcgtcttcccctccctcgtctcgtcagtcccctcgcgccctcgcctccggtcctccgcacacggcacaccgtccggtgaccctgcaatggaagggcgccgctcaaatgaagtatcgtctgccgaagctgtcttggtgggagcattgtcgtctggtgtcaatgctcccacgtggtttgtgctcaagattacgtttttgctccttgcattgtgttttacggctatgcttgctctagcattttcgtcgaagaactttgtaatcgttgcacatgttcttctgctggtgactattggaaccgtgctatttgtgctgcttaacaggtttctggctgaagttgggctcgtgcctgttgaacagcagatgaaggagatgggcatccacaaaacagaagccacagatgaagacaagagaaattaatcagtgacaccttttttttttttgatatggaaagcagtttaacattcaatggacagagtgacattatctctcatgatagaatcagcactcacttcagagacatgaagttcagacaccacaattttgcacagatgaccatacatctttgtacgtacttccaaatggaaacccaggtcgaaatctgtagtgaaaagggatgtagctgcaagcagagcacatcaagcctgctttccctcttccttgggcttgctcttttttttttacttggtgtagcagaagcatgagcaccagggaaactgaaacaagaactccattgccagagaaatcaccaatacttttgtttggagaagtgtgcccaagggatttgcatgcaatgcaacccttacatatacgacatggatgccgtttatcagtggacattaggatttatggtctttgtgcaatatatatggtcgtgtcagactatcgttcctttcatttattctttattaaccctcat

SEQ ID NO: 45383 - DNA, 548 bp, Zea mays
  Clone ID: MRT4577_141397C.1
gaaaccacaggattcacaaatggattttttaaccaggggcccatcctgcccattggatcccctttacaagtttttttttcacacccggaaaaaaccccaaaaaaaggggtttataattttttttttttgggaaaaccccattttaatcaaaaaagggggctgccccaagcaaaaataaacccaaacccccccaagggggccggaaaaaaaaacttcctgttttaaaaaaaacccacggggtaccccgttccaaaaaaaaccccaattccagcaggggggacccctccaaaaactttgggccccttgggaatggcccccccaaccacccccggggggggaacaaaatggaacagggaccccggggcccaaaccttttttaacacggggtttttggggcgaaacatgtcccccccgaaggtcccaacccccaaaggggaaaccccggaaacgggggccactttgggccaaaaaatgggatccgtcgccccaaaaattttccttttttttttagttccccttcacctggggccaaattcctggagcccggg

SEQ ID NO: 45384 - DNA, 355 bp, Zea mays
  Clone ID: MRT4577_141398C.1
acccacgcgtccgcccacgcgtccgaaaaaaaaaaaaaaaaaaaaaaaaaaaaaaaaaaaaaaaaaaaaaaaaaaaaaaaaaaaaaaaaaaagggaggaagaacaaaaggttaaaaagtttaattaaacataaatgcaaggttgtaagcttttctatagtgtaactaaatttaatttcatggggggtggttttaaaatttggtgattgggaaaacctgggggttttgcattttaacccctttgcagcattatcccttttcgcaatctggggtatttttttaaaggctcgcacggttggcccttccgaaattttgaccattttgaatggtgaatgggaccctcctttttccggggt

SEQ ID NO: 45385 - DNA, 922 bp, Zea mays
  Clone ID: MRT4577_141399C.1
aaaccaaagaattccttaacacgggcatgagaagtctggatgaacacagtgggtttcaccgcaagctgaagcatttcgcagagcagtgccaaactgatgtttctttgttgcaagaggaagaaaagaaaattcggtccttggtcaggggcactgttgattatttccatgggagtacagggaaggacgagggcctgcggttatttgtggtagtacgagatttccttgcgatgctggacaaggtttgtaaagaggtgaaagaagcatcaaaagtggctccaaagaaaacaaagaccgctcagccatctcaagcatctttcaatgatcccaggcgcaaactattcccagcaattcaagacctaagggcagacagttcaagctctgatgaagacgattagctgtataccgaatcaaggagtccattgttttcaccttcgaatgcactgaattgacccttcaaaacaatagtgcggtgatacataatacatggaaactgatgggaaatggtgaagtgacgctattttttgccatccactgatcaaaaaggcaacaatcaaattgggaaacctggcttggctttacactgacatgttggtaatgacaaatcatcagaccagatctggcattcttggccaatgggtttgtatggcactctcctatctagcaagaaggatgttcatatggtcgagacagcatctatataaaaggtgtggctggtggaaaatggataattcaaaggaaatggaagaaaactggctctagtttagaaccggtgtaaatgcaggaggaagtctgactaatactattattctgttcattgtacacatgtaccattgtaccgaacgcagagaaatgcagcgcaaacttgtgaatccggtgccattacccttgcaaacaggaatacaaatgaagtgtttggtttgag

SEQ ID NO: 45386 - DNA, 413 bp, Zea mays
  Clone ID: MRT4577_14139C.1
tcgcgatctagaactagtttttttttttttttttttttttttttttttttttttttttttttttttttttttggttttttttttttttttttttttttttttttaaagggggaccaaaactaaatttgatcacgggcaaaattttgtttgcccacatttccaaaaaataaggttatgatcgtaaaaaaattggcaaggcgatcgaaaactccccgggttgattcgactttttccttcctggacagaatatgggaaaaaacgaactaaccaccatgggagttttaaagcaacgacgaaaacttgaaactttacatgctaaaaaaaggtggggccagtgcaaccgggttaaaatcctacccaaagttgttaaaaattccacgtaacaaacggggacgcttgttaaaccggtgcca

SEQ ID NO: 45387 - DNA, 420 bp, Zea mays
  Clone ID: MRT4577_1413C.1
catgctaaaattttttagcattttgcttaccggcgataatcaaaaagagcgggccaacgtgacaaaactgtatagggccgcgcacatcgccccaccccacacgactacaccattattgttaagcaaaagcaaacaggtccttccatccccctcaactcaagcgataaccataaagaaacctcctacgcaactgcgcatatgataatgcataaccatgcaaaagacaacagacaggccactgtaccgaactctatagcacacaacggcccgagagagctgcaagccgggcgctgacaccctaacacccggagagagcacgcaaggaggcaccctacatcgggactctcatgtaacccaactgaaacttggggagcacgcccagctgggtaccaagcttgtccaagaggagagtaccaacca

SEQ ID NO: 45388 - DNA, 211 bp, Zea mays
  Clone ID: MRT4577_141400C.1
cacaaggctaggcacaagctaaccaaacccatggcgtccgacggcagcggcgtggtgacggtgtacggcagctacggcacggagctgctggatccgtcctagctatccaagtcggctactttttacgtcaaggtggtgctagcgcagatgctcctgtgcgtggtcatcatggacgtggtgaccccggagcaggcgcgccatgcggaggagg

SEQ ID NO: 45389 - DNA, 611 bp, Zea mays
  Clone ID: MRT4577_141401C.1
tcagtgagctgccccacttataatgggtatctagagctggaaatagaactaattgggctggcaattcgtagaacattagcagcgcatgagacagggtgattgagctgcgagaaagccgcaataaattatgcacctgattggatagctggatgagcgtagcatggctcatgcgcgcttggcccgccagaaacaggatttttgtgcgtatctgtgcatgcagttagatgtgttattttcagtctatcctgcagctgcgggtgcagtctgtggtctcgtgtatacaggaaaccaaacactgttcgtcactcggtcaacgcatgcggagagcgtggatggacgcaagcggggaaccaatcatcctgtatgagaaccaagcacacccgaagcaagtcctccatcattatgcggacgtccaggtcgatgtaatattaatgaaattgtgaccctgttacgttttgtactgaactggtactggtaggtaggttatgacacgcctctagctctagttggtggatgttttcgggaacgtgtttttctgtttgtggatgctgcctactcagttttggttgcgtataagcctgcctcatgaatcctatgagtttgtgaacacc

SEQ ID NO: 45390 - DNA, 847 bp, Zea mays
  Clone ID: MRT4577_141402C.1
gaatgggttgtggatggaggattggtcctataaataacctgccacgcacaggttgctgcaacctacgccaaggagaaattgcaaacctgtcactagcgaagcatacttcgtcgagcacactcttgcaattaatccaccgagttcggtttagtagcatagcatcgacaataaatgtcgctcgtgagtcggcgcagcagcaacgtgttcgaccccttctccctcgacctctgggaccccttcgacatgttccgctccatcgtcccgtcggcggcctcctccggcggcggttccgagaccgccgccttcgccaacgcccgcgtggactggaaggagacgcccgaggcgcacgtgttcaaggccgacctccccggcatcaagaaggaggaggtcaaggtcgaggtggaggacggcaacgtgctcgtcatcagcggcaagcgcagcagggaggaggaggacaagaacgacaagtggcaccgcgtcgagcgcagcagcggccagttcatgaggcgcttccgcctgcctgagaacgccaaggtcgacgaggtgaaggctggcctcgagaacggcgtgctcacggtcaccgtgcccaagacggaggtgaagaagcccgaggtgaaggctatcgagatctctggttgaccgtccgttggacgtcgattggagctccgttgtactgctactggtccgtggatgtcctgcatgttgcactgcagcggaggatgttcgctgcgtcttctacgcatttgctctgtttgtgctgtggtcgtcttccccgtatatggtttgtgtattgtcccttatcgataataataaataaaatcaggctttacgtctatttactgttgtt

SEQ ID NO: 45391 - DNA, 294 bp, Zea mays
  Clone ID: MRT4577_141403C.1
aaataaatgaattagaattttaaattacttacgagagttctttgccttttgttgctttattgccaattgcttcccaaagtttctgctccttttgtcatagtcatctgtttggttacttaattttttcaagcacatcatcatcggttaccatcatttcaaacatatcattcaaagcaatctggagcctagaagcatgctaaacatcattcgtggtgtcagaatgtatttggattaaaaacaatggagccccatgtagtttttgctccatttgatgcaatcacctcgtgtcaatgg

SEQ ID NO: 45392 - DNA, 332 bp, Zea mays
  Clone ID: MRT4577_141404C.1
tcgagccggccgggcaaatcctcaactgctatcattcctctagctaatattcctccgatataaatacaaaaaaaccgtcaaaatggtcaagctgtgagcgttcttcgcggcgactccaaggtctccgggatggtcgaggttaagcacgagtacgaccatgataaggatactatctcgtgggacgtcatggagaacgactccgacgacaagggaggattccacgtccacaccttcggtgacaacaccagcggatggacttctgttgagaatcattactgccatcataacaagacctacggtgttccttctgacgagaaccgccaggttttttt

SEQ ID NO: 45393 - DNA, 465 bp, Zea mays
  Clone ID: MRT4577_141405C.1
aacctttgggttgatttatgtgcttgtccggactagagagtagtatactgagcatcccacttcctgtgcccttagcatcatagaatcgccggaatagtagttttgcgaagacggttaaggttgattgtaggtgctagaaggaagattgaggtcggggccatagaacttcccgtcgcaaacctcgaacggtgtccgttcttttcgtacttcccccgttcgctgagccgagtttcctgctctcgctacgtccgagttttgcggaggcttacgccaaacctacctactaaacgccctctcttctcttctcttctccgctccctcgtcttttcgtcgactccacccactctcagtaggccaacggtccgctagacctggcagcggtccgcaacccatagaatatcacgaagagcgaagatctaagctacagtcccggcacagaacccgtggacatccgcctgagcacca

SEQ ID NO: 45394 - DNA, 220 bp, Zea mays
  Clone ID: MRT4577_141406C.1
ccgcaaggtcatcatcacgactgccgagaattcgaacatcccgaggagggagatcacgaaggaagtgctggaatctatcctatacgaagttttctacagaatccaagacccaaaccttgtgtacccttactaccatctcaacccgtatcatgcctacgactaacgtaatctatcatggctggctccaacatacgccgagcctgctacaatgtttatcgca

SEQ ID NO: 45395 - DNA, 474 bp, Zea mays
  unsure (1)..(474): unsure at all n locations
  Clone ID: MRT4577_141407C.1
tcgaggcggcatgtaaacttgcgttaccggatgtaanngtgtactttgtatacaaaaaaaaaaaaaaaaaaaaaaaaaaaaaaaaaaagagcatcaaagcaagccatgtggaggagggctttagcgatggtcctgttcatggctggcgccgcgctgctccccggggctgccggcgccggcgcgcaacaaggcgtgtggagcatcatcacccggcccatggtccaaaacatgctgaaccaccccggcgacagcgggtggcaaggggccttctaaaactaagaagccttcattgaaggcgccaacaaagtcccccgcttccggaacaccggggaacaaaaaaaccccaagggggaagtcccccccctcttccggcaaaagacccaccaaaacacccggggaagggccaatgctccggaaggacccgtttgctggggaaaacggccggggaaagaaacaaaaaaaaccggccccccc

SEQ ID NO: 45396 - DNA, 336 bp, Zea mays
  unsure (1)..(336): unsure at all n locations
  Clone ID: MRT4577_141408C.1
cagagcggccgcccnccccttcnccacaananaaaaaaaaaaaacanaagaaggaccccaaggagggaggagccgggcccaaccaacaaggggaacacacnnncggaaaaacaacaaaccaaaccacccaacccggaaaagccacaacccaaaccacccaacggggacacaaccccccaacacacacaccaaggcacccaaaaaggggccccccgccggacggccaaccccaaaaccacaggaaaccagaaagaggccccagggccaaggaagcccgggcaaagcgcagggaggaaccccgaaaaccaaaacggggccccaacaagaccaggaaaa

SEQ ID NO: 45397 - DNA, 677 bp, Zea mays
  Clone ID: MRT4577_141409C.1
gccggccgggctgggatgcaactgtattcgcactctcggctagatctcgcttccctccacctccagatccaccccgaactctccgaaggacgcccccgacatggtaacgtcgacgcccatcactcgccggctgctctcgccgatgtcgaacgaccttctcacagtaggctccttcgcctcgccgccgtccctcgcgtccgagatgcccctgccaccgtcaagctctcgttctctcgatgcgcgtcgatgtccgctgttgtggacgtcgggctgctctcctgctgtcttctcatcccgacgacgttgcatgcggactaccgtgctgtacccgctgtactggctgctgatggaatccgtgctactccgacgaccatctctaccagaaggagttggggctgcacaccgtcttccgccactacctgcaggccgtcatgtccctgtccgactgtctctagaaggtggcaggacgaggtaccgccatctgtcgtctccgttctgaggtcctgcacggcgagcccctcgtccacgagagcaccaagctgctgtcactaggatttgcacaggatcctgtaggaaggagtggacgcgcacgacaactctgacatcttaagcgtcatatggtagtgagtcgtcgacgtcttcagtgggctccgctctgtcacctactgttgcgtcaa

SEQ ID NO: 45398 - DNA, 2718 bp, Zea mays
  unsure (1)..(2718): unsure at all n locations
  Clone ID: MRT4577_14140C.1
ccatcaggttagcaagaccaacaaatgcaacactgatacgttcccttcgaagttcgaacccacctcccatggccaccgtcgactgccccctgccctctcccgcggacctcgacgacaacggattcccggctctaccctcctcccccgatgactaggcccgagcggctctaccctcatcccccgctgcctgtagcagctggcttcgcggaggacttctaccgcggcggcaccgactggtcctccttacgcgcccctccgccgctggggccgcccagaagggcacccggtgtgaaggagagaggaggcggctcggccgtgcagagcagcctcttccaggcgtgggggatcgagaagccgcggcgggacgggcgtggggctggggattcatcgcttgtgcagaggagcctcttccaggcatgggggatcgagagaccgcagagggagggtctcggggctggagattcctccccctcctcctccctttccggttctttgttggcaaggaagcggaggcgaggaagcaccgaggaggagcgggtggcggccaagaagcccctcgcgtgccccttctacaagaagattcctggtaaaggcttcttcgtttaatcctttagtcatttacaatatgaatattgcggggctttaatcctaaaagactttcatggtgacatgtatggtggagcaatcactgcatggctccttgagacatgcttttgttttactttcaattgtagctgtctttagaagaaagaaacagagtatttcatagatagagtgacagttaccttgctggaggccaaccattgccctggtgcagctctaatccacttccgactaagtgatggaaagacctgtctccacactggggattttagagcatcaaaaactatgcaatcgcatccacttctccagagaggccgagtaaatttggtttacctggacacaacatattgcaatcccaagtacaagttcccaccccaggaggatgttattgattttgttgtgaggttcccaccccaggaggatgttattgattttgttgtgagaaccactctaagatatctaaagaaacaaccaaagaccctcattgttgaatttcccaagctttagaggcccatatatacactgatgcatcgagaaggcggattctctactcatttggctggccagatttgtccaaaaggctatgttcatgcaatcaaagttcatcacttcatgttctgccccttggatctataaatcatgagaacttgaagaagtacttggagactcttaatggaagattcctagctgtgctggcttttcggcctacaggttggactttctctgaggcaactggaaagcatcttgacctaataaaaccaagctctaatgccaatgtaacaatctatggtaggatttgttggttatactgataatacttttcctctcatttattgctaatgaatggtcaataagaacccaaactattccgaacaagatttttttagtataaacagtctggacttatcctttgtcaaatatagactgagtttattgatctcctgaatttaaaactcggctgtggagggaaagatcggtctcccggtattatattaagaagagaccgaaatatggtcccggccgagaaaattcccgaaccttggcccctcatcattagcgggccgtcaccgcccactctgcaacggcccaaccggagggtaacgcgcaagacgtaacccagaagcggacggagcacaacgaggggattttttaaccaagcccgaaatttgcccccgagggggatcgaacccgagacctggaggtgtgccttatagcgagcattcaagtttcactgagcttagggattttgtgatgtttctgaaacctcaaaagataattcctactgttaatgttggcaatgcgacaagccgagataaaatgcaagcacatttccgggaatggctgaagagcccgtgataaatatatcctgatcatgttttttctatatcggcgtcaactcgactccactcaatgaggtaccgctgtataccatccttacactcagttcactataacgcctcttttcttcactttatttgttggacttcaacgaatgttgattcttttatgccagtgacacagtcatggtacggaaaagaagtggatatatttttaaaggttggtttgcttggtactaaaaatgctatgtttagagtaccacttttcccaacattattccgagattcgttttgtggaacttatctcatttgagaggtaaatgtattgtttctcgcttgtctggcatttctttgcaagggaactgtaagatgaagaaatattgatttgaattactgtttatcaaaacccattatcagcaacaaaaaaaaaaaaaaactggatatatcctggtcatgatttttcgggaacggcgtcaactcgactccactccatgagtgacccagtcatggttcggaaaagaagtggatatatttttaaaggttggtttgcttgggcctaaaaaggctatgtttaaagtcccccttttcccgccattattccgagattcgttttgtggaacttatctcttttgagaggtaaatgtgttgtttctcgctagtctgaaaatttctttgcccggaaattgtaagatgcgggaattttgaaaaaaacgggtgtttacccaaaaaaaacacacgaaaaaaaaaaaaaaaaaaaaggggaataaggcannggggt

SEQ ID NO: 45399 - DNA, 695 bp, Zea mays
  Clone ID: MRT4577_141410C.1
caaacatcgctcaacgctttttgatattttcgtttactttgaaattgcataaacactttgaaaatgtctgctaaagctatttgtgtattaaaaggagacgctactggagttctgaattttgttcagcagggcgacgctgtgcatataactggcgaagtgtcaaatctttcgcctggtcaacacggttttcatgttcatgaattcggagatactagcaatggatgcatttcgactggtgcccattttaatcctgctggaaaaacccatggagctcctactgctgaagaacgtcatgctggtgatttaggcaatgttattgctggtgccgatggaattgccaaagtagatattactgataaacaaatcgcccttactggacccaattctgttgttggacgtgctttagttgttcatgctgaccccgatgatttgggtttgggaggacatgagttgagcaaaaccactggaaatgcaggagcacgtgttggttgtggtgtgattggtttgaccgcaaactaaattatctattcatgaatagatattaaaatgtattttttgtttctcactaaaagtataagattcattttttgaaaatgaccaaatttataaaatgaatattcctttaaaatgtatttgcaaataataatatttaactgcactttattaaaaaaatcaaaaaagcgataagcgatgtt

SEQ ID NO: 45400 - DNA, 185 bp, Zea mays
  Clone ID: MRT4577_141411C.1
gcagtacggtggtccccgccgtgaccgcgtctaggcttcacgctgttatcgccgtggttgcctcttgatctgccattcgtagttactatgctactttgttaaacttatctttggttgcttctgaggcggttaagttttgaacttgtgttatgctataaattcttaagtgtttgggtctgcgtgtg

SEQ ID NO: 45401 - DNA, 855 bp, Zea mays
  Clone ID: MRT4577_141412C.1
cattgggtacctcgaggccggccgggagcatctcctcacttccctccagcctgtccatcgatacaccgcaaacatgcctccacgtatcaaagagagcgagaatggcgtgcccacctactggggccagtccggccgcatgcttcaggtcctcgtcaccattgttgccgtaacagactttctgctcttcggttacgatcagggtgtcatgagtggcatcatctccgccccggccttccaatccgccttcccccaggtcaagggtgactcgacctacgaaggtttcgtcgtctccatctacgctgtcggttgtttcctcggtgcttgcttcatcttcgtctttggagacaagcttggtcgccgcaagagcatcttcctcggtgcctttgtcatggtcatcggtgtcattatccaaatcgcctgcgtccctcctaatggcggtgccactgcccagtttatcgtcggacgatgcatcaccggtgttggaaacggcatcaacacttcaactattcctacctaccaagctgagtgctgcaaggccaagaaccgcggaaaggtcatctgtattgaaggctccatggttgccattggtacgctcatcgcctactggatcgactatggctgtctctacggccccgatgacttcacctggagattccccattgctttccagtgtgtcttcgcctttgttgtcattatcatgatgacttcgcttcccgaatcccctcgctggctgctcaaccatcaccgcgaagatgaagctgccactgtcttggctggtctgaatggcgttcctcgtgacgaccccagagttctcatccagatgcaggtcattcgtgatggcgtcaacgcttctga

SEQ ID NO: 45402 - DNA, 418 bp, Zea mays
  Clone ID: MRT4577_141413C.1
ggaatatatctttctctcttaatgaaagaacatgtaattctcttgcgtgttcgaaaaatatatataacatctatacatgttattccagtgatgtctcggagaaaacaattgggacaactatttgaagtcctaacatttatggatccatgaaagaactttcttatgtcttggtgattcttggatgacccacaagaagtgggtccaaataatcatctgtcgttgcccgttgcgcttcatcgtagcgagcccacgtaactagatataggccagcaattatgaagagtcccccaataatgcttccggtgtaaactggggcaccaaggaaaacagttgagaggacggtggaaaacgctggctggagtggattatagagggcagttagcgaaggtccaagaactttgtttgcccaagtcatgat

SEQ ID NO: 45403 - DNA, 447 bp, Zea mays
  Clone ID: MRT4577_141414C.1
ggttcttctgcctcttagactggtagctcccagagacgtggagactcagccatttgaggaggggggatctctccacatgcggtggcatacagacatctcttccgttgctgatgtaaccgacagcaaactcgagcgggtcgagattgtctactggactggcgggaggattctagattacaactctatcacacgacatgaaatccgtggacctcacaatcactcattatcttagcggacccttaagaatcgtcaattccgaaggggttccggatataccaggcgatcttctcgcggtggaaatcatcaaccttggcccgcttcctggcgacgagtggggctacactgcgatttttgagagagataacggaggtgggttcctaactgaccacttccctactgcgaggaaggccatctggtatttcgaaggaatctatgcgtactcccctc

SEQ ID NO: 45404 - DNA, 583 bp, Zea mays
  Clone ID: MRT4577_141415C.1
tcagggaagccgatcttgtgctgcttgccaattcccttgtacaggcgcttcgcgatgatagaagcatgcccatagcctgtgcctgcaccatctgtgcttgatgacgacgattccctggacacctgcgcaagcttcttcacacttgctgatgcggatcttggcaggccccaatatcattgtctttgttgtaccgaccatcagccttggtgtggtctggatcctccttgtcacttgatgtgctgatccagacgtacctgatgcttgtaggcgcccttattcaccttatccatgacggcgtgctcatggcaatcataaagcgttccgtggtcgggcttacgaatgtcagctctctgatacaagtgctgcggagtttttgtacttacggccatgaatgggcttgcgtgggataggccgctggctcagagtgctctgctcaaaggaagatctccttcttgttttccttcccgtcgatcaatagtcagacctcattgactggcttccagatagagcgtgcatacatgagagagcttgtcgcctgtgacagaacgtgggactatgaggtgatgctcaacatactttgcag

SEQ ID NO: 45405 - DNA, 341 bp, Zea mays
  Clone ID: MRT4577_141416C.1
gcgttcctttaggcctcagaacgacacataccacgcctggcgaaagaagtgaaccgattcgcgcttgtattgaatgaaagacactgggatggctcattggcatagatgtttcagaccgtggacatgtatgtcgccttgatgctcaaatccatcaagcttttgtcttgactaaatcctatttcctaacctcaggtgcttggcatggcttccaaagagagattaccgtcaggacagcgaatcaagcaaccattatgttctatcgatgtatatgaatcttactatttcggggctccatggatacgatgtcagcagcgcacatggatgcacagtctacatgaggc

SEQ ID NO: 45406 - DNA, 455 bp, Zea mays
  Clone ID: MRT4577_141417C.1
aagccagccatcccccggggggacccaatatggggggacaaaaaaccaaggctccaaagttcaaacggacacccacaaccgggaattggggggggggggcgtaccaaaaaaaaaacggcagttggaaaaaaaaaaaccggcttacaaaaacttaaaaagaacatcacgcccacataaactttggaccttccaaggaaaaaaccaagctcgctttgggtcgtaaaaaagcgccaaaaaaagaaaaaagcaaaaggtcctgcaaaaaagggggtttgacgcgggcttggttccgcttaaactccctttttttacttgggagggaaaaaacgaaacttaacttccgggcctgagggggggcttttttcaccggggttggattatcaggaaaggaaacaggccacttggatgcttgctccgcgtctgagggagggaagccaaggcccaaccaccacaaa

SEQ ID NO: 45407 - DNA, 533 bp, Zea mays
  Clone ID: MRT4577_141418C.1
gttggatgtatgaatatgtcatcaatatatttgtcattaaacttaatttttttatactaaggttctgtttgaatgcactagagctaatagttagctgttaaaattagctggtggcatccaaacaactcagctaatagtttgactagtagctacttttagttggagacatccaaagttccaaacacccccaactaaatagttcagctaactattagatgcaccctcgatacctattagttcattagctgattcaacctacctaaaatcagctaaggtgctgtttggttcgcatatttgtaacgtgatgggtaactgatgacgttaaattatgtttgtctaagtccaaccgtaattggataccacactagaaagtgataccgacctattcaaattcattactgttgatatttgagcgtgagtcattatcattaccatttacggtatattttatgaaccaaacggcacctaataattagccagcttattgaactcgtaatttcttagccaactaactattagctctaatgtattta

SEQ ID NO: 45408 - DNA, 276 bp, Zea mays
  Clone ID: MRT4577_141419C.1
gctttaagagcatctgcaaaaggttccttaaagcgacagacttcaattacaaatgcaaatactagagcagttcagcaagtgatgatggaaggaaacacccaaacattacccagggggccaggacacaaacaaaggtttttcaacaccacaacctggctcgacaggcaaacagattcctgcgagcagagcagtatttgcatatgcaattgaagtcatgacgctttaagagcatgtcgcaaacggttacttggggcataagcattgccaacatagccg

SEQ ID NO: 45409 - DNA, 241 bp, Zea mays
  Clone ID: MRT4577_14141C.1
ggacctgttcaccaagggcgagctcctccgcaagtccaacccggtgtacatgaaggtaccggtgctcatccacgacggcaaacccatctgcgagtcgctggccatcgtgcagtacggcgacgaggactgggcggccacgggcccctcgatcctccccgccgacccctacgatcgcgccgccgctcgcatctgggccgcctacgccgacagcaagctcttgccggactgggtaggcatcatg

SEQ ID NO: 45410 - DNA, 401 bp, Zea mays
  unsure (1)..(401): unsure at all n locations
  Clone ID: MRT4577_141420C.1
aacatatactccagcatttnctgattgcaaaaggtgaaatatcaagatggggccaaataaatagataaaaggggacatgctaacatatctcaacagttcacacaatatcagcaacgatcacaaacaaaacttgtgatgatgaaaactaggtattgctaaagcaagcgcatgatcgcatcatttcttcttggcagcctccttgttctaccttgactcctgtcaagtcctttttatccacactctttatttctccaacaccaaccttttgactcatgtaatgtacattaaacctacctaggtgaggatacgcttaaatgtcttcaccaccataagcttggtttttatccatcttactataccatctttaccgttttttaagaactttgtctccttcttaaact

SEQ ID NO: 45411 - DNA, 486 bp, Zea mays
  Clone ID: MRT4577_141421C.1
tagctagctagctagctatagtgcttctctgccagtcattttccaatgtttcgcaatttacattttagttctgaatagctgcatgcttaaatttggacatgaacgctgaaatttctcctgcccctatacgagccatagcccataggagatgtgaaacatcagaaattttggaggaaaaaggggctgtgagagatttgaagtatatataaaatctaaaagatgggagaataatcccatcattcatgcccttaatttagatcaaattcatccgatatgtacacctatgatttagcactgctaaagattgcaagatgccaatattttttggctgagggtaagatactaagatgtcaaaatgctcatttgggcctgattggttgtcttctcagcaagcatggctcacatcatagaagtagaaccaggctcttttttgccaagctcgcattatgcaacagacttttgtttgtttaaaatttgggttgggct

SEQ ID NO: 45412 - DNA, 814 bp, Zea mays
  Clone ID: MRT4577_141422C.1
aaaaaaaaatgttatcctttttcttctgcttctgcggaacgaaactgccacccgacaaatttattctgcgatccgcagcaagaaacagacccacacccatccatccaaactgaatggcaattgctggttccgggttccccgttcccatcaacatcaacagagcgcccctttctcgccggtgcgccgttggtgggtggtgtgggtgcctcgtcgtcgtcgcactttgcggttccgtcgcttgggctcggacgaccaggacagggcgaggccgactggccacgtaccgtcattacaccaagcaatcatgccccttgcgcgccgcgctcgccacgtcacatcgtgtccgacgcgacgaaggggtcgtagtggaggcccaccgccgagagcagcggcgggccacgcagcgccgtgatccagaccctcaccgttgtgcccgcgacggggcagggcagccggtgcagccgcttgtgccccaccgtcgtgccgttggccacgggcgcgccgtccacgtacaccgcgtgccgctccacgcgctgccccagcgccacgtgctcctggatccgcaccacgttgaacgcccgcgcccgcgcgcccggccgccgccgcagctcgatccagtacccgttccggcgcccgtcctcggccgtcggcgcccagtacgtgtcgtcgcggccgtccatcacgttgcgcgccgcgaaccgggcgccgcgctcgctgctggccctggcctcgctgcccgcggcgaggtccgtgccgaagacggtggccacggcggccccgaactcgcgcagccgcgcgatgtcggcgtcctcga

SEQ ID NO: 45413 - DNA, 284 bp, Zea mays
  Clone ID: MRT4577_141423C.1
atcaggggtttcacacatagcttcgtcgatttgaatttgatgtactaatggagtctaagggtggcaaaaagtctagcagtagtcgttctatgatgtatgaagctcccttggctacagcattgaggacgttcgacctgccggaggtgaagagttccatctgtgttatccactggcgagagccatctgtatccatggctctcatctagtagtaggattcttctgacactttgatctgacaatcccggctgtgttctgtatcgacattcccgcttgtcttgatctcc

SEQ ID NO: 45414 - DNA, 488 bp, Zea mays
  unsure (1)..(488): unsure at all n locations
  Clone ID: MRT4577_141424C.1
tcggcggtgccacctacactgccaaagcgagtgtttcaacgggtggctaggcttttcgtttacacttagctctttcagacgcagatgctcggttagaacagtgcccgtcctacacacgactaaccaatccagacggggccacatcctcagcgtgtatcttagctattccaacatctagatcgaattntttctcagccctcttttatacccatgccctcatttgccctcaaagctacgctaggataatgcgcttctgcgaacataaaggcagagattcacgcagcaggaaaagtggctctccatccaccaaaccaaaataacactaatacacaatttctcactggatccaccattttcacactaccaacggtatacggcaacagtctggctgcggtgctgctgccaatgataaccatcgcctccttgctgaataagaaatagcctgatcatgccaccaccatgcacaatggagatggagggtttaggat

SEQ ID NO: 45415 - DNA, 876 bp, Zea mays
  Clone ID: MRT4577_141425C.1
aaaatacatcatccattcatttcctcgactagatattgctagtactgaaacattcttgtccgtagccatttaattggagcttagttcgatcgtgcaattggttaaggtccatggcggtcaggtctttgctgctccctctggccctgctggctctcgcagctagctcggctgcggtggctcagctggagatcggcttctacagaaaaacatgcccggacgccgagaagatcgtccgcggggagatggccaagatcatcgccgctgcgcccagcctcgccggcccgctcctccgtctccattttcacgactgcttcgtcaggggttgtgacgcctctgtcctgctggaatccaccgacggcaacgtggcggagaaggacgccaagccgaataagagcctgcgagggttcggctccgtcgagcgcgtgaaggccaagctcgaggccgcgtgcccgggtatcgtctcctgcgctgacgtgctcaccctcatgtcccgtgacgctgtcgtgctggctaagggccccttctggccggtggctttgggcaggagagacggcagagtgtccagtgccacggaggctagcaaagagctgcccccagcctccggcgatgtccctctgctcgccaagatcttcgcctccaagggcctcgacctcaaggacctcgtcgtcctctccggcgcccacacgctcggcacggcgcactgctcgtcttttgccgaccggctctacaacaacaccggcgagaatgccctcgtcgaccagtctctggacagcgagtacgccgacaagctgaggctcagtgcaagagcgttgatgaccgcaccatgctgtctgagatggaccccggtagcttcaagaccttcgacacagttactac

SEQ ID NO: 45416 - DNA, 747 bp, Zea mays
  Clone ID: MRT4577_141426C.1
ctcgaggccggccgggatacttgcgctctcaccgcacacgagagaagaaaattccgcaccgaacaatctccgacgcggtattcaccatcttgtgagcgcaacaacgccacccgataaccggagcaactcgacaacggagcgaaaaaggagggagccggctctacgctgcatgcataatcaacgctggtaacgacaagatgcatgagttaattctatcacacttgccttgctaacagccctaatcgcatcgacgtcatcaacaacacccagcccctcatcaatagtcgccacaacgacaagctgattgaccgggttcatgcttttgatcacctcttgaacctgctgatctacaacgtccgcgacatgtacacacacatccccaacactgacaagggcaaaaacaacgctctgcactgtgaacataggatcagattcctcattaagatgctcctacatgtcgactctctcatcatagcgctaaggaaccccaatcgatctgcccaaccaggcaccttgcagcacttatgccctttctctgcgcgcacgtaatccgcgcctctattgaaaaaactgaaccttatgtgcgtcttgtgggattagctggctatcttgaactgacgctgatgtgacatgtcaatggcacatgaacatacatgtcatgagtttgattgataaatggcgcttgcagcactttcatccatgactgtctagatagcactctgactattgcctcgccgcattgcacgg

SEQ ID NO: 45417 - DNA, 879 bp, Zea mays
  unsure (1)..(879): unsure at all n locations
  Clone ID: MRT4577_141427C.1
cattgggaccctcgaggccggccgggacgccgctgctcgtgccgttgccgacaaccagaagaagcaggctgtcgcaaagggcgccggtgttgacccttctgtactcgagcgcattgttgcagaggaacgcgaggcaaagggcaagctgcccagataccctggcctcgagcgctggacactgctcgagaagatgggtgacggtgccttcagtaacgtctaccgcgcacgagacaacactggccaatgggacgaagtcgccatcaaggtcgttcgtaagttcgagatgaactcacagcagagagcaaacatcttaaaggaagtacaaatcatgcgccaactcgaccaccccaacattgtcaagctcattgacttttccgaatcacggcaatactactacattgtcctcgagttgtgccccggcggtgaactgttccaccaaatcgttcgccttacctacttttcagaggacctttctcgccacaccattattcaagtcgccaaggctctgcaatatctgcacgaggaggcgggtgttgtacatcgagacattaaacctgaaaaccttcttttctacccaattccgtttgtccccaccaaaaaccccaagccaagagggcctgatgatgaggaaaaggctgatgagggcgagttcgtcaagggtaagggtgctggtggcatcggtctgatcaaggttgccgactttggtctcagcaaggtcatttgggatacccagacatggacacccttgcggtactgtcggttacaccgctcctgaaattgtcaaggatgagcgctactccaagagtgttgacatgtgggcnactgggttgcgtgctctacacctcttcttttgcggttcccaccatctacgacgaatca

SEQ ID NO: 45418 - DNA, 271 bp, Zea mays
  Clone ID: MRT4577_141428C.1
aaatcttggatgaggatgtgcttttacaggaaatgcgagaagcgaccttagggctcactatagcatgatcgggtacgagtgcaacttatggtgaggcagaaattgcctggtcgaagcgatgactatatgtcgagccatgctgaaatcgatatctattcaccaggagtaagaacttacgagccaccgtagaggtcaatgatgcattgagaacacaaaggtcatggatgatgatggacttctacaggaaatggaagaattgaccagtgttatt

SEQ ID NO: 45419 - DNA, 299 bp, Zea mays
  Clone ID: MRT4577_141429C.1
cccactcgttcgtggacgcgtggtcggacgcgtggtgcgactgggcttgcccgttccgcgccccaagggtacacggtctctctcacctgtcctaggtcgtaggagggagcgtttgtcgccctccccttcgttttcttgtgcctggacccgcgctacttttgtcgtcccttttcgtttattgactggcaagtcagctgcttgtttatctactttttattctaggtgaaatggttgagcatctatttgaggaacacattttttgttaatagacttgaccctgtatgaaaaaagtttgatag

SEQ ID NO: 45420 - DNA, 602 bp, Zea mays
  Clone ID: MRT4577_14142C.1
ccggccggggtactacccataccagcgatagctagcgatggatgagatctgtccactgcttctcatcctcgcggctgcgcgtctagggcctgtactaacgcgccgcatctgcagatggagaagacgaagatgcggctgcacatctgtctgaagcactctctccccccacctgtgctccacgacgacgcgcaagcacgccaacaagtacaaggtgctggacgcgatgacggtgctatagatgcaggtggacgcgttcaataagcgcgtgaaggcggcgcggaggctcgccaaggaggaggccaggacggccgcgacgcccgaagcgcgcagggcgctgaacctctgcaagacctactacctggacgcctgcgacaacctcggggcctgcaagtgcgccatcggattacgcgacgccgccaccatacgttccacaatgatgatgtcggcgcagaacacgcatagctgggaataggagatcaggacaccctcctccaaaaaccccctgaatgaccacttgaggtggctcatcggagatgtcccagatctgtcggaccctctctacttgataccttacgcacatgagcattgatttcgctgcatct

SEQ ID NO: 45421 - DNA, 2108 bp, Zea mays
  Clone ID: MRT4577_141430C.1
tgtcagctcattccttctcaagagctggttgccaaggagttgcatggagccaagtggaagtttcgtcatatatataggggtcagcctcgtaggcatctcttgactactggatggagttcatttgtcaataaaaagaaactggtttctggggatgcggtcttatttctccgaggtgatgatggtgaactaaggctgggcgtacggagggccattcagcttaaaaatgaggccctttttgacgatttcagttgcgacagtacaaaacggcatacattgttggctgtagctgattccttgaagcacaaaagtgtttttcacatttcttacaatccaagagctactgcttcagaatatattataccacaccataagttcctgaagagcctaaatcttccattctgtattggagcaaggatcaacttacagtgccataatgaagatgttagtgaaaggcgatctggaatggttgttcatgtcagtgaaatagatcccatgaaatggccaggctcgaagtggagaagcctgctggtaagatgggaggatggtgttgaatgtaacggccaagatagagtatctccatgggagattgagatagctggtggctctgtctctgttgctcattctctgtccgcatctagctctaaaagaaccaagttgtgtcctcagggaaatttggacgttccaacaatgtatgttacagggaatgggaatggttgtactgactccgtggaaactggaaagtttcccagggtcttgcaaggtcaagatttgatgagttttaggactcgtcatgttccgtctgctcctcaaactgttgaggctgcaaaacttcaatcttctggtgctagtaggttcctcagtaatgcatgtggctgcgcgttgggtggtccaacaagcagactcgcagtgcataactctgattttacctaccaatctgtaggcttcaatgaatctattggattctcagaggtcttgcaaggtcaagaaatttctcgggcagttcctatgttccaaggaatgatgtctgaggcttgttcactaaaaggaggatatgggctgcatagttatatgcgtaccccagttgctgttactggattgtcagccacaactcaagagtgttctctcacactatctactccgccaggagcacaagttccttctgtctaccctgataatatttttaaccgaactgtggttcgacagcttggactggcaagcaagtttgatggtggagctacaaatgcccagcagtctggcccatttgataggccgagggaaatttggagcaagccacagcatgaaatatctgatcaaacgaaaatggatcactttgagactagaagagcttcagcacctggagatgatgctgctaagcatgggtctggtggagaggtggttcgcaaaactagctgcagactttttggtttctcgttgactgagaagatcttgccagcagatgatgatggcatcaaggaagtgacctatgagcctgagtgccagaatccacggatgctggacctgttcgggtacaactgctcagccccaagtgctgctcttccagctctgtgtgctgccccctttggaatgtgatgctacttcaataacgctgctgagtatttccatgtactcttagaagttttactttcctaatacccaagtgtatgtcataagctgccttttgacatcattccccctgttggtctgcctcaagcgaagcagtcatttgcacaagtaaacaaaggatcgttgatgatccacttctcgccatgcctcaccctatcgctaagatattgtaattagtcttaggatacgaagaggcagtacattgtaactgactaacttctgtggctgatccttcagaaaagttgtgcgatgaagcaaacaattttctttagaagttcttcgctggcagattttagattcatgtggggaggtttgtcagctcagctttaatgtactggttatgtatctttaaatcagctgctgtacgacttttttttagctccaagccctggttgcagtcgcctaggccgtgtgattgtatcagtatgtaagacatgctatattttaatattcttatcgatatttattctgatgcattgtgtgtg

SEQ ID NO: 45422 - DNA, 717 bp, Zea mays
  Clone ID: MRT4577_141431C.1
gttctgcgtaagaccgacccacggtattcatgtcaaagggagtttgccctgaagcatttgcccaaggatccacttttccaattggtccgtctggaaccttttatctaatttcatttacttttttgagttgaacggttttaaatgtaatctttggttacaggtgtccaagttgtatgaagttgtacctcctatcctcactgagctgggcaaggtcaagaacccatggccaaatgttgatgctcacagtggagttttgctgaaccactttggactatctgaagcacggtattacactgtcttgttcggtgtttcgagaagcatggggataggatcccagctcatctgggaccgtgcccttggcctgccacttgagaggccgaagagtgttaccatggagtggctggagaactactgcaagaacaaggctgcctgaagattttaacaattgctgctttttcccaaccatggctaataataattaaacatgcgttatagagttttttccccttttgactgttggataatacaagagcaacatgctctagaattttgtatcttccatcacttagtcggcatccagattgttgatctgcggcaacactgcagaagagattaggacatgctgattaatatttgcagagttggtgattacagatttgggctgttgcatgtatcatgtatgccaattatctcgttgggaaaaaaaaaaaaaaaaaa

SEQ ID NO: 45423 - DNA, 534 bp, Zea mays
  Clone ID: MRT4577_141432C.1
gccgcggaccgcatcacctctggggtcttgacctcttcctagtttctaactaccaccggggcgactggcctaaatacacaaacactgggcctcgcggccggcgtcgcattgtgcctgagcatccggctgcgacaaggccagttcctcatacaacgtgaccggtatctccaacacgcacctctgcccggtgaaccaccgccggcacaactgggacctgcaggggggggtgtgcaccatcaccggcaacccctactggccctccgcttggcgctgcacctccacgtgtgaaccgcgccctatgcgtccgctgcgcggcatatggacgaggcgccatgcccccaccgtccttgcccgtgccggcctaacactaatcggcaatcgcgcgcaagctggtgacactccccttatacgagcccttggctggtgtcgggcacctgggcggtacgtaccgccttgatgcctgggcagccggtggcgtgctggaccgatccctgtacctcctagggctacgggctaaagcccgcatcagtgacc

SEQ ID NO: 45424 - DNA, 326 bp, Zea mays
  Clone ID: MRT4577_141433C.1
gcggcacgcctcctgaaatgaatgcggttacgccaatggcggcacgcaaatggctgacagcccgagctgagcaaccagccaaagcgagaaatccacttggagaagcttctgcgggtagggtttctcccggcccgacgatggcgttcgccaagttgttgaggtcagaggcccgccggccacttcggagtgttcccggtgaacgccgcctgccggtgcgagaggcagcgatggcggagtgcagctcgcggacaagctcaagatattcaagaccgacaacttcgaccccgacgcctacgtgcaggtcaagtgccgctccatggacgaga

SEQ ID NO: 45425 - DNA, 285 bp, Zea mays
  unsure (1)..(285): unsure at all n locations
  Clone ID: MRT4577_141434C.1
cgcacggatccattctagcgggcggccgcccgctttataatttttgnctgggaaaaaaggggactttttaaaatacttattgcggggaggccccacatatcaggaggagaactttattctccggtatatcataaaaaatcgtagaaggtggccccaccggtggggggctaccaaaaggaggggggacgtttcccaaacacttgggttaaaaggggcaacttttgttgttgtaaaaaagcggcaaaattttgccaccatatgtggggggaatagcggcaaatgttg

SEQ ID NO: 45426 - DNA, 763 bp, Zea mays
  Clone ID: MRT4577_141435C.1
ggcccgggccgcggaaaaaaaaaaaaaaaaaaaaaaaaaaaaccaagttatattgaagtcgtacctcccgatcctcactgagctaggaaaggtcaagaacccgtggccgaatgttgatgctcacagtggagttttgctgaaccactttggactatctgaagcacggtattacactgtcttgttcggtgtttcgagaagcatggggataggatcccagctcatctgggaccgtgcccttggcctgccacttgagaggccgaagagtgttaccatggagtggctggagaactactgcaataacaaggctgcctgaagattttaacagttgctgttttttcccaaccatggctgataataattaaacatgcgttatagagttttttcccccttttgactgttggataatacaagagcaacatgctctagaattttgtatcttccatcacttagtcggcatccagattgttgatctgcggcaacactgcagaagagattaggacatgctgattaatctttgcagagttaattggtaattacagaattgggcttttgcatgtatcataaaaaaaaaaaaaaaaaaaaaaaaaaaaaaaaaaaaaaaaaaaaaaaaaaaaaaaagggaaaactatatgggcggccctttttgaggttccaagttttcgaaggggtgcatgctttgtatagagctattttattgtgccccctaaggtcaatttactggccgtttttttataaccatacctctgggaaaaccccggggttt

SEQ ID NO: 45427 - DNA, 370 bp, Zea mays
  Clone ID: MRT4577_141436C.1
gagagcaaaacaaacatatatatgcagacatgcggacatggcccataatccagatacctatcgaactcgacgggcaaccaactaacaccgactaaaggcgcacacaaatggaacgcgtgacactcttaaccggcaccgttataccaaacggaaactcgtctaaatggagatgaaactagcaccctcactatacggaaaataagcggaaaccttaaccgatacctggtggctcaggctactaaataggacgctgcaccagactccaggcaagcaacgcactaagctagctcagcaagcccggtaacaaagacaatgcacctgcaggggaacacatggtgacagaccaaaactgcaatgacgggtcgagcat

SEQ ID NO: 45428 - DNA, 332 bp, Zea mays
  Clone ID: MRT4577_141437C.1
ataataagtccggttttagtatgatatatatagtatcaaaggagaacatcgcggaccaattaatatatggagacaggagacgcaatcggatcaaccaacatgcatgtggacacacgtacatgagcacaaagactgacgctaaacatgcagagagagatagcaaactgaagaactctgcttctgtctatatgcacacacaccacacaatacctatgtatggcagtcagctaggactcgcttattattgctcaaccaccaccacaagctaaatagataataatcatatgcatggtgcgcgatcgatgtgaacagcaattgcaggggtcgcactt

SEQ ID NO: 45429 - DNA, 338 bp, Zea mays
  Clone ID: MRT4577_141438C.1
gccggccgggctgcgagaacttccagcgaagcaagcagccttaaaaaaccgtatcgtctcgcctgttcagtttccttctcctcttcccgcagcccggtttgccgaccaggttccaccgttccagagtagccaagtacctccccgccatccccaccgaacgcatcgccaaggtgttttcgtcggcgccagaggccgagccgctggcagagggccagtagtgtgtgtgtgtgtgcgcgcgcgcgcgagcttgtctttgccggtggtgactctggatttggatcaccttccgaactgaactgaaaataaggaagtgcgaatccgggggccagctacagatg

SEQ ID NO: 45430 - DNA, 569 bp, Zea mays
  Clone ID: MRT4577_141439C.1
ctttttgcctaaataaatcgtatcatctcacctgttcagtttccttctcctgttcccgcagcccggtttgccgaccaggttccaccgttccagagtagccaagcgaatcccgtgtctggttcgcgcgatggcggaggagcagtccaaccccaagccccagcaagcggaggagagggaggttatggtggagcagcagcagcagccgaggagggccacgaagctgaggtacctcgacttcgtccaggtggcggctgcccaggccgcggtgtgcctcgctgggctctacggcctcgccaaggaccacgccggcccgctccgccccagcgttgacgccgtcgagtctgccgtcaagggcgtcgttagccccgtctacgatcgcttcggcggcctgccgctcgacgtcctcgccttcgtcgaccgcaaggtggacgacacggtgcacgaggtggacaagcacctcccgggcgcgctgaaggcggcgtcggtgcatgtctacgcggtggttcggggcgtgccggaggtggcgcgcgagctgggcgccgaggcgcatcggtcgggcgtgaggggcg

SEQ ID NO: 45431 - DNA, 114 bp, Zea mays
  unsure (1)..(114): unsure at all n locations
  Clone ID: MRT4577_14143C.1
gttagtagaggctccgtttgatcaataagcaactacatacacccttccgtttggcgtcgcttcctccggccgtaccctccctggtcgtgtcgatcgnnnannannnactccggc

SEQ ID NO: 45432 - DNA, 1239 bp, Zea mays
  Clone ID: MRT4577_141440C.1
ggggtggggggggttttttttttttttttttgattgcgacatcgaaccacttcatttatacaaaagcacgcagcacagagctaaatggaacacagcgtcatcgtcatggtccgtaaccatcgtcccatcacgcatctagtacaacgccgctaccataccataccaccatctttagctgccccccggattcacgcttccttattttcagttcagttcggaaggtgatccaaatccagagtcatcaccggcaaagacgagctcgcgcgcgcgcgcatacacacactactggccctctgccagcggctcggcctccggcgccgacgaaaacaccttggcgatgcgttcggtggggatggcgggtaggtacttggcccccgcgtagccgtgctccgcggcggctgcgaccgccctgttgtacttgtcggcccagtgcgcggcggtgggcacgacgatctccgcgacgtgcgggaacaccggcaggccgttcagcgagcgccaggcggagacggccaggtgctccgccgcgggctcgtaccgcacgtagaggtccttggccacgggctccacgcggccgtgcacgtcccgcgccaccggctccgtcatcgcgagcgccgcgcgggcgtacacgtcccgcgccaccggctccgtcatcgcgagcgccgcacgggctgcgcccctcacgcccgaccgcagcgcctcggccgccagctcgcgcgccacctccggcacgccccgaaccaccgcgtagacatgcgccgacgccgccttcagcgcgcccgggaggtgcttgtccacctcgtgcaccgtgtcgtccaccttgcggtcgacgaaggcgaggacgtcgagcggcaggccgccgaagcggtcgtagacggggctaacgacgcccttgacagcagactcgacggcgtcaacgctggggcggagcgggccggcgtggtccttggcgaggccgtagagcccagcgaggcacatcgcggcttgcgccgccgccacctggacgaagtccaggtacctcagcttcggggccctcctcggctgctgctgctgctccaccataacctccctctcctccgcttgctggggctgggggttggactgctcctccgccatcgcgcgaaccagactcgggattcgcttggctactctggaacggtggaacctggtcggcaaaccgggctgcgggaagaggagaaggaaactgaacaggtgagatgatacgatttatttaggctgctt

SEQ ID NO: 45433 - DNA, 1921 bp, Zea mays
  Clone ID: MRT4577_141441C.1
aaaaaaaaaaaaaaaaaaaaaaaaaaaaaaaaaaaaaaaaaaaaaaaaaaaaaaaaaaaaaaaaaaaaaaaaagttcttccagcgaagcaagcagcctaaaaaaaccgtatcgtctcgcctgttcagtttccttctcctcttcccgcagcccggtttgccgaccaggttccaccgttccagagtagccaagcgaatcccgtgtctggttcgcgcgatgggggaggagaagtccaacccccagcaccagcaagcggaggagagggaggttatgggggagcagcagcagccgaggagggccccgaagctgaggtacctggacttcgtccagggggcggttgcccaggccggggtgggcctcgttgggctctacggcctggccaaggaccacgccggcccgttccgccccagcgttgacgccgtcgagtctgccgtcaagggcgtagttagccccgtctacaaccgtttcgggggcctgccgctcgacgtcctcgccttcgtcgaccgcaaggtggacgacacggtgcacgagggggacaagcacctcccgggcgcgctgaaggcggcgtcggcgcatgtctacgcggtggttcggggcgtgccggaggtggcgcgcgagctggcggccgaggcgcagcggtcggtcttgaggggcgcagcccgtgcggcgctcgcgatgacggagccggtggcgcgggacgtgtacggccgcgtggagcccgtggccaaggacctctacgtgcggtacgagcccgcggcggagcacctggccgtctccgcctggcgctcgctgaacggcctgccggtgttcccgcacgtcgcggagatcgtcgtgcccaccgccgcgcactgggccgacaagtacaacagggcggtcgcagccgccgcggagcacggctacgcgggggccaagtacctacccgccatccccaccgaacgcatcgccaaggtgttttcgtcggcgccggaggccgagccgctggcagagggccagtagtgtgtgtatgcgcgcgcgcgcgagctcgtctttgccggtgatgactctggatttggatcaccttccgaactgaactgaaaataaggaagcgtgaatccggggggcagctaaagatggtggtatggtatggtagcggcgttgtactagatggttactgggaatgacgatgacgttgtgttccatttagctccgtgctgcgtgcttttgtataaaagaagtggttcgatgtcgcaatcccttagtttatctgacgatgcggtttttggctgttttagtttttgtttggtcaggttcaggttagggcgaaaacgataaccttgcgtcattgggcagcttttagagtcttttttttgtttcctggtagaaatctgtgtgcttagcttagcctgttgtattagcccccagtgcaggttatgtcgtcgtcggtggaaggatgtgtgctctctgcttttacttatctcttacattatgacgatggcggcgtggaaggtgttctaatactgcgggcgtcggccagagacccacggtgagctcagggcgatgaacgtttttgttttcggcgtctgccgttcaggctccaggactgcctaactatagtgtgttggtgcctttttcggtcgccaatcactaaataagaaccgtggcggtgctttctgtacaggggtgacgaaaagtcaccgatggcgtctggatctcgctcccgggagagacccgtcggtgaggagagatcctaagagttatctaggctcgggtagatcgatctaaactcctctaatcgacgtagagtcgaagagaagcgaagaatttggggattgagaggctaaactagaactagactagaacttttcctaattgtataatgcgagataaaagtgttattgatttgattgatgattataaatcggccgtaacttttttactttttt

SEQ ID NO: 45434 - DNA, 191 bp, Zea mays
  Clone ID: MRT4577_141442C.1
ggagcttagttgataatgtctagttaacatttcacaatactgatgctaaaggttgtttgtgtagccggtgccattcaggcctcaaacaagtctatggagactgacattgtagttttgcttgcagccacagttccgcgtgtgtggaccaacgctgttcttcctcgttctcaacaccctgatgatcttgctgt

SEQ ID NO: 45435 - DNA, 237 bp, Zea mays
  Clone ID: MRT4577_141443C.1
gtcggttcatctcgctgagtttaagcatataaataagcggtggagaagaaacttacgagggttgcgctagtaacggcgagcgaaccgggagcagcccagctcgcggcgctcggtccctggttcagcttcccggggcgcgcccatatttcttggttggtggacctattttcccctgccctggatcggcaagtcgaggtttcccattcgggctttatttaatgactgattttttttccc

SEQ ID NO: 45436 - DNA, 1214 bp, Zea mays
  Clone ID: MRT4577_141444C.1
cattggccctcgcgggcccggccggggttcttccagcgaagcaagcagcctaaaaaaaccgtatcgtctcgcctgttcagtttccttctcttcccgcagcccggtttgccgaccaggttccaccgttccagagtagccaagcgaatcccgtgtctggttcgcgcgatggcggaggagcagtccaacccccagccccagcaagcggaggagagggaggttatggtggagcagcagcagcagcagccgaggagggccccgaagctgaggtacctggacttcgtccaggtggcggctgcccaggccgcggtgtgcctcgcggggctctacggcctcgccaaggaccacgccggcccgctccgccccagcgttgacgccgtcgagtctgccgtcaagggcgtcgttagccccgtctacgaccgcttcggcggcctgccgctcgacatcctcgccttcgtcgaccgcaaggtggacgacacggtgcacgaggtggacaagcacctcccgggcgcgctgaaggcggcgtcggcgcatgtctacgcggtggttcggggcgtgccggaggtggcgcgcgagctggcggccgaggcgcagcggtcgggcgtgaggggcgcagcccgtgcggcgctcgcgatgacggagccggtggcgcgggacgtgtacggccgcgtggagcccgtggccaaggacctctacgtgcggtacgagcccgcggcggagcacctggccgtctccgcctggcgctcgctgaacggcctgccggtgttcccgcacgtcgcggagatcgtcgtgcccaccgccgcgcactgggccgacaagtacaacagggcggtcgcagccgccgcggagcacggctacgcgggggccaagtacctccccgccatccccaccgaacgcatcgccaaagtgttttcgtcggcgccagaggccgagccgctggcagagggccagtagtgtgtgtgtgtgtgcgcgcgcgcgcgagctcgtctttgccggtggtgactctggatttggatcaccttccgaactgaactgaaaataaggaagcgtgaatccgggggccagttaaagatggtggtatggtatggtagcggcgttgtactagatgcgtgatgggacgatggttacggaccatgatgatgacgctgtgttccatttagctctctgctgcgtgcttttgtataaaaaaaaaaaaaaaaaaaaaaaaaaaagcggcc

SEQ ID NO: 45437 - DNA, 593 bp, Zea mays
  Clone ID: MRT4577_141445C.1
ccggccgggtccggacatctcgcccgagagtgttttgagcattgatgagcgcatcggaaaccagctacctcctcctggccaccaccgacaagtatcttacgcgccttcggagcgtgatcccgagtctgccacttcggagcactcccaggtgccgctggtcggtctgccatcgtctcccaagcctggtgcgcgattcccatctctccccgcgtcgcccaagcctggtcagaccttccagcgctccaacgcacctacagctgtccgcaccggtggttctctgccgttgcgtgcctacgagccggcgctggcgtcgccctacaccattgcccagactaccaagcagaccgtgtttgagagaaagggtccgctgtcgcctagtggagcaatgactccttacacagctggtgcagtgccatactcaccttaccaacccttcacaccatgtatgccagtgacaccatcactcatcaccaaggaggaccgaaagaggatgagacgcatggtgcccaagacaccaacgctggagatggtgcagagctctgatgatgtttggtaaacgaaactgacgggtcggatcggtatcggttggagtt

SEQ ID NO: 45438 - DNA, 1463 bp, Zea mays
  Clone ID: MRT4577_141446C.1
cattgggaacctcgacgggggtctgggagcgaagcaagcagcctaaaaaaaccgtatcgtctcgcctgttcagtttccttctcctcttcccgcagcccggtttgccgaccaggttccaccgttccagagtagccaagcgaatcccgagtctggttcgcgcgatggcggaggagcagtccaacccccagccccagcaagcggaggagagggaggttatggtggagcagcagcagcagccgaggagggccacgaagctgaggtacctggacttcgtccaggtggcggcggcccaggccgcggtgtgcctcgcggggctctacagcctcgccaaggaccacgccggcccgctccgccccagcgttgacgccgtcgagtctgccgtcaagggcgtcgttagccccgtctacgaccgcttcggcggcctgccgctcgacgtcctcgccttcgtcgaccgcaaggtggacgacacggtgcacgaggtggacaagcacctcccgggcgcgctgaaggcggcgtcggcgcatgtctacgcggtggttcggggcgtgccggaggtggcgcgcgagctggcggccgaggcgcagcggtcgggcgtgaggggcgcagcccgtgcggcgctcgcgatgacggagccggtggcgcgggacgtgtacggccgcgtggagcccgtggccaaggacctctacgtgcggtacgagcccgcggcggaacacctggccgtctccgcctggcgctcgctgaacggcctgccggtgttcccgcacgtcgcggagatcgtcgtgcccaccgccgcgcactgggccgacaagtacaacagggtggtcgcagccgcagcggagcacggctacgcgggggccaagtacctccccgccatccccaccgaacgcatcgccaaggtgttttcgtcggcgccggaggccgagccgctggcagagggccagtagtgtgtgtgtgcgcgcgcgcgagctcgtctttgccggtggtgactctggatttggaccaccttccgaactgaactgaaaataaggaagcgtgaatccgggggccagctaaagatggtggtatggtatggtagcggcgttgtactagatgcgtgatgggacgatggttacggaccatgacgatgacgttgtgttccatttagctccgtgctgcgtgcttttgtataaaagaagtggttcgatgtcgcaatcccttagtttatctgacgatgcggtttttggctgttttagtttttgtttggtcaggttcaggttagggcgaaaacgataaccttgcgtcattgggcagcttttagagtcttttttttgtttcctggtagaaatctgtgtgcttagcttagcctgttgtattagcccccagtgcaggttatgtcgtcgtcggtggaaggatgtgtgctctctgcttttacttatctaaaaaaaaaaaaaaaaaaaaaaaaaaaaaaaaaaaaaaaactcgag

SEQ ID NO: 45439 - DNA, 2011 bp, Zea mays
  Clone ID: MRT4577_141447C.1
ccacgcgtcagcaatataagagctgcatgcctgttcctgtgctgtttccttctccaccaccgagcagcaacctggtcgtctcgccagttcattttgcttcacagtcgcgaagcgaacgctgtggcccgggagctccagggcggcggaacagtccagccccccgcctctgccccccgcaggggagggcggggcgggcgggggttcttccagcgaagcaagcagcctaaaaaaaaccgtatcgtctcgcctgttcagtttccttctcctcttcccgcagcccggtttgccgaccaggttccaccgttccagagtagccaagcgaatcccgtgtctggttcgcgcgatggcggaggagcagtccaacccccagcaccagcaagcggaggagagggaggttatggtggagcagcagcagccgaggagggccccgaagctgaggtacctggacttcgtccaggtggcggctgcccaggccgcggtgtgcctcgctgggctctacggcctcgccaaggaccacgccggcccgctccgccccagcgttgacgccgtcgagtctgccgtcaagggcgtcgttagccccgtctacgaccgcttcggcggcctgccgctcgacgtcctcgccttcgtcgaccgcaaggtggacgacacggtgcacgaggtggacaagcacctcccgggcgcgctgaaggcggcgtcggcgcatgtctacgcggtggttcggggcgtgccggaggtggcgcgcgagctggcggccgaggcgcagcggtcgggcgtgaggggcgcagcccgtgcggcgctcgcgatgacggagccggtggcgcgggacgtgtacggccgcgtggagcccgtggccaaggacctctacgtgcggtacgagcccgcggcggagcacctggccgtctccgcctggcgctcgctgaacggcctgccggtgttcccgcacgtcgcggagatcgtcgtgcccaccgccgcgcactgggccgacaagtacaacagggcggtcgcagccgccgcggagcacggctacgcgggggccaagtacctccccgccatccccaccgaacgcatcgccaaggtgttttcgtcggcgccagaggccgagccgctggcagagggccagtagtgtgtgtgtgtgtgcgcgcgcgcgcgagctcgtctttgccggtggtgactctggatttggatcaccttccgaactgaactgaaaataaggaagcgtgaatccgggggccagttaaagatggtggtatggtatggtagcggcgttgtactagatgcgtgatgggacgatggttacggaccatgatgatgacgctgtgttccatttaggagagatggctgagtggactaaagcggcggattgctatcgcggtgtcggatgatcattcgcacatccattgcaattcatctcctcttcctcaaccaatctttcaatataactctttttcccacgtttcataacccacatactcaacatgtctggaaactcaagcgtcggcagcaggaccgtctacgaggctggcgaccaggtcaccaagtccaacgccgagatcgagcaggagaagaaggagaacaggttccacgagggcaaggagaactctcacaaggctcttgactcaaaggacgagcgatcaattgccaacaagctcgagcgcgaggagaagcgcgagaaggagggtgaggagaagtctctcgaggacctgcagagggagaaggatgctaccctgcctgcacgcgcacacggcaacgagccctccaagggagccaagatcgaccaggaactgagggaagaggacgaggccatgctcaagaagaagggcgctgcctaagtttgttgctgtaaaagacgtttttgatacctgcactttttcatgcgcatgcctggagttggagggatatacgcataatgactcggattgacgataaaacgtctccacgaaagcctggaatatggctgagacatgaatgaagatatgttcaccacagaaaaaaaaaaaaaaaaaagcggcca

SEQ ID NO: 45440 - DNA, 324 bp, Zea mays
  Clone ID: MRT4577_141448C.1
gctatagatgcctacgcgacgctctagaggattcaagcatacatacacccgcatgcctacggatatcattcatatagtgatacctatatcgaatgaactgaggaaggcgccacgacagctgcgactgacaacactctgtggcctcacatctcactgggcttgcagcacatgcgcctttcactatctaaggacatagagacgaggacctgaacaatagctcttccgaacagagatacattctgcatgattaatgcgactctcgctggaatagcacaatcagcgcatgggttgaaccagtgtatgcgcagttgtgaccactacaca

SEQ ID NO: 45441 - DNA, 236 bp, Zea mays
  unsure (1)..(236): unsure at all n locations
  Clone ID: MRT4577_141449C.1
tctgtcttgcttgagctgagctcttgctgtctgtggacctctttgggagtggtgaacggaggatggggcgcggtaagatcgagatgcaagaggatcgagaactcgcaccaacagggaagtgaccttctccaagcgccgggccggactggtcaagaaggccagggtgatcggngtgctctgcgacggcggggtcggngtngtcattttgttcagcgggggctggctgcacgactact

SEQ ID NO: 45442 - DNA, 496 bp, Zea mays
  Clone ID: MRT4577_14144C.1
tgtttctcatctcctgatcctcgttcctctccgccccgcttgcgccgcgcctccgcccccgtctcctgtgagatcagctccggcggctcgcggatttgactactttaaggcgtcttgctgtctggaagagtgcatagttccagtagaacatcacaaagaggggttctgtgcctgagaccgcggggggggagagcaatgactaccctgttggtcctatggttcttggattcttgatttttgtggtcattggatcatccttgttcctgatgatctggacagtgacaagcggtggtctggcctgtatttactgtgcttataccagaaatttatctgttcttgagctgggaggttgtatctgtgttgtgttgcagactgggtgatgggtatgtttgtgtgaatgttacttctgttttgtttgctgttttgaaagagtgtaatctggttttgttaccatgctaagggttgtttttttttatatttgggataaaccttattt

SEQ ID NO: 45443 - DNA, 434 bp, Zea mays
  Clone ID: MRT4577_141450C.1
ggtgggttgttttttttttttttttttttttttttttttttttttttttttttttttttttttttttttttgaaataaaccaacccaaaaattccatttctgaaaacagtcccaaaaaaatccgtttatatacgaccaaacaacacaaacggggggggggggaagatcaaacaaacaaaacacagcctaacaatcaccctgggcgggggggcccttcttccaattaggggaccgggccccaagaaggagggcacataagcacggataaagaggggtgaggaaaagcaggcgaggcaccggcaaatgggcaaagcgaggcaccgcagaagggagcagagcccccgctcaaaacactggggaagaagctacaggggggtccctaggccaaagggaacccaagcggccccggacccctgggcggacgcggggacgga

SEQ ID NO: 45444 - DNA, 266 bp, Zea mays
  Clone ID: MRT4577_141451C.1
agctgcttctacatagctgctgtggtcaaaaaggtggcccagagaaacaattttcttgacggtcgcggttctgtttcctataaccgatctgcaacattttgggaaaagacagctccaccttaaggtttttccgggatatgtagggatctttattattcgaaacgtggcgtttattcgagcactcaggaggcaggtgtggctctgagcctaatctactgagatttcaggccaaataggcctacattggaaaactgggctggagagat

SEQ ID NO: 45445 - DNA, 270 bp, Zea mays
  Clone ID: MRT4577_141452C.1
ctacaagatggcgtgcacaaacaatgcgatgagagccttggtcctcctggtcctcttgtgcatcgtgcatggtgagacggaagagtcacagggcatagatgcgaaagcgttcgggcctgctgggtccttcgacatcaccaagctgggcgccttcggcaatggcaagacagactgcacgaaagctgtgcatgatgcattggcatcggcatgcggcggcactgggaagcagacaatcgtcatacccaagggagacttccttgtcggacaact

SEQ ID NO: 45446 - DNA, 358 bp, Zea mays
  unsure (1)..(358): unsure at all n locations
  Clone ID: MRT4577_141453C.1
cccccttttnctcctttccccagacacaggagcaccaggggggttttttaagatttttgggggtcatcgcacggacagtatcacttgaataggtagtcaaccaagtatgcgagtgtcaaacaaccaaggcactgttaagaccagttgaaccaatagtaagatttgtccgtaagaacgatatgtcagagtgaacgaatgccggtaaacgaattggtcgttttgccagacctggaatcagaccaagatttggctaatgggcgtgttatattcgatgttgccgtacataaagcgtgtgctccattaaggccaatatttctgacattggagccttttccttggccatgcttggctggaactt

SEQ ID NO: 45447 - DNA, 212 bp, Zea mays
  Clone ID: MRT4577_141454C.1
attcggctcgaggccggacgcaattttaattttacacacatggtcgatccttaatgggtggggtttatgaaaataggggtgggaccataatggcttgaacaatcgatggcgggactaaaaacgaacaatcgggtcatctatacagagtgaccagggaaatatggggggaagaacaggtagccaaacaaacacccactgggttaccaggagtc

SEQ ID NO: 45448 - DNA, 264 bp, Zea mays
  unsure (1)..(264): unsure at all n locations
  Clone ID: MRT4577_141455C.1
gacccacgcggngcgcccacgcgtccgagcgancncaaggccggggagcacaagagccccgagcagcncgccagaaaccccngcggccaaaccccngcccgccaggaggggggagccgcgncgcgnncgaggcacgcgcacaggcaaagaacgcgccccgcacgcgcaagaagaacgaagcggacccgcngagggaaggcaaccgggaggaagcggcaacgggggacgcacggacggagggggacgcgcacaccnacaacccgg

SEQ ID NO: 45449 - DNA, 197 bp, Zea mays
  unsure (1)..(197): unsure at all n locations
  Clone ID: MRT4577_141456C.1
ttcctggtcgagggttcgggggcgtcagggacgcaggacgacggggacgaacgggctctcctgcggcggcgctcctcttttagttcctgcctggcgccaccaccaaagcggancgcggggggccggncctggccctcctgaaaatgcgggagaccccccagtcggccgccggggngcccgcccgggagctcacatta

SEQ ID NO: 45450 - DNA, 252 bp, Zea mays
  Clone ID: MRT4577_141457C.1
cggctcgagggagaacattgccacccgtattattttctgattatccaacaattgtattgtaatacagcatataaccaacaatctgcgataattttctgagatgcagtggtcaaaagctgttactggagggattagacccccacctttgtgcaagcacacatgcactcttgttggaagtactttatatgtcattggaggatcttataccgccttcgatgaagcccaagaggctgaggttgaagtgtttaacaa

SEQ ID NO: 45451 - DNA, 921 bp, Zea mays
  Clone ID: MRT4577_141458C.1
caaggctaccgtaacaagtgtggatatgaattggtgttgtcttcctagtagaagagccaagaaagaagagaatccttactccaacagcataggcggtatttattctgagaagaacataaggctcttctcctatgctgagttaagatctgccacagacaacttcaaccgcacgaacaaagtaggccgaggtggcttcgggacagtttataagggaaccattcgaaatgggcgggaggtcgcggtaaaagttctttctgctgaatccaggcagggcatcagagaattcttgacagaaattgatgtcattactaacgtgaagcatcccaaccttgttgaattaattggctgttgcgttgaaggaaataacaggattttggtatatgaatatcttaaaaacagcagtcttgaccgtgcacttttgggttctaacagtgagcctgctgacttcacctggagcataagatctgctatatgccttggagttgctcgaggccttgcttacctgcacgaagagatcgcatcaccgattgtacacagagacatcaaggctagcaatatactacttgacagaaattacgtccccaagatcggggattttggtctggccaagctatttcctgataatgtcacccacatcagcacccgagtggctggaacaacaggctaccttgcacctgaatatgcatggcatggtcagctaaccaagaaagcagatatatacagctttggtatccttgtcctggagatagtgagcggcacaagtagttccaggagcatattgatggatgacaaggttctcctggagaagacatgggagctatatgaagcaaagagccttaaggaactggtggatccaacccttgtagattaccctgaggaagaagtcatcaggtacatcaaggtggccctcttctgcttaca

SEQ ID NO: 45452 - DNA, 593 bp, Zea mays
  Clone ID: MRT4577_141459C.1
caaaggaaaatatgttgtgttcttcttttaccctcttgacttcacctttgtgtgccccacggagatcattgctttcagtgatagggcagaagaatttaagaaactcaactgccaagtgattggtgcttctgtggattctcacttctgtcatctagcatgggtcaatacacctaagaaacaaggaggactgggacccatgaacattcctttggtatcagacccgaagcgcaccattgctcaggattatggggtcttaaaggctgatgaaggcatctcgttcaggggcctttttatcattgatgataagggtattcttcggcagatcactgtaaatgacctccctgttggccgctctgtggatgagacttcgcgactagttcaggccttccagttcactgacaaacatggggaagtgtgcccagctggcttgatacctggcagtgataccatcaagcctgatgtccacaagagcaaagaatatttctccaagcagaagtgagcgctgggctgttttagtgccaggctgcggtgggcagcatgagaacaagacctctactgtattctcaggtttccattagtataacgcaagactt

SEQ ID NO: 45453 - DNA, 407 bp, Zea mays
  unsure (1)..(407): unsure at all n locations
  Clone ID: MRT4577_14145C.1
cnatcccacgaatataaacctttanacacccccacccacagggggaacttttaagtgtttttgccgttttttcccaacccaaaccggggcccccccaaacatttaaccaattttgggaaaaatctttccaaaaccacctgggacaaacaacttttcccccattgcccacaagaaaaaccgggaaaggggttcttaccaaaattttgccagttgggatatgaaccacaaaaaaagtggggggctcccaaattagggcccaaaaataaaaaacccccctttttacctttttgccttttttgggggaactcccaaccgggcaacaactgaatccggggcctccccaaggacccttgggcccttagacaaaataccccccccccttggaaaatttttttcaccggaaggcc

SEQ ID NO: 45454 - DNA, 218 bp, Zea mays
  Clone ID: MRT4577_141460C.1
tagcctctagcaggggtggcggcctctagtagcccgtctgtgagcgcctaggagcgacaccgaccgaggatgacgtctaccccgtccgtaaggtccccatcgactacatggcgtgcgtcgggctcagggaaccttcgtgcaaagctatggggaaagcagtctctctctgcagccggtacgtgaacaaccgcgctgatctgaaagagccgcttgagggg

SEQ ID NO: 45455 - DNA, 289 bp, Zea mays
  unsure (1)..(289): unsure at all n locations
  Clone ID: MRT4577_141461C.1
atatcccgaaaaggtaaaaactcatctgtttttgtccccttnaatcattacatacacaataaatacaaaagccaaacaaaaatcaccctccaaaaatttcttcttcaaacactaactaaataaatgaaagtaagcaaagggtatatacattctcactaccaacttctacaaaaataacaagtgaaacaaaaaccagaccaacttctacaaagataaaatgaaacaaaaaagattctataccaaaaatatacaaattcccccgtaattcaacaacttaacaaacccccct

SEQ ID NO: 45456 - DNA, 320 bp, Zea mays
  Clone ID: MRT4577_141462C.1
gacaagcccaatggatggctccccagtggaggatcccacttcccgccggctcatgtattgttcctttggctttaccatcacatcagggaggggggaactcgctgtggatatgtcctccgcacggactatgagaacggacaaggtgggcgtcaaggtgggacgcccccctgccgacttccgggtatccaagctccacgttcgtcaatgtgcctattggggctgcaagaagagcaactgtccaggtacctactgcggcattgagacgtgcatcctgcctctagcgacagggtctgtgggcccctacggccacggtgacgaga

SEQ ID NO: 45457 - DNA, 348 bp, Zea mays
  Clone ID: MRT4577_141463C.1
taccccaccaccaaagcacttttgtgtctaaatcatcttctttacaaattggaagaaccctttttcacctataatcctgcttcctttcgcattaattccccatcttttttacggtctccctgtacccttctaaacactaaccccatcaacttactctccatcctacaaaaatttactgacattcccactcccctattcaaatcaattcagggtcgtctatctagaccatccaatcatatttacccgcgactactacttcatagctcctttattgtttctcttacattaacttttctttcttttaccatcaaatctaccgaatccaaaaacactctttttccccaactt

SEQ ID NO: 45458 - DNA, 645 bp, Zea mays
  Clone ID: MRT4577_141464C.1
aattcggcacgaggctgatcatcatccgattagtcgcggtcctcgccttcttcgcgtggcgcatcaggcacaacaaatccgacatcatgtggttctggacaatgtccatcgtcggcgacgtctggttcggcttctcgtggctcctcaaccagctcccaaagttcaaccctgtgaagaccatcccagatctcgccgccctccagcggcactttggctaccctgacggcggcgcctctaggctccccggtatcgatgttttcgtcaccactgccgaccccattgatgagcccatactctacaccatgaactgtgtcctctccatcctgtctgtcgattacccagtcgatcggctagcctgctatctctcagatgacagtggggcgctggttctctatgaggcactggtcgaggtcggaaagtttgcgcctctatgggttccgttctgccgcaagtactccattgagccaagggcaccagaaagctattttgagcatgtggcaccgccgcaggctggaagggtgacgcaggagttcttgaatgattataggcgggtgcagatggagtacgatgagttcaaggcgcgcttggaccacctccctgataccatccgcaagagatctgatgtttacaatagcctgagagatg

SEQ ID NO: 45459 - DNA, 524 bp, Zea mays
  Clone ID: MRT4577_141466C.1
ttgttcacacactacccgcaaaggaggagcatctgtgttgtgcgaattcaacgccgtgtgtggacacggaagttctgttcgcgttgcggtcgttcgttttattagagacccatcgtagttcgttttgtttttgatcctagtgcacgacaaccagccgaagatggcccgtggtcaacagaagattcagtctcagcagaagaaccaaaagaagatggacgcagcgcggagggcaggtatcgatcagaaagcagctgcaatgaaggctttgatccatacctgcgccgtctgtaaatcacagatgcccgatccgaaaacctacaagcaacattttgaatccaagcatcccaaggcacccatgccaccggagctcattgacgtccaagcctagattctattctagaacaataattctctctgcatcggcaggaggaaatcggcaaggcaaaaaaggtttatcatcaacgaaggggaacatacttacagtcagaaagatcaatgatagtcaggatcttaattgatggata

SEQ ID NO: 45460 - DNA, 314 bp, Zea mays
  unsure (1)..(314): unsure at all n locations
  Clone ID: MRT4577_141467C.1
gggccgcaacaagggctaaggttatttgaacattgnnnnattctntttactgaacattttcgagattattcgatctttttaaattcaactagtcccgttcctttttcatagtgttaaaacgaaaaaacaaaaagtcttgtaaaaatgaattttttaatattttataactcaaagggctatttctgaatctctaggctcaaggcttcccatgcgttcctgcttcaccgctacagcaccagactgtgaacccaacccaacaaaaccattcacttttaattgtcccaattgagatcggtgcttgaataattttggtt

SEQ ID NO: 45461 - DNA, 319 bp, Zea mays
  unsure (1)..(319): unsure at all n locations
  Clone ID: MRT4577_141468C.1
ccggnncgagaaaaccgggccgaccagctcattagtttgcaacacgcatataggttccaactttatttccccgtgcatgctagataataactggtgggtagtgtcacacaatgtaaaggcactgcccaacattttacaacactgctactgggaaaacacaggggttaccaaacttattcgagttactgaaataaatgtttcacagcaggccaatatctaatatgaccccacctgagcgcccttgccaaaagtaaaccatcctgaatggctaataaaacaccccctcttgctctaacttaagcgcatctaatgtggtgtt

SEQ ID NO: 45462 - DNA, 188 bp, Zea mays
  Clone ID: MRT4577_141469C.1
tttaatttcaaagaagaatccgatccccttcgggacgccttactcagtaagggcgccgcctattttccaatggccttaacctacttcttctaggactaaccgccgacgtcagcggcggcagcgatcaccggtgcagctttctcgccccaggatcgccgcgcacgtggaggcctgggcggccctccccc

SEQ ID NO: 45463 - DNA, 318 bp, Zea mays
  unsure (1)..(318): unsure at all n locations
  Clone ID: MRT4577_14146C.1
ggtaccctccngggccggccgggatctccctcctgtcgcactcgcgtctctttcctattcgcgccgccgccgctgccgctgctgcaagcgccagctcgccgtcgtccgaatagtacactctaacgccgccatggggcgtatgcacagccgcgggaagggtatctcgtcgccggcgctgccgtacaagaggacgcctcctactctggctcaagaccgccgcctccgacgtggaggagatgatcacagaggcagcgaacaatggacagaggccgctgcacatccgcgaacggctccgtgaccagggcgggatcccccgtg

SEQ ID NO: 45464 - DNA, 235 bp, Zea mays
  Clone ID: MRT4577_141470C.1
ttgtttttttttaagttttttatctcgttttccgcagtcttgacattacattcaaaaccgcgctggcaaaacatgcatttggagaaaagggacggcatgactacacataccaaccacccactcattactataaaataggagtgacagcacatatattaaacactccaaaacaaaggtcacattaaacggcagatacaccagaaaaccaagaacaacaatacacaaacacaagggt

SEQ ID NO: 45465 - DNA, 555 bp, Zea mays
  Clone ID: MRT4577_141471C.1
tgggtacctcgaggccggccgggcctgtctcctctcgctcgctctccccgtctcccgcacgcccacccgccgccgccgttcgccatgggcctcctcgactcgctgtaccgcgtggtgatgcgccgcaacgccgtctacgttaccttcgtcgtcgccggtgcctttgcgggcgagcgggttgtagactacggagttcacaagatctgggagatgaacaacctcgggaaaaggtacgaagacataccagttttggggcagaggccagccgaagaatgatatactttggtcgccatttagctccggtttaaccgtttcattttcgcacaataataagctgtgtaaacttcttactctgctgctgagagctgcttcccattcattttactctgaacatgctgtgagggaatttcgtggtgcatggctgaaatctgttatatagagcatatgcaaatacgtctagaggattcctctctaaaaaaaaaaaaaaaaaaaaaaaaaaaaaaaaaaaaaaaaaaaaaaaaaaaaaaaaaaaaaaaaaaaaaaaaaagaccggcc

SEQ ID NO: 45466 - DNA, 175 bp, Zea mays
  Clone ID: MRT4577_141472C.1
aatgaagcaacctccatatattgtagacagtatatcaaacagacaaaaacactgaaacacacaaggaattctgaacttcctcttgggtcggttcatttgtcgaacgttttggtttttaaccctcgctctaggttggtgaacgttttggtgacttagcacggagtacttgagagac

SEQ ID NO: 45467 - DNA, 685 bp, Zea mays
  unsure (1)..(685): unsure at all n locations
  Clone ID: MRT4577_141473C.1
agttcctcttgctcagcagtacattgggatcagcgnaagggattacacaaagagaagtgaattattcaatactttgtgttatgagaaggttgttgagtccattaagcaaggtcaccaagcattggtttttgtccatacccgtaaggatactgggaaaaccgctagaaccctgattgacctagcagcaaaagcaggggaattggaattattttcaagtgcagatcatcctcaatttccattaatcaagaaagatgttagtaaagcaaaaagtcgtgaagttgttgaattttttgaatctggatttggtatacacaatgctggaatgatgcgatctgacagaagtttgatggagcgcttgtttggtgacgggcttttgaaagtccttgtttgtacagcaactttggcttggggagtaaacttaccagctcatacagttgttataaagggcacacagctatatgatcctaaagctggtgggtggcgagacttggggatgcttgatgtgatgcagatctttggacgtgctggaaggccacagtttgataaaagtggcgaaggaattattatcacaacacatgacaaattggcttattacttgaggttattgacaagtcagcttccaatagagagccagttccttggatctctgaaagaaatttaaatgctgaagntgctttgggcactg

SEQ ID NO: 45468 - DNA, 1073 bp, Zea mays
  unsure (1)..(1073): unsure at all n locations
  Clone ID: MRT4577_141474C.1
atccgcctttgatataaagaagacgctcccgaatccgtctccgcctcctgtcgctcgctctccctgtctcccgcacgccgacccgcagccgccgccgttcgccatgggtttcctcgacgcgctctaccgtgtggtgatgcgccgcaacgccgtctacgttaccttcgtcgtcgccggcgctttcgcgggcgagcgggcggtggactactcgattcacaagatctgcgagtcccgcacgcccacccgccgccgccgttcgccatgggcctcctcgactcgctgtaccgcgtggtgatgcgccgcaacgccgtctacgttaccttcgtcgtcgccggtgcctttgcgggcgagcgggttgtagactacggagttcacaagatctgggagatgaacaacctcgggaaaaggtacgaagacataccagttttggggcagaggccagccgaagaatgatatactttggtcgccatttagctccggtttaaccgtttcattttcgcacaataataagctgtgtaaacttcttactctgctgctgagagctgcttcccattcattttactctgaacatgctgtgagggaatttcgtggtgcatggctgaaatctgttatatagagcatatgcaaatacgtctagaggattcctctctctgcccagttcgacattatccgtgcacgtatcctgccctttcaaaatgacaaaggtttctacggactaatttttagcctttctgttttagtccttaaattattaaatacagtgactaaaagagagattatctctattttagtccttatgtttggcaatttaaaaaataaagagtcgtttgattcacatatttgtaatgtgatggataaccgataacgttatattattacccctagttatatgtccgtgccaagctacgggttctatatgtcctacgggttaaccttgtttaaacgataaactttttttacccgagatagttttttcccccggggtggaaaaacaaaaaagaaaaaaaaaaaaccacccaaaaaaaaaaaaaaaaagggcggccaaagactagtgagctgntnnnccgggaatt

SEQ ID NO: 45469 - DNA, 380 bp, Zea mays
  unsure (1)..(380): unsure at all n locations
  Clone ID: MRT4577_141475C.1
tttttttttattttttttttgttttttggttttttttttttttttttttttttttttttttttttttttttaaaaaaaaaacacaaaaatccaaaaacccttccttgaaattatataaaataacacccattttcccgcccccttagcccggccttcaaaaccatttcccacaggttttaactaatcactttacctttccttaatttccaaaaaaaacccggacccccttctcccccaccttttcctttttttccctcaacccanccttgactgcctgcgttttactgggggcatccttgggccctttaacttgaaaaacaaaaagcctttgccattacaatttgnnnnccccctgaaacttttggccaaaaattgggttt

SEQ ID NO: 45470 - DNA, 348 bp, Zea mays
  unsure (1)..(348): unsure at all n locations
  Clone ID: MRT4577_141476C.1
ctgcaaggcgtnngctcccgtccccaggcanngttcggataccattcgtcctcaccaacttttcggcnggcnttcatttggannccacgaggagggcccgcccggnaagaagcgtnngaaggcaaggggtctaggggtttcttctattttgaagaaggctgagaaaatctttgttagtggcccctgcctgcctgtgcttacctctctcagactagtatgtacctgttatntttacctttaaatatgtgctctcttcagacttagagccggccttcttttacctttgaatacttggtgacctgcnnttggtgctttcactgnttaaaatcnggggaactgaattagatc

SEQ ID NO: 45471 - DNA, 357 bp, Zea mays
  Clone ID: MRT4577_141477C.1
atggcggcggtcaacctcctcgctgagtctgccgcggtgcgcttgagggcgccggcgccgccgagcgcgggggaggagcttgcggccaggctcacggagtgcgggttccccgccacggcgcgccgagggggagcggtcgcgggggttggggagagcgcgcgcaagtggagggagatggcggccaggaaggaggaactcctgctgcggagccggggccgagtcgcgtggacgatcgtcgcgctttgctgcggctcgcatgcgtcccacatcctgcactcgctcggtatccatgttggccacgggattaacagtcttgtcctgaagggcatcgagcaaactggctcatcagttatgtaa

SEQ ID NO: 45472 - DNA, 343 bp, Zea mays
  Clone ID: MRT4577_141478C.1
cactgagagagattatctccggaaaatcatagtgcagggaaggtcttccaagtcaactaaggttggcgacatcatgactgaagagaacaaactgatcacagtgaatcccgacaccaaggtcctgcaggcaatgcagctcatgacagaaaaccgcgtcagacacatcccggtgatcgacggcacggggatgctggggatggtctccatcggcgacgtcgtgcgcgcggtggtggccgagcacagggaggagctgaaccggctcaatgactacatccaataactcggaacaatgatgatgacgaaataggccgtgttttcttggacaatgatgttaagttcggca

SEQ ID NO: 45473 - DNA, 277 bp, Zea mays
  Clone ID: MRT4577_141479C.1
gacgcttcaccatcggaaaggccacagcgggggggcgatacttggagccccactccatctccaccgaagaccgtcacgtcgctccgacaccgaagcagctcaaatatctctataagaggagctggagatttcctttattcggcaggtctaaggagcaacaagcagaaccaagctcccaggacatccctacgcaatctaggtaccctccctcgagggtaggctcctctgcacgaacatacacccctacctcttctagtgctaggctacaccaaagagc

SEQ ID NO: 45474 - DNA, 607 bp, Zea mays
  Clone ID: MRT4577_14147C.1
tttttttttttttttttccttctctttttttttttatgttgattttaaataaaaaaaaataaaaaaaagcaacttataattctgcaacataattgcctggaaagacacctgtcattccattcaatcgacctgtccaccaatcgttggcatcggctgttcttgtcacaagctcaattcgatcactcttttctaaaactgtatatcgccttctgcctgagcatgataatcatacaaggcgaccacaaactttttcttttctgctgtgggcacgtgcgtatgactcgtataggcaggaggaggtgaagcgatctgctgtggcgaatacatgggttgtgagtaaggcgatggagattgtggctgtggtgaataagacgagtacgaaggttgttcacctgccatttcctgttttcgaagcgcagcacgttcctgaagggacagcttcgaattgttcgcgcctcccgaagctgccaaccaagcttttcctcccgactttaataagtccaagttctccatctctgcacgagcatcccttgcgagagctctttgctgaacaccttgttcgatgcccaaggtatgtgtcgaaaaggcttcgaggttgtggttgagt

SEQ ID NO: 45475 - DNA, 746 bp, Zea mays
  unsure (1)..(746): unsure at all n locations
  Clone ID: MRT4577_141480C.1
ccggccggggtncaagtgtccttcctccgtcttcctcctctgccgactgccctcatccactccactcccaagtccccaccacctccaaccccgtctctccactgcggcgcaggcttcgcttcggctccgctcggctcgagcagcagatgtcttgaagtctaaagggaagagtgctgatggatcttggctctggtgcaccacagaggatagcgtctatgacgctgtcaaatctatgactcagcacaacgtgggagctttggtggttgtcaaacctggacagaataaatcaatcgctggcattgtcactgagagagattatctccggaaaatcatagtgcagggaaggtcttccaagtcaactaaggttggcgacatcatgactgaagagaacaaactgatcacagtgaatcccgacaccaaggtcctgcaggcaatgcagctcatgacagaaaaccgcgtcagacacatcccggtgatcgacggcacggggatgctggggatggtctccatcggcgacgtcgtgcgcgcggtggtggccgagcacagggaggagctgaaccggctcaatgactacatccagggaggctactanggacggcgtgtgcagcgacgaccccctccgatcnccgcagtcagtgaagtccgcctttgaaatccnataactcggaacaatgatgatatgacgaaatagggccgggtttcttggacatgatgttagttcggcagggtttccctttctttttttt

SEQ ID NO: 45476 - DNA, 750 bp, Zea mays
  unsure (1)..(750): unsure at all n locations
  Clone ID: MRT4577_141481C.1
ccggccggggtaacatcacttcgtacctgcatcttcctcctccactcctctcccaagtccccaccacccccaaccccgtctctccactgcggcgcaggcttcgcttcggctccgctcggctcgagcagaagaaaatgcaacgggcagtgcaggccgtcaggtcacacggcaatgttcttaaatatgctgttctacaacacatcagcgctcccaagccagcaatgcttcctgctgccttttctcgtttcatgtcagtttcatctgctcgcctagaggatcgtggatttgaaactgccactgtagcagatgtcttgaagtctaaagggaagagtgctgatggatcttggctctggtgcaccacagaggatagcgtctatgacgctgtcaaatctatgactcagcacaacgtgggagctttggtggttgtcaaacctggacagaataaatcaatcgctggcattgtcactgagagagattatctccggaaaatcatagtgcagggaaggtcttccaagtcaactaaggttggcgacatcatgactgaagaggtcctgcaggcaatgcagctcatgacagaaaaccgcgtcagacacatcccggtgatcgacggcacggngatgctgnggatggtctccatcggcgacgtcctgcgcgcggtggtggccgaacacagggaggagctgaaccggcttcatgactacatccagggaagctactaggacggcgtgtgcagcgacgaacccctccgat

SEQ ID NO: 45477 - DNA, 1209 bp, Zea mays
  Clone ID: MRT4577_141482C.1
ccggccgggcccagaggcagaggctcgtcgcttttattaaatcagcgctcgtcgccacgcaccctcgcgttccccagcgtaacaagtgtccttcctccgtcttcctcctctgccgactgccctcatccactccactcccaagtccccaccacccccaaccccgtctctccactgcggcgcaggcttcgcttcggctccgctcggctcgagcagaagaaaatgcaacgggcagtgcagaccgtcaggtcacacggcaatgttcttaaatatgctgttctacaacacatcagcgctcccaagccagcaatgcttcctgctgccttttctcgtttcatgtcagtttcatctgctcgcctagaggatcgtggatttgaaactgccactgtagcagatgtcttgaagtctaaagggaagagtgctgatggatcttggctctggtgcaccacagaggatagcgtctatgacgctgtcaaatctatgactcagcacaacgtgggagctttggtggttgtcaaacctggacagaataaatcaatcgctggcattgtcactgagagagattatctccggaaaatcatagtgcagggaaggtcttccaagtcaactaaggttggcgacatcatgactgaagagaacaaactgatcacagtgaatcccgacaccaaggtcctgcaggcaatgcagctcatgacagaaaaccgcgtcagacacatcccggtgatcgacggcacggggatgctggggatggtctccatcggcgacgtcgtgcgcgcggtggtggccgagcacagggaggagctgaaccggctcaatgactacatccagggaggctactaggacggcgtgtgcagcgacgaccccctccgatcccgccagtcagtgaagtccgcctttgaaatccaataactcggaacaatgatgatatgacgaaataggccgtgttttcttggacaatgatgttaagttcggcaaggttttcctttcttttttttttttctactgcgtggtctatgtgtatattgccaaaggcatgcgtgagccatgcgcccggtgctgtgctagggcgcagagaccatctgatggtggaaacaccggaaataagagcgtgccgctgtgtgtttcctttgaaggaatgaaaatggtgtttgtgttgtgcaaaaaaaaaaaaaaaaaaaaaaaaaaaaaaaaaaaaaaaaaaaaaaactcgag

SEQ ID NO: 45478 - DNA, 250 bp, Zea mays
  Clone ID: MRT4577_141483C.1
gtacgtaagctcggaattcggctcgagggcgccccgacgggctttatcttcgaaccaagacaacactgaagcgaatggcacctgaccgacaattggccatccatgctaggggcggatagccacggtgtaacaaccatgcactgtgcccaatatatttgcctggcaacagaatctcttgcaatggcacacacaaactcggtgcctacgaaaactcactcacatgcacgagaagaacatactgcatgctaca

SEQ ID NO: 45479 - DNA, 1070 bp, Zea mays
  Clone ID: MRT4577_141484C.1
gggaaaaaaaaaaaacagtgtccttcctccgtctcccacctctgccctcctccactccactcccaagtccccaccacccccaaccccgtcggcgcaggcttcgcttcggctccgctcggctcgagcagaagaaaatgcaacgggcagtgcaggccgtcaggtcacacggcaatgttcttaaatatgctgttctacaacacatcagcgctcccaagccagcaatgcttcctgctgccttttctcgtttcatgtcagtttcatctgctcgcctagaggatcgtggatttgaaactgccactgtagcagatgtcttgaagtctaaagggaagagtgctgatggatcttggctctggtgcaccacagaggatagcgtctatgacgctgtcaaatctatgactcagcacaacgtgggagctttggtggttgtcaaacctggacagaataaatcaatcgctggcattgtcactgagagagattatctccggaaaatcatagtgcagggaagatcttccaagtcaactaaggttggcgacatcatgactgaagagaacaaactgatcacagtgaatcccgacaccaaggtcctgcaggcaatgcagctcatgacagaaaaccgcgtcagacacatcccggtgatcgacggcacggggatgctggggatggtctccatcggtgacgtcgtgcgcgcggtggtggccgagcacagggaggagctgaaccggctcaatgactacatccaaggaggctactaggacggcgtgtgcagcgacgacccctcccgccagtcagtgcagtccagtccgcctttgaaatccaataactcggaacaatgatgatgacgaaataggcctgttttcttggacaatgatgttaagttcggcaaggttttcctttctctttttttttctactgcgtggtctatgtgtatattgccaaaggcatgcgtgagccatgcgcccggtgctgtgctggggcgcagagaccatctgatggtggaaacaccggaaataagagcgtgccgctgtgtgtttcctttgaaggaacgtaaaaaaaaaaaaaaaaaagcggcc

SEQ ID NO: 45480 - DNA, 1158 bp, Zea mays
  Clone ID: MRT4577_141485C.1
atgcaacgggcagtgcaggccgtcaggtcacacggcaatgttcttaaatatgctgttctacaacacatcagcgctcccaagccagcaatgcttcctgctgccttttctcgtttcatgtcagtttcatctgctcgcctagaggatcgtggatttgaaactgccactgtagcagatgtcttgaagtctaaagggaagagtgctgatggatcttggctctggtgcaccacagaggatagcgtctatgacgctgtcaaatctgtatgtcctcacttcccgatgatcgtattaactccttcagagtcaatggttatgcatcaaatgataaggctacctttcggtaccttaaactttttgcagatgactcagcacaacgtgggagctttggtggttgtcaaacctggacagaataaatcaatcgctggcattgtcactgagagaggtgatgaacaaatttctgtactcttggcatctaacttttggcctgtggctgtgcatcatagtacttttggcatcaaagagtctcaactctttagagcactttatagtagatacaacagaaattgcatcaagttaaagtatacgtattatctccggaaaatcatagtgcagggaaggtcttccaagtcaactaaggttggcgacatcatgactgaagagaacaaactgatcacagtgaatcccgacaccaaggtcctgcaggcaatgcagctcatgacagaaaaccgcgtcagacacatcccggtgatcgacggcacggggatgctggggatggtctccatcggcgacgtcgtgcgcgcggtggtggccgagcacagggaggagctgaaccggctcaatgactacatccagggaggctactaggacggcgtgtgcaacgacgaccccctcccgccagtcagtgcagtccagtccgcctttgaaatccaataactcggaacaatgatgatgacgaaataggccgtgttttcttggacaatgatgttaagttcggcaaggttttcccttctctttttttcctactgcgtggtctatgtgtatattgccaaaggcatgcgtgagccatgcgccggccggtgctgtgctggggcgcaaagaccatctgatggtggaaaccccggaaataagagcgtgcccctgtgtgtttcctttgaaggaatg

SEQ ID NO: 45481 - DNA, 1173 bp, Zea mays
  Clone ID: MRT4577_141486C.1
ccggccgggagcgtaacaagtgtccttcctccatcttcctcctccactccactcccaagtccccaccacccccaaccccgtctctccactgcggcgcaggcttcgcttcggctccgctcggctcgagcagaaaatgcaacgggcagtgcaggccgtcaggtcacacggcaatgttcttaaatatgctgttctacaacacatcagcgctcccaagccagcaatgcttcctgctgccttttctcgtttcatgtcagtttcatctgctcgcctagaggatcgtggatttgaaactgccactgtagcagatgtcttgaagtctaaagggaagagtgctgatggatcttggctctggtgcaccacagaggatagcgtctatgacgctgtcaaatctatgactcagcacaacgtgggagctttggtggctgtcaaacctggacagaataaatcaatcgctggcattgtcactgagagagattatcctccggaaaatcatagtgcagggaaggtcttccaagtcaactaaggttggcgacatcatgactgaagagaacaaactgatcacagtgaatcccgacaccaaggtcctgcaggcaatgcagctcatgacagaaaaccgcgtcagacacatcccggtgatcgacggcacggggatgctggggatggtctccatcggcgacgtcgtgcgcgcggtggtggccgagcacagggaggagctgaaccggctcaatgactacatccagggaggctactaggacggcgtgtgcagcgacgacgacccctccgatcccgccagtcagtgaagtccgcctttgaaatccaataactcggaacgatgatgatgacgaaataggccgtgttttcttggacaatgatgttaagttcggcaaggtttgcctttctcttttttttttttctactgcgtggtctatgtgtatattgccaaaggcatgcgtgagccatgcgcccggtgctgtgctggggcgcagataccatctgatggtggaaacaccggaaataagagcgtgccgctgtgtgtttcctttgaaggaatgaaaatggtgtttgtgttgcgcattgattattgttgatgttcgcttcggattaggctttgtttgggaacaatccggattcagacgtgcaaaactgggaatgcttcacttccccccccccccc

SEQ ID NO: 45482 - DNA, 275 bp, Zea mays
  Clone ID: MRT4577_141487C.1
tcgcgccagccgcacgggctggctttctttggcgccaaccaggtgctccccgggggggttggctacaaaacggtgggggaccgctcgccctacccgggcagtttcatgctcgaccagctcaccggcttctacgccttcgttgtttttaacaagcatcaacaacaacctgctagtcgcatttgaccccaatggccgggtgccattcttccgggggatcacccgcgacagctgcatcgccttcttcgacgacattgacatgctcaaaggctcatgcg

SEQ ID NO: 45483 - DNA, 1176 bp, Zea mays
  Clone ID: MRT4577_141488C.1
acggctccccagaggcagaggctcgtcgcttttattaaatcagcgctcgtcgccacgcaccctcgcctccccagcgtaacaagtgtccttcctccatcttcctcctcctcttccgactgccctcatccactccactcccaagtccccaccacccccaaccccggctctccactgcagcgcaggcttcgcttcggctacgctcggctcgagcagaagaaaatgcaacgggcagtgcaggccgtcaggtcacacggcaatgttcttaaatatgctgttctacaacacatcagcgctcccaagccagcaatgcttcctgctgccttttctcgtttcatgtcagtttcatctgctcgcctagaggatcgtggatttgaaactgccactgtagcagatgtcttgaagtctaaagggaagagtgctgatggatcttggctctggtgcaccacagaggatagcgtctatgacgctgtcaaatctatgactcagcacaacgtgggagctttggtggttgtcaaacctggacagaataaatcaatcgctggcattgtcactgagagagattatctccggaaaatcatagtgcagggaagatcttccaagtcaactaaggttggcgacatcatgactgaagagaacaaactgatcacagtgaatcccgacaccaaggtcctgcaggcaatgcagctcatgacagaaaaccgcgtcagacacatcccggtgatcgacggcacggggatgctggggatggtctccatcggtgacgtcgtgcgcgcggtggtggccgagcacagggaggagctgaaccggctcaatgactacatccagggaggctactaggacggcgtgtgcagcgacgacgaccccctccgatcccgccagtcagtgaagtccgcctttgaaatccaataactcggaacaatgatgatgacgaaataggccgtgttttcttggacaatgatgttaagttcggcaaggttttcctttctctttttttattctactgcgtggtctatgtgtatattgccaaaggcatgcgtgagccatgcgcccggtgctggggcgcagagaccatctgatggtggaaacaccggaaataagagcgtgccgctgtgtgtttcctttgaaggaatgaaaatggtgtttgtgttgtgcaaaaaaaaaaaaaaaaaaaaacaa

SEQ ID NO: 45484 - DNA, 1722 bp, Zea mays
  unsure (1)..(1722): unsure at all n locations
  Clone ID: MRT4577_141489C.1
gggtacccctcgggccggccgggacacgactctcggcaacggatatctcggctctcgcatcgatgaagaacgtagcaaaatgcgatacctggtgtgaattgcagaatcccgcgaaccatcgagtttttgaacgcaagttgcgcccgaagccttctggcggagggcacgtctgcctgggcgtcacgcgcagaggctcgtcgcttttattaaatcagcgctcgtcgccacgcaccctcgcctccccagcgtaacaagtgtccttcctccatcttcctcctccactccactcccaagtccccaccacccccaaccccgtctctccactgcggcgcaggcttcgcttcggctccgctcggctcgagcagaagaaaatgcaacgggcagtgcaggccgtcaggtcacacggcaatgttcttaaatatgctgttctacaacacatcagcgctcccaagccagcaatgcttcctgctgccttttctcgtttcatgtcagtttcatctgctcgcctagaggatcgtggatttgaaactgccactgtagcagatgtcttgaagtctaaagggaagagtgctgatggatcttggctctggtgcaccacagaggatagcgtctatgacgctgtcaaatctatgactcagcacaacgtgggagctttggtggttgtcaaacctggacagaataaatcaatcgctggcattgtcactgagagagattatctccggaaaatcatagtgcagggaaggtcttccaagtcaactaaggttggcgacatcatgactgaagaggtattacccccactaatcttttttgtgtgtgtggtttgcaagatagctagaacatgattagcataagaccagtacctggtgacgatatgacctatataagtgccgaaaggatgcttggacacaacttaaccggtgaaccgttatgatgccagaacaaactgatcacagtgaatcccgacaccaaaggtctgcaggcaatgcagctcatgacaggtaacttggttgcccgtgttcttctgtcagaaaaaaaaaaanctactagaatcgtgagagcgctggaaaattggttatgatccgctgtgcncaatcgtctgcgcagaaaaccgccgtcagacacatcccggtgatcgacggcacggggatgctggggatggtctccatcggtgacgtcgtgcgcgcggtggtggccgagcacagggaggagctgaaccggctcaatgactacatccagggaggctactaggacggcgtgtgaagcgacgacccccctccgatcctgccagtcagtgaagtccgcctttgaaatccaataacacggaacaatgatgatgacgaaataggccgtgttttcttggacaatgatgttaagttcggcaatgttttcctttctcttttttcctactgcgtggtctatgtgtatattgccaaaggcatgcgtgagccatgcgccggccggtgctgtgctggggcgcagagaccatctgatggtggaaacaccggaaataagagcgtgccgctgtgtgtttcctttgaaggaatgaaaatggtgttcgtgttgtgcattgcttaaaaaaaaaaaaaaaaaaaaaaaaaaaaaacatangactttagacgtctctgatcgttagatctgataggcatatcgggttggcttcggctgatccggggggcctatcagtaactctaatacggtttatcaccgtattagagtaccccc

SEQ ID NO: 45485 - DNA, 1123 bp, Zea mays
  Clone ID: MRT4577_14148C.1
tttccaaagacaaccgcacccatccgcttaattatctttcaaaaagaaccaaagactcctgtccccatccgcttaattatcaggctaacaacaacaacaacatcatccgctggctggcgctgcgctgccgcttatagctgctccctgaaccccaggaggaagcacactagcttaacccccatcgatccgtgcagagcgccagcgagaacaacagcaaaattaagatgcaaaagcttgagaactactacagcaactagaacatcaactaaacctactgtaacaacgcagcaaacggacaagcagcaagagatctagtgaagaaagaacctgctggctagccaatgtgctgcgttctcacaggcctaatttctaacaagagaagctccgagtgagtgagtgagttcttggagcaaaaaccagtgacgtacacaaagcagcgagagatggtagagaaaccgaccgaccgaccgaccggccaaccaaccagccagtcaaaaagagtgcttcgctcccaaccttgctcctccattttgctgcagccatccgttgtcgtaggaagcagcagcaaagtaactacctgggcggtgcatgttgaggagctagctgacggtgatatgtgtttgctgaattcatgcatggtatgctgctgaaatgctcgtgatggtggttggtggcatggtgggcgcgcggagtaatctgcgctccactgctctgccgtcgtcagtggtgagaagccgaggacacggacggcggcggcggcttgtcgccattgccgccgccgttgtgctcctcgtcgccctgcatcctggtggggatgcggatcccggagaagccgacgccgggcgagaacccgatggccgacacagcggggctgagcccgccgtgctgcatcgggttgtcggcttcgacgctctccggccatcctcgctcggagggctggttactggactgaaggggtcccctctggaagaagaactggctctggccgccaaacgccgcctgcatgtgcgccgcctgctgcgacacgttgaacaggtagccgccagcgctcccgccgcttgggtcgggcacggtccacggcaccatgcgctggctctgcgcctgctcgccccacatggcgcga

SEQ ID NO: 45486 - DNA, 254 bp, Zea mays
  Clone ID: MRT4577_141490C.1
tcttgatctagtacctcatacatacactcagtgcttaaggagactcacaactgaagtagtccctccatactacttagcgaaggacaaggcggcctttagcccaggattcttatcttctcatggaaatctcttggatcccttccatttaatgatgtacgcagtatatgttcgccactttgaatctgcttatatatgatggccatcggaactccatagtgggacttcactgttatcagtgccacaatacagaatct

SEQ ID NO: 45487 - DNA, 175 bp, Zea mays
  Clone ID: MRT4577_141491C.1
ccgccacactcgcagggggcatgcagacaccaaacacagatgttagctttctagacacgcagcctgtgaagccaaatcaccaataaacaagacagagaggcagggaggacatggagtaatagctagagagacggagctcgggggcggccggcgttaagatctaaccgggggttta

SEQ ID NO: 45488 - DNA, 179 bp, Zea mays
  unsure (1)..(179): unsure at all n locations
  Clone ID: MRT4577_141492C.1
ccatggcgtacttactcacagcattgcggtactccttatcgtgaatcngagagtcactacgccatggctttacagccgaagatagccttactgtgcgcgttcgcgttggtcgcctcgggtctgctggaccggtccctgccggcgtgcctgcgttgcctttggtgtgtcttgttttcctt

SEQ ID NO: 45489 - DNA, 451 bp, Zea mays
  Clone ID: MRT4577_141493C.1
ccattcggaatggccaattcaaaaaaatttcaatatttattcgtttttttcggcaacaaaaaagccattttttttggggtccacattggaaggaaatttggaggccttaaaaattaaagcatgggcaagggggacttaaacttcgaccccgggtccgaggttaatggaggggattggttaaacaaccccgctgggggaaggcaaatcaaggatcccctggggaacccccattgggaaacgaccccaagttttaccaccttcaccacatggggttttacaagtggaaaaacaaaaaacctttgtgggccaacggacgggccccttgacacaaaacttttgctttttagccccggaaataaaatgggcacagactttttccaacaaacaaccattgggcgatgccaatgggattcgaaggcaaaaaacagtggcggattctgatttgggtttt

SEQ ID NO: 45490 - DNA, 470 bp, Zea mays
  Clone ID: MRT4577_141494C.1
atgatttttttttttttctcttttttttttttttttttttaaaaaaaaaaaagggagtttttgatccacctggttggggatcccaagtctccagtcacaaaactcttgttatggcccggaaaaaatgggggttaaaaccccgaggcggaaacttcaaactttgactttttccgtaagccccaaaaaaaagggttttagggagcgtaatgatttacaacaatttatggctatctgtaccaattgccctccacgggaaaattcccaaaaatttgggggactccttttcccttttgacggggccctgaaagggcccccctttgttccaattttccagggcgcgagggaacaaatttgcagctgggctttttttccttggaaatgaaaaatttttcccggcccggaaaaaatggttgggggaaagtccctactctttaatattttttggccttcctccgcaactcgtttagctc

SEQ ID NO: 45491 - DNA, 188 bp, Zea mays
  Clone ID: MRT4577_141495C.1
gggaaaaaatccaataaccctataattaacttgctccgtaacaaaaaccatgtgtcatactgcaagacccccccccgtttatttaggtgtgaaagccaccccccaagtggggaccacaacaagcgcgggaagatgtaatcacacacttacgactgcatataacaaaacagggacctatcttaaaaccg

SEQ ID NO: 45492 - DNA, 449 bp, Zea mays
  Clone ID: MRT4577_141496C.1
ccccagggcatttttggtttggtttgggatatatccaaaagggccaacccaacaaaaataccaaaagtttaggcagggggcccggaaacaaaaaaaaggacaaaggggaacggccatggccctgctacaaaacacaaaccatgttcggaaaacaaaaccggaagctggtttcccacattcaactaggcgatgggccctcccacccccatctaaaggccagaagggccaaaaacctgaaaaaaaccttaaagcaaaaaggcgaaaccccttgggacccctgctttttccaaaacttaagtaaccacttgctctttttgtccctcgaacaaaaaaaaccctgtaaggccccaaaaaacctcaaacaaacccttaaaggaaattttccccttgccatcgaggtcaaaaaccttaaataaaactggaaaagcgggtggagggaaaacccgggg

SEQ ID NO: 45493 - DNA, 572 bp, Zea mays
  unsure (1)..(572): unsure at all n locations
  Clone ID: MRT4577_141497C.1
aataattaacagaacaaaagctgtcgtggtcctttaaatcatcttgttagcaaggtaagttaacaacagtaccaatactcggactggaattcctttcttgcgtaatatgtcaaccacccttcgaccaacaccaccagttgctccagctaccaggacaatatcagaagttcccattgtgctaatgacttcactaggggaaggatcagatattttctcagctagataatcaaagaacttcacaattcagaaacaaagaatactcattagttgatccatattccataccaacctctctctctctctcttttcttcctattactctctagttatactagttgaaaattgaataaagtgttaccttagcaggagatgggaacccattgaagaagaacagtgttttaacaaatcttccaaaatcccaattttgtcttccagcttcagcagatattgttgctctatgtgctccagaagagagtcgggttgacgtataaatcaatgtctgaggtctaccacaaatctgaagaaacggtttaggcagcgtaggtgatgcanaaatagtgtgcgaagatttc

SEQ ID NO: 45494 - DNA, 182 bp, Zea mays
  Clone ID: MRT4577_141498C.1
ttcgaggcggccggccgagggggcactccatgatctgacaacatgatcctcattcttacgggactactccttatgctcgatggaggagagattgcgccatgaggcacgagagggccccaattgcatatctctgtcaacaacatgagtatgagggagccgcctcctccaacggaggaggctct

SEQ ID NO: 45495 - DNA, 222 bp, Zea mays
  Clone ID: MRT4577_141499C.1
aaaaaaaaaagacttggtaataaaattacccaggggtcattctgcccatttaaaaatatgccccccccggcccagcagctaaattacaaaatcctggaattaaaagaaaaaaaagttttttaatttggatcccggggggggcgggcggggtccctgaagcgggattactcgaagggggccttgccggggaacttgacctcaaggggggggcccccggggttc

SEQ ID NO: 45496 - DNA, 319 bp, Zea mays
  Clone ID: MRT4577_14149C.1
aggaacccacttaacgggccgggaatcaaaccccattatgaatgaaggccaaaggggccccaaattgccaagctagcaccttaagtaagaaaaacacagccggagccacaaaagggaaacttgaaatgccaggccagggtttcctgtttaaaacacaaatattctgcccttaaaacccaaatgttctaaagacttgtcccccgctcgagagaaagggccatgttttggggaacccccagggggggaaacatttgcaggcccctattgcaggaatggttccaacacaaacagcccttacagatcaatgccccgggaaagc

SEQ ID NO: 45497 - DNA, 727 bp, Zea mays
  unsure (1)..(727): unsure at all n locations
  Clone ID: MRT4577_1414C.1
aagtacgcctcgccttcttctccagtttgagctcctcttcagcgccaccgatcaatccatcaccacccccagaattcatccagatacgcatacacccgcccggcttctagcttacttgctttagcacttctttgcatatctcgatggagtgcgagaacgggcacgttgccgccaacggcgatggcctgtgcgtggcacagccggcgcgggccgacccgctcaactgggggaaggccgcggaggagctgtccggaagccacttggatgcggtgaagcggatggtcgaggagtaccgtaagccggtggtgaccatggagggcgccagcctgaccattgccatggtcgccgcggtggccgccggcagcgacaccagggtggagctcgacgagtccgctcgcggccgcgtcaaggagagcagcgactgggtcatgaacagcatgatgaacggcaccgacnagctacggtgtcaccaccggcttcggcgccacttctcaccggaggaccaaggagggcggcgctctccagagggagctcattagattccttaacgctggagccttcggcaacggcaacgacggccacgttctgcctgctgcggcgacgagggcagccatgctcgtgcgtgtcaacaccctgcttcagggatattctggcatccgcttcgagatcctcgagacgatcgccacgcttctcaacgccaacgtgacaccttgcctaccgcttaggg

SEQ ID NO: 45498 - DNA, 680 bp, Zea mays
  unsure (1)..(680): unsure at all n locations
  Clone ID: MRT4577_141500C.1
ttggacctctagacggccgctcgcgactagaactagcggcgcgtgggcaaaacattgtctttgtaactggcgaacttctcctttgcaagtctgggggtctaggagagtttgtggttcattgccagttgctcttgctgctcgtggtcaccgtgtgatggttgtgatgcccagatatttaaatggtacctccgataagaattatgcaaatgcattttacacagaaaaacacattcggattccatgctttggcggtgaacatgaagttaccttcttccatgagtatagagattcagttgactgggtgtttgttgatcatccctcatatcacagacctggaaatttatatggagataagtttggtgcttttggtgataatcagttcagatacacactcctttgctatgctgcatgtgaggctcctttggtccttgaattgggaggatatatttatggacagaattgcatgtttgttgtcaatgattggcatgccagtctagtgccagtccttcttgctgcaaaatatagaccatatggtgtttataaagactgcctcacccttgtcaagggcatgcctcctcgcccattcagggaatacccactccagagctccataccattcaggtgagcctcgatccgtagctcaggtatgcgtgcatcgtcncacgantcatgacgacaaa

SEQ ID NO: 45499 - DNA, 253 bp, Zea mays
  Clone ID: MRT4577_141501C.1
ccacgcgtccgcactggcctcgggaagttaacccaagggtttaaaaccccgccacgaacgagaaagaagcagctgtttcaaaccacggggggcccgaaaaaccatcaccgacccatcacacgcaccaacaccaccacctgaaacaccacaaaagagaccacaagcacgccgcacgcccaagacaccataagaccgccgagcacacacacgacacaatcactaaaccgagccccacagacgacaaccagtacga

SEQ ID NO: 45500 - DNA, 228 bp, Zea mays
  Clone ID: MRT4577_141502C.1
gctcgtgagcacagcgcgtccattcccctccccggtcatccggttgcaagtatacttttgtgatggttgtatggatgagtcatgtgtaagattatggagtaattattatacattttatgatctatagttatatttgtcatcttaagatatgactaatggttggatgaatgtgtcatatcttaaaatacagattgactaatggagaaaattatctatttgcactcatca

SEQ ID NO: 45501 - DNA, 269 bp, Zea mays
  Clone ID: MRT4577_141503C.1
caccactcctcgctacttgaggacggtacatctgcacagaggttcgacgtacgacgacgacgacgcatgtttcacacatggcatcccagctctccgccgccgtgccccggttccacggcctccggtgctacgtcgcgcccaggtccgcggaggcagcgctgccgtccgtgtaggtgggcaggaatatgtcgtcgtcgcatggcatccgctgctactacatcggctccgccatcaacctgatcatggtgacgacgacgacgctgatgctg

SEQ ID NO: 45502 - DNA, 605 bp, Zea mays
  Clone ID: MRT4577_141504C.1
ctgtttgtaccggtccgggactcccgggtcgacccacacgtccggacaacttggataaaagatgacaaaattaaatttatcctagaagttcttctgccagaagcaattatttgttcaatttctgctgttgatgggttagattacgaggcagctgaagcaaagtatctaaaaggaccatgtgtaggctacagggaaagagaattatttgatgcaaaaataatatatgaaaagagacgaaaaccaccaacaaatgaagctcactaaatgtgctgaaagttgaaaccatgacagggagctctcatagatactagttgaaaaaaatctctgaacaatcctctcttaatacatattttctgcaaatgggagaatggataatgtgttcacttcttttttgagatatctagaatctgtggttataattacatctttatttccttttcttgcgcttcttcaaagttaattatgtcaacatatttcagcagttctactttcccatacatttttagaatgcataattcctaaatgatttagaagggaaagtaccattttgttttatgacgctttacaatctatgctgaatgtggaaatatattgagcacaattat

SEQ ID NO: 45503 - DNA, 399 bp, Zea mays
  unsure (1)..(399): unsure at all n locations
  Clone ID: MRT4577_141505C.1
gggaaaaaaaatcccccccccttggccaaaaaaaaatacaaacaggggtttagggggggccctcccaatttttggaacctctagcaggggcccccccagttggaaaaccgggaagccctaatttttctcaaccaaaaagggggggaagttggccccccccccccccaggggaaaaaatttttattggccctttttccccaactggggggggggggggttattccctaaggaaaaaacaaaaggcttatctcccaacaaagcccccgtttaaggaaccgggccaaaacccgggttaaaaaataaaattcccgggaaatgggaacacccgggggtggttttaagttatggagaaactttgggggcccaagggggaaaaaagggggcttngcccttttttga

SEQ ID NO: 45504 - DNA, 386 bp, Zea mays
  unsure (1)..(386): unsure at all n locations
  Clone ID: MRT4577_141506C.1
gccaancggggcaagagacacagtcagggggggttgtttactgtttacatctgaaaaatacatggaattaggtgacgacggaaagcggaatgccacttgtgaaggaagcctaaaacccggggcagcaggtcatgacttcacacaaaagaagcgctggtttggtgctaaatatgatttagcagccatgcccttaccttacctgtatattataaaacgaaatatattggtctcaagccttataaacgatatggcataaagcaacacgaaccttacttccatattcgatgaagaaaatggtcgactcatgtacatcaagccatgtatctgtaatgaacttcacaatatcatatgagatgttcccttgtacggcgattggttccttctcc

SEQ ID NO: 45505 - DNA, 510 bp, Zea mays
  unsure (1)..(510): unsure at all n locations
  Clone ID: MRT4577_141507C.1
gggggggttttttttttttttacagaggctactgcgtcttttaaaaacaagagaaagatatttacatcgctgcggctagcggggaaacaaatgaagctgcgcgcgcgggtaaaaaaactaatcaaacccaaccanngaaacggggggtgggggttcttcttcttcttctttgcgactgcgagggggctaatcctcactccatctcccccatgtgctctagcttccatgcgtgtgggatactggggtgggtgaccccgtcctaataccttgggcagctacttacttattcaagcaaagaagccatgagaggtggggttagcgccgggacacccggggggtgtgcggcatctgggcgggcaaaatgctctgcaggagcatcctgtcctcccccgacgcggggaagacgtgccttgcgcccccgccttgcaccaggcccctgctgtagccccccaacggggacccgcccgggtactgctgctgctgcctgtggacccggggggctgcaggggg

SEQ ID NO: 45506 - DNA, 388 bp, Zea mays
  Clone ID: MRT4577_141508C.1
ttgggcccccagatccaatcatgcaggaataggcacccggcggttaccaggatcgaatgtgatcctctccagttcaggatcaaatcagcttcacaccagtgatctggtcttcgagttccacgaagtgaagaccctgaacatctgtttggcgaaggttgtccacattgcaaccactgctcaggagaagatgaagcctactcaggagttccaagactacgacgagttctaggtgtgggttggcggaaacccccagtcagctgcctgtgaaggccctatctttactgcgttccgcttagcactttgatttacccgttgagttgatgactatgtggatgtctttgacatcgtgatgtaataagttaatactcttttatgttattattcgagc

SEQ ID NO: 45507 - DNA, 346 bp, Zea mays
  unsure (1)..(346): unsure at all n locations
  Clone ID: MRT4577_141509C.1
ggttctgttgttattttgtcacggtgcctctgtttttttgcctttattttgtttacttgtttttcggtgttgcctttccgtctgtcgcccctcttttttttcctttttgtgtctctttgccttgtgtttgcattgccttgggggggggggggggggttttttttttgttggctgggtctcttttttgtcactccgtgtttggtttttctgtctccgcgttcttcncttgttggggttgcccctcttgcgtgttcctgcccgggcggtcgttcgctcgggcgatttctgcagttctccctctctctggcgggcgctcgtgcgtgcttcttgcgggccccgttcgccc

SEQ ID NO: 45508 - DNA, 406 bp, Zea mays
  Clone ID: MRT4577_14150C.1
ggtgattgttttttttgtatattgtttgttgtaaatttttttggggggcgggggggaaatgaaagcgggcaacgggcaggtgggggggatccgggcaaacattccaaaaaccccggcataacggcaaaaaggggggggggaacggggaaggccagaaaggggggggggggggggggaggggtgccttttggggggaggggggggggggggggaatttggggtaattgggggccccggggggaactgggggtattggggggcggccccaaagggggcaaaccgggggaaaaaggaggaaaacctggggggccgggggagggaagaaaccaacctaaattggggggaaaacagggccgcccttccacggggaaaaaaaggcaacccagagggataaaggaagccaccc

SEQ ID NO: 45509 - DNA, 999 bp, Zea mays
  Clone ID: MRT4577_141510C.1
ggagaagaaatgggaaaggtagacgcaagctcaccatgacggcgtcacgacgaagggcggttccggcgaggttcggggcccaaggtgatggcaacacgacgtcggtgggcggttgagcgagggcaccgtccacgagcctgggggatgccttgtccgcgacgtgcgcgtggttggcgtaggggcggtttgggagggatgacgggtgggcccggtgacacagcggcggcggctgggcaagcgcgcgcaggcggctgggcgtacgcgcagcagcgcgctagggcaaacgcacacagcggcgcgggagtgggccgagcaggctgcggctgggccggggagcgctgggccacgtgggagagcgcaggaggggggcttggtgggccacgcgagagctgggctgcgaggaggcgtgctgggccgcgaaggggggcggagtgggccgcgctgctggtgggctgagggaggttttccacttttttttgttatttctttctcttcctttttattcttcttcaaatctaaatataggttttgaatcaaagattcaaatatttaatgagtttgaattgatgcccaaacacaataattcgacccaaaaatatgcctcgacatgctatgcaccaatcaaggatcctcttagggttttattttacgaggattatgccggtataaaaaaataattctccatttttgggaaaagataaggaaaatagagaaatgagagagtaccaacctgaatttggtggatattagaaaagaaattttatacccctaaattcagggtgttacactggggtagtctctcctccggcaaatcgaacaagtttgctttcagcttctccaaaatagcccagtttcatcatcataggcatgtcgtcttcaggcgcaatagatttttcaaaatctagatgactaggcttcgttaggatcagaatactgtagtcttcttcgctctcagcatcttcaccctcaatcacagtttgctcagcttcgacctggtgc

SEQ ID NO: 45510 - DNA, 515 bp, Zea mays
  Clone ID: MRT4577_141511C.1
atcgcacgcaaaggcaccatcactagcttggtgttgtgtgcacacatgacatagatacgccctcctagaataagcgtcgtttaatttaaatttatgtacaagccaaacttaattccctctaatcctaaacaaatcaaaatcctttataattttctttaatctcatccaattcatgtgggacaggaataatcggcctaaactgtttctggggcttcaggaatcaactcatagccatggggcttaatatccgttttcctagattcgacgggaatgcacttgaggataacagagataaccaaactgaccgagccaagaatagcgctgagcaaccatagctcccaactcaatggtacggtgtttgcaaaggttccaagaaactctactatgattacttggaatatgatggttgttgtcagtatactgataaagacccagtttttcagtatccctctgaacacgttgatcttttccatttccctgctatttatctcgttgaaaacctggcaaaacacaaa

SEQ ID NO: 45511 - DNA, 2182 bp, Zea mays
  Clone ID: MRT4577_141512C.1
gccggccgggccgggaacacatgcaacacacattattcttcctccaccatctcttgagtcgcctggccagcggcgcggcttggttcccctctagagctcaacagcagctagctgtgtagcctatagagaggtttaaccatcagcggcatggccatggcgatctcctctgctcttccgtgctccctcctcgtggcggccctgatgctcctcgcctcctccgtcgtccaagtgcaaggcatcacgaggcactacgacttcaatgtgaccatggcgaacgtgacacggctgtgcgccagcaagagcatcatcacggtgaacgggcagttccccgggcccaagatcgtggcgagggaaggcgaccggctcgtcatccgcgtcaccaaccacgcccagcacaacatctcgctgcactggcacggcatccggcagctgcgcacggggtgggcggacgggccggcgtacatcacgcagtgcccgatccagacggggcagagctacgtgtacaactacaccgtcgtggggcagcgcgggcacgctggtggtggcacgcgcacatctcctggctgcgcgccaccgtctacgggcccctcgtcatcctgcccaagctcggcgtcccctacccgttcccggcgccctacaaggaggtccccgtcatcttcggtgagtggtggctggcggacacggaggtggtgatcaagcaggcgcttcagctcggcgctggccccaatgtctctgacgcccacaccatcaacgggctgccagggccgctctacaactgctctgccaaagacacgtacaagctgaaggtgaagcccgagaagacggatattttgcgccttatcaacctgccgtgcaaagacgagctcttcttctccgtcgccaaccactcgctcacggtcgtcgaggtcgacgccgtctacgtcaagcccttcaccgtcgacacgctgctcatcgcgccgggccagaccaccaacgtgctgctcgccgccaagccgtcctacccgggcgccaactactacatgtccgccgcgccctactccaccgccaggccggccaccttcgacaacaccaccgtcgccggcatcctcgagtacgagatgtaccccgacgcgccccggccctccgcggggagcttcaacaaggccctgccgctctacagacccaccctgccgcagctcaacgacaccagcttcgtcggcaacttcacggccaagctccgcagcctcgcgacgccgcggtacccggcggccgtgccgcggacggtggacaggcggttcttcttcgcggtcgggctcggcacgcacccgtgccccgccaacgccacgtgccagggccccaccaacaccacgcagttcgcggcgtccgtcaacaacgtctccttcgtgctccccaccaaggcgctgctgcactcgcacttcaccggcctgtccagcggcgtctactcgccggacttccccgtcgcgcccctggcgccgttcaactacacggggacgccgcccaacaacaccaacgtggccagcgggaccaagctcatggtcgtcccgtacggcgccaacgtggagctcgtcatgcagggcaccagcatcctcggcgtcgagagccacccgctgcacctgcacggcttcaacttcttcgtggtcggccaagggtacggcaactacgacccggtcaacgacccgcccaagttcaacctcgtcgaccccgtcgagcgcaacaccgtcggcgtgccggccggcggatgggtggccatccgcttcctcgccgacaaccccggggtctggttcatgcattgccatttggaggcgcacacaacatggggcctcaggatggcatggttggtgctcgacggcagcctcccgcaccagaagctgctcccgccgccgtccgacttacccaaatgttgattagactcttcctccatctctatcctgccggtcgcttcaaattaaagggaattgtgaattagacaaatgtttgtttttttcttgtttactttcttcattgccaattgcaattttttcaacttgcattttaactagtccgttccgttcctagctgacctggactttttgtaattttttttcttccatttgtttgccaccacaaatgtttttgtacactcttctgaaaataaagaatggcgtgacttgcaccagataaaaaaaaaaaaaaaagcggccct

SEQ ID NO: 45512 - DNA, 220 bp, Zea mays
  Clone ID: MRT4577_141513C.1
ggctaaagatatggtggattttctcgtattggtaaaccaaataatatgcaaatttaaatcgtcagctagcgccataatggagggaaaatttcctactaatgcaagtcgtttgtctgcgatattatcacaagatgcattttcagctggtcctgcaagcaatactgaggaaatgagagaactgcaagagctgcagaggacattatacacattcttgcatgct

SEQ ID NO: 45513 - DNA, 406 bp, Zea mays
  Clone ID: MRT4577_141514C.1
tacaactatgtgctagcagaagattgctgcatactctccgccaaagaagcttgtacccatcaacgcaaatcacatgattgaactctgcttcgtgattgcagccgcaacaagctccacttagacaagtatctgttgcctagcccccgcaggttcttcccttcaacgaactggcagcgatgaactctactgcttaatgatcgcagcagcaactactgcagctcaaccagcttagctgatgagaggccccgctagcctcctgacacaaccacagttgtttgacgatttctcagcacgctgagcctaacggcaggcaccctgttacaactgtaacacttgctgccattcaaccaacttgctttgacaacctagcaagtgttctaccaacaacccatcattgggtggggcc

SEQ ID NO: 45514 - DNA, 603 bp, Zea mays
  Clone ID: MRT4577_141515C.1
acccagtctcgcggagagttcgatcccacaatcttcttgtactacaccactgtcttcgtccaactcggcggcgatgtctgggggcgtaaagggcggcaagggcctgtgcaagggcaggtgcgaaacagctcaccgccaagcgttctccgctacaacatccagggtatcacaaaaacggcattccgcaggctgccgacgcacgtgttggtgtgaagtcgtatctccgggcttatctacgcatgagacacctgcgttgcgctcacatcatcttcctgcgagaatggcgtccgcgatgcggacacgtactccgagcacgttcgccggaagaccgccacctccatggatggtgcgcactccctcaagcggcagggtcggactctgtactgattccgtgggagaacacatctcttccgtcgtgtgcatctcttggtgatggagcttcctcagtttcctctgccgtgcttggcttgatgtgtagagttatcctattaaagtatctctgatgagcttcgctattggggggaatcatgacgtccaacagtgctgagagctcgagatccagatgtatctttctttgcagcggtgctctgtttacattgattg

SEQ ID NO: 45515 - DNA, 214 bp, Zea mays
  Clone ID: MRT4577_141516C.1
cctgacatagagatatgtttgacttatcgattaagccttgcatgtgcggggctggggtactttttactgtcgaaactgtgaatgtcacattgaatcagttatacaacgtcagctggcgcttgcttctcggctaaccgccataactgtccgactgacactttacatacaacacaacttacgcgaagcgctcacatataacacatatgggttgcgc

SEQ ID NO: 45516 - DNA, 1191 bp, Zea mays
  Clone ID: MRT4577_141517C.1
gcccgtcccccacccacgcgtccgctgaggcgtgggtgacaaaacaggaagcactgcctgctcattttctgcctgtgcgcgtacagagatactactagcgagcacgccatggagcaaaccggggcggcggcgcgcggcgcgcctggagcgggagtggaaggtggcgacaagacggcgaggaaggcgctgaaggtggtggcggccgtggacgcgagcgaggagagcctgcacgcgctgtcgtgggcgctggacaacgtcgtgcggtgccacccggacgcgacgctcgtcgtcgttcacgcccagcacgccgccgaccacttcgcctaccccgtcgccgcgcacggcatcgtgtacgccccgtcctcgggggtggagtccgtgcgggcggcgcaggaggagagctcccgcagggtcgtggcgcgcgcgctggacatctgcaaggagaggcaggtggacgccacgggggccgtcgtggagggcgacgccaaggaggccatccgccaggccgtggagcgtatgcaggccgggcttctcgtcctcggcagccggggcctcggcgcgatcaaaagggcgttcctgggcagcgtgagcgactacctcatccatcacgcctgctgcccggtgctggtcgtcaggcccaggccgaccaagtgaactcgcctatcgttctcgagcagtactccagtaatgtacgcagtgccctgtgccgctgcgcggtcagtaataccagtatatgtatgctcatagaaaaaaaatgtagaaaactgaataaagaacctatgcatggttgtatctgcacaaattatcaacgcgcctccttgcctgcttttccgaaaaaaaaaaaaaaaaaaaaaaaaaaaaaaaaaaaaaaaaaaaaaaaaaaaaaaaaaaaaaaaaaaaaaaaaaaaaaaaaaaaaaattttttcggggatgaagccccgtttgaaaaatattgcaactttatgctaaaggatggaacttgggctgcccacatggagctgaaagccgtttttttgttgacaaaaaaaaatatatgcattcacatgcttaattcaccacgtgggaacataaacaacttttttggccgggaagctacaaacagggttcacttgtctaaaataagggggagcattacaacagtgtcaggctgaaaaaaaatccatgtaaaggccctgcaatgccagttgtcat

SEQ ID NO: 45517 - DNA, 276 bp, Zea mays
  Clone ID: MRT4577_141518C.1
gcactatcactcactgactcaatgagtgatgtctatgtacacgtcatcacccccaacacacagccaccacatcagaccacaagcaccacacaaaaaacaaccgtgccatccgccgcgtcctctgccgcgtcctctgccacacccgccccgccggcttcacttctgtcgttagcgggcggtgtggcggtggcggcgagcagcgcacgggcgagcggcggtggggacagcggcggtgaggacggcagcggcacagaaatggcagtgaaatgcaaaaac

SEQ ID NO: 45518 - DNA, 285 bp, Zea mays
  Clone ID: MRT4577_141519C.1
gtcctaaatgccagccgcgccccttttttttcttttttttgcataattttttctggtatggctctcacaattcctttatttccaacttaaatttagactcttgatcattttttattcagaacgagcactagtgtcacgttatgacgacgtgaccaccttgagctcgaattcctcgacgacgaccagcgacaacccttccacttgagcggcacctagtgcttcgtgcctttgataccctagcgtcgcgccattcgagttgtgcatcttaacgccattgacatacac

SEQ ID NO: 45519 - DNA, 379 bp, Zea mays
  Clone ID: MRT4577_14151C.1
gcaggccgccctttgtttttttataccattatctttatttacttcatataggaacaaacttttttctttccattgaaattgttcattcaggccattgctcacactgacactgccacccatggtgatgcctgacacattattactcaatgatggtcgctaaaagactcaactagctatctacccacggggtatactacagcacatacttttttcagggggggacaccgcctgcagcaccgtaggggcatggagccgggtggttgaagccgcaaattgccgtcaatttgtgggctttttggccactcaacaacccccctaactggtccgttttcagctgctgctgcactgatggactggaggaccaaacccaatatcgcct

SEQ ID NO: 45520 - DNA, 430 bp, Zea mays
  Clone ID: MRT4577_141520C.1
cgcgtgacggatcagtactacagaaaatggcactactgattataaaacttatcacctcttctaaatagatgattcatggggcgtgcctaacgactataaactcccacactcatactgaatgcaaacgcgctgcatcaccttctgacttaccaaaaagatcacttcttaagcctcttccatgctatcgatggactatcagcgactatttgactcctggaccctctcctacacaaattcctttcaaaaaggaacatctaggaaatcttgcctcaactgtgttcttagacacgtagccaaccacgacgatgccctctcacggatcgaaaaacttttggaagtaaaccccatgctttgcttccatagctgcaggcgtgtcaaccaactgtctacattgaaccgagctgcttatttgcagcaacatctattacca

SEQ ID NO: 45521 - DNA, 230 bp, Zea mays
  Clone ID: MRT4577_141521C.1
aggacttgtgcgccgcacgccaaacagcaggcacgcgagtcgagtcgttcccgttgttgcggccggcggaggaagagatggcgacgaacatcgaggacgtgccttcggtggagctcatgaccgagctgctccgtcgtgccaagtgcagctccaagcccgacaagcgcattatcctgtgttatccacctggttctggaaagggaacacaatctggccttgttgagggtgaa

SEQ ID NO: 45522 - DNA, 539 bp, Zea mays
  Clone ID: MRT4577_141522C.1
ggcccgctcggctctgctgcttctctcccggctccaggctctgcctccgcctccagagtccacgccaaccactagcaccgacagccccgccccaccaacccaccggtccactgcccgccgccgcatgacggtggcccgcggtccgcccggccgcccctcttccgggctcctgggctgctggcgccgccgcccggcgctgggcttcggcgccaaggtcggcatcgccatcgcgcttggcctctccttcgccatcatctggacctcggtctccccgacttcctcctcccagcagatctctactgagcgctcatccttcgcagctgaagttgccgcaccgccaaccgcctcccacaatcgcgccgccgccggcggcgacagcggcagcggcgggcacgctcaccggaagccccgtcccgtcccgcacagccacaagaagcgccaccctgctccttctggatcccattcccatccccacccctccaatgtcaccttctcgccgggtaccaccgcagcaaaggacgatcactccgagccggctc

SEQ ID NO: 45523 - DNA, 144 bp, Zea mays
  Clone ID: MRT4577_141523C.1
cccactcgattgcccacgcgtccggcctaaaaagaagggcgggcatatgaatgaaggaaacaggtgtgtaatgctgaccaggcggaggaataatgggttaactgacaactctgggtcggtggattcgcaattggcttgggaatt

SEQ ID NO: 45524 - DNA, 624 bp, Zea mays
  unsure (1)..(624): unsure at all n locations
  Clone ID: MRT4577_141524C.1
cttcatggtcttgatggagcacttcgacaactatgtcttgccttgatgtattcatagtggctacaagtgctgacaatttttgcaatggccaatgggtggtatccagttactgacaacagggcttgtttagttgattccttgtgagttatccacaggtttgatgcagaaatctgatgtggcccctctgcttagatgtcacgatgtgatcccttcgctttagatgtcatggaaaagttgaacctcaagtcacgaggtagaacaacaggacttgatgtgtcattattgggttcctaacaagctgactgtttcgtgaggcgcacctcctgtcagggaactcagattcctattcctccgtgcaagagctttacgtccgtttgccacatgagaatggccggctggtttagtcttgaatcatcatcatgattcagtacacatctacctttgctggcgaccaacattagcctggtgcagtgcatggtctgggcttgcatgcatgcaatgcccccgggatctccgttcctatctcttgggttgagatttacatatgaagcatagctgaaaaaaaggntgtggtccgccgcagcagatgctgaaggccccaggtatgtgctggagcgtgtggct

SEQ ID NO: 45525 - DNA, 582 bp, Zea mays
  unsure (1)..(582): unsure at all n locations
  Clone ID: MRT4577_141525C.1
ccccgcgccggggagccgggagcgccgcgccacgccatgggctgcccacaaccccggcacggagccgccggcgggggccggcgccagcaccgcacccggcaacgccgcgctcgcgccgccggccccagggaccaaccaccccggcgccgcgcccaacgaccccgagaagaaagagccacacccngagaaaggcaacagggggggcccaagcaagacacaacngcccgaccccgacgagggccccccacacggcaagccggagaccagagangacagngcacaaaaccacggcgaagagcnccggggagaccgcaaggaaaacacncccaacacgnnagaaaagagggagcaccagaagcgacaagcacccngcaagacagcngccggggagaaagaagcaaagccccncaaggagaagacngaagangaacaccgcgggaacaagaggggggacaaccnacccgcaaggcgcccgacacaaagaggggagcaagaaggggcagacgncnaaaaacagggaggccacgaaggggccaaaggaaaaaanccagggagcaaagcagaaaaaacgcgaccacaacc

SEQ ID NO: 45526 - DNA, 388 bp, Zea mays
  unsure (1)..(388): unsure at all n locations
  Clone ID: MRT4577_141526C.1
gagancttcaacaaactaggtcgcgccgacggagttttcccagaccgtgcacctacaggctagatgtcaggagcgtatagcaccgtcgatggcgaccacgagctaccaggagatacagtgtaggtgtttggcaacggcttccgctacttggtcgcagcccccgaccgtgcgaatatgatgctgactacatcactcacccggtcgttcagactgtgtggcgagggacaacggcgatctgactacgcgtctcgggcagacgtgcaggagtcgctaccctgcagatgagtggacgctctccaccgtccgagatatggcttcggagctgcgacctgaacatcggacctcgaacgtaatgtggcattgctctgggcgttacgacaggtgtgct

SEQ ID NO: 45527 - DNA, 130 bp, Zea mays
  unsure (1)..(130): unsure at all n locations
  Clone ID: MRT4577_141527C.1
aaaagggcnncttgggggcttttaaggaagctccccgcaaatattctcacgaccgaatagaaaaacgggcagacacaactggcatgcacaaagcacaagccctgaaatctagatccactatcaagccgag

SEQ ID NO: 45528 - DNA, 408 bp, Zea mays
  Clone ID: MRT4577_141528C.1
ttgttcttttttttctctttttttttttttgttggtgtttttattgcatacactttctgtttttagattgggcaggtgtgaaaagtgcaagcgcagtccacacaaaaaaaaaacaccacgaagggaccacctccccacaggtcaagcaaacaaccccgcaaaaccaccccaacagacgcaccaaaaaccttcagacaaaaaaggacgaaccttccaaacacgggggaaaaacacaacgcaaaaccaaaaaaacgggcgaaaaaaaacccaaaaaaacaagctctcaaaaagccgactcccaaccccggcgggggcctctatagaaacagccaaggaaccctccccccacccccgggaaaaaaaaggacagaatcaaacccggggggacaacaaacgacccaaccgggg

SEQ ID NO: 45529 - DNA, 285 bp, Zea mays
  Clone ID: MRT4577_141529C.1
aagcaaacgtcatcacgtgtgtgttgctcgatcactactccatcgatctacttattatcgtctgcaaataacgactaagtgcatgcttctgcagcgtgtaacgatcgagatatgcatgcagaactcgatatatatacggcccctagcgccgtacacgtgcgtgcgtgtaagtaaataagagcaaacgtcgtcacgtgtgtgttgctcgatcactactccatcgatctacttattatcgtctgcaaataacgactaagtgcatgcttctgcagcgtgtaacgatcc

SEQ ID NO: 45530 - DNA, 377 bp, Zea mays
  Clone ID: MRT4577_14152C.1
ggcagttctacactcttgaatgcctaaacggggatgtcacatccaccgagaaactctccgccgatgtggagccgcactaaggggggccagtatgtgacctgcttgggaaagcactgggctcatagagaaaagaaattagaaccaggagtgcacgagatacagtgcatcaaaacgttatagtgtttgctgctcaattcaagcgatgttgagcttgatacaccaaatttgcatgcacatcatgaccaagagctcaatgcacttgcatcgcaatacatatgttttctgcaatgtgcgataaatcatccagctatgacgccaaccaggccgcaacactgcaagtttaaacaatttacttgcaaaaaaaacattctattact

SEQ ID NO: 45531 - DNA, 404 bp, Zea mays
  Clone ID: MRT4577_141530C.1
gctgcgtatgtagtttcggcacgactcgctactgcatcttcctcggcgtcctactgctaccatcggcgacacaacatggagcgctattctccagtgaactacggttctatccctactagtcattgttgctgcaatgaaatgggacctgcagaaccacgcaacatctgattgaactggacacagagcaagaacgaaagctgcttgtcagctcatctgcacactccgggactatagtagctatctcaacatggcgccgctctcaacgttctcgaaggcatcaaggccagttctacccctaagcggacactgcaacagtggatgcaatgcatgtaccagccggaggagtgtgatcattacttgatctccacggtggacatgaaagtgctcactctccatctcttact

SEQ ID NO: 45532 - DNA, 440 bp, Zea mays
  Clone ID: MRT4577_141531C.1
ggcaacaaaattctatccctttttattcatcaaaaatagaaagaggcccgccctccaagttaattgccccgctcccccacaagcccggccggccacatgcccccagaagcttattcatggagcaaattattaggtaaattgatggaaaaaaatgtattattcccccgaccccccccttttaattagttgaaccggatcgggtccccgggctgcttgttgcccaaaaaaaggcccaagttcttctccgggggacccccccccttctggttctcggtgaacatggcaaaaacaaagggctccagggggccggcccttttgggcgtcccccggcccacggggccaaagagcccctggttgtatttccccccgttgtcaaccctggccccaaaacccccggcccagggccaaccctttttggacacaaaaaccctgacgttggg

SEQ ID NO: 45533 - DNA, 423 bp, Zea mays
  Clone ID: MRT4577_141532C.1
cccacacgtccgcccacgcgtccggccatggagctgtccgggccaaggtgaccgaccatctggtcgcacaggacaggacgcataggaaagcctatggttgtattgcattggagtcggttaggtgtagagagccccccgacacaagggaaggcgtcaaattttctggtgggttgtagggtgtgatctgtctgtatatagctgtgttggcattcattgtagtgttgtacatacagcagctacttggtcttggtggcaaagagatgagatgaatgagtgtatagaaattaaagttctcagtgcagtgcggttggtgcctgtctgagtttctgctaaaaaaaaaaaaaaaaaaaaaaaaaaaaaaaaaaaaaaaaaaaaaaaaaaaaaaaaaaaaaaaaaaaaaaaaaaaaaaaaaaaaagggggcg

SEQ ID NO: 45534 - DNA, 196 bp, Zea mays
  Clone ID: MRT4577_141533C.1
actgagagcatcttgcggcgatttatgagaagatgggtttagcatgtggagatggaagacaccgatatgatagcacaagattgaagatacacaagctcacagacttgtctgaaaaatatcgtgatgaaggaaaccctacatgggggggggggcactattgtatatcatatacgaaggagatcatagtaggtagccg

SEQ ID NO: 45535 - DNA, 195 bp, Zea mays
  unsure (1)..(195): unsure at all n locations
  Clone ID: MRT4577_141534C.1
caccataacaacatacaacagctttgcctcgatcgagagcatgcatgaatcacaggcgtcgtcgaatcaaanagaagggaagaagaaaatgatgtgtggggtgggggtttggtgcatggccgtcgctgttaaaattgcggacacacgacagttggcgtaaataggacctaggcgtaatcaggctggcacaaacgg

SEQ ID NO: 45536 - DNA, 198 bp, Zea mays
  Clone ID: MRT4577_141535C.1
cgcgttcggcgccaatcagagcttctttttcatggcaaacaacaagagtgtgatatgtcaacggggggggtgacggactggcaaaagaaatatgtctttttgattaaacttaatgtcaaccacaccactctgctatatggtgagctatgatgaggaacttgcagtcccacttcgatatgtattttaaaccaacaaact

SEQ ID NO: 45537 - DNA, 411 bp, Zea mays
  Clone ID: MRT4577_141536C.1
gaaatataatgaccgttaaaagttttttttttacaaccactactatacacccgtgataggttttagacaaggggggtcgaaaaaaaattataaaaagcacttccgggggcgtatcccaatggtgattgaatgtttccataaaactgcgcgcgctttcaaaagggagcttattaactcgttgctgaaaatgtgaggaaccaccacggctaaaaccgatgttttaaaaagctttatttgtaccgccaggacaaaaaagccaccaagccacagatacattcatttgggaaaagccaacttaaagagggccaaaactccaacacccttttttagggtggaaaccccgttctttgtgagataagactaaaacaccttgccgttcctttacaaaaacgttttagttccccatttttt

SEQ ID NO: 45538 - DNA, 122 bp, Zea mays
  Clone ID: MRT4577_141537C.1
tcgcacacgtccgtgccagttccatgttacctcaagctaccctgtatctggcatacgtaggattgtcatcttccacatcataaccttcaacactgacatgcattctttaaatcttctattca

SEQ ID NO: 45539 - DNA, 163 bp, Zea mays
  Clone ID: MRT4577_141538C.1
tcttttttcccactatttgtccctttccttttcttgtccatgatcgaaaaccgcgagcggcttctcttcagaaaacgctgtcccatattcctcaccgcgctcataacacacatgaccatgttcgccaaaccgatgttccacagtcgacgacatcatgcgacag

SEQ ID NO: 45540 - DNA, 333 bp, Zea mays
  Clone ID: MRT4577_141539C.1
ccaagggggggggaaaatatcaattccttatttggggggggggaaacaccccaccacatgcccatagcccaaacaaaatgggcaaataccagggaattccttgataaacccaacccttcagggtctttggaaacccatgaggatttttttccccagaaccaacccccaaaatccccaaagcattttttcccacccccaattttttaagggcatacaaacccccagtggggggcgagcccaagatgcgggaacaaaaaacccggaaagggggggcccctaagggccccaatccttgattttaatgggggtgatttcactcccatttggggcccg

SEQ ID NO: 45541 - DNA, 495 bp, Zea mays
  unsure (1)..(495): unsure at all n locations
  Clone ID: MRT4577_14153C.1
cggaaagaagtttactttattacatcatgatgttcgaaacatccacatagtcattaacttaaacagaatcaaagtgctgaacgaaacatagtacgataagaccttcataggcagttgactaggggtttgccgctaatctactctagaactcatcgaagtcctacaactcttgaaagtcctccacatggccttcatcttctcttgagcaggagttgtaatggggacaacctggtgtttggtgtttaagaaagggtgagtgaaagtcgccaagaggggggtgaataggcgaaacctgaaatttataaactttaaacacgtactaaggccggagttagcgttagaattaaataggagtttgagagatagttttccttgcttagagttgctcaatcaatgcggaaaatgtttgggagcaaactcaaatcaatatgagcaagnggaactttagagagaggaaagaggggaaacanatcaagtgaagatcaatgcaagtga

SEQ ID NO: 45542 - DNA, 554 bp, Zea mays
  unsure (1)..(554): unsure at all n locations
  Clone ID: MRT4577_141540C.1
aggccgccctccttttttttntttgttccgttgaactatctaagaaactcagtaagtaatcctcaagttcaaaaaatttgctgcttctccatctaggatcattatacatagcttcggttgaatgctttccatcactgtttttggaatatgaaagtttggcttccagagcagagcgtgaagatacaggaaacagtgtgacatcctctgcggtaagcaatttcattgcattttccttgacaaatgcagtagcttcttcaagctcattgctgttccgatagaggtccaatttatttagaataaatacaactttcttcttccactgctggacatactgaagaaatccaacctcactttcagttaatggtctatctgatgataggacaaagagcaccaaatcagctcgtggcacgtattcttcagtgagtcgttgctgcctctgaagaaaacatttgttccaggtgtatcaactagattcatttcctttaaaattggaacagataaatagcacatgaattgaccatctggatgcctctcacatcgttncaaagttttca

SEQ ID NO: 45543 - DNA, 454 bp, Zea mays
  unsure (1)..(454): unsure at all n locations
  Clone ID: MRT4577_141541C.1
gagccggccggggcagaaacaaacccaagcccccccgcggggggcggcggaggaccccaaccagacaccaggagagcgaccacagagaggcgaccagcgccgccgcccccccggaggacagcaccaagaaccgggagacagaccagagggccacgccgcaagcaggccacccgccaccgcagcgagaacngaggcggggggggagccgcagaaccacagcaggggggacgagcggagggaccagcncggagcggccgaccgaggagcacgacgccaccgcccgcgaggccaacngccaagagcgacgcggcgcagacgcaggaggcccgcgagaaaggcgccgacgacaacgacanggacaggaagagcaccgccgccgagcggcaccncccgagcgacaaccgaaccaaccngaccacagccgacgaccgcgccaggcaggcgagggagcaca

SEQ ID NO: 45544 - DNA, 225 bp, Zea mays
  unsure (1)..(225): unsure at all n locations
  Clone ID: MRT4577_141542C.1
tttatctaggagccctctanacatttccatcactcgactcgatttcccaaaacatcatgtaatgctgtataccccaagaaatgttccatccgtcccaaactttatttcaggctggaatcaatgccctgcatcactctaccttgctgtcaccattattttatgatatgcaactgatgttttttacatagtcattgcacttgttccccattacgtttgctactactt

SEQ ID NO: 45545 - DNA, 318 bp, Zea mays
  Clone ID: MRT4577_141543C.1
caatccagctgttcttatccgggcgtgggttgtaacacagaggtcctcccactcaatatcttttggcacgcacttatttcgttttcctgctcatttattagaccatccattatatgcgttgttcttttctatgtcattttttgatttatctattctaaccctttcttgctatttgttccattttatcttttttctttcttgttttttttttttcagattattctttttattttttttatttttttctatatttatttttttttttctgtttttcttttctttttggttactctttatattaatttcttcttctttttt

SEQ ID NO: 45546 - DNA, 575 bp, Zea mays
  Clone ID: MRT4577_141544C.1
aagcagtggaacctgttgtcgacccaacagatgtaaaccccagcacatccacaaataacgaggagagaagagaaacaaggaagagacgtagaaggagaaggtccagatctagaaggaataggaaggccgctgttgaggtagatgccgcagcaaacacatgaactttggattggaaaaggcatactccaaacagaagtagagaaaaaagagaataacatatatgcaactacatttgtcattttgtagatgctggctgcataagtaacagttattttcatattataaatggtttccttctgtggacttgattatgtactgtatttacactttatttcctgtaaacacgtgcctgtgttgtagctcatctaaagttcaaccaaatgcgatgaagagggatggcaattttacccgcgggttcgggtacgaatttgtacccgcgggtcttgcctgtgcccgacccgtgataaaatcgggtcgggtacggatattttttgtcgcccgcgggttacccatggatatccgtaaaaactaaaaaactagtgagcatgtatcatgaagacttgaagtgttcccta

SEQ ID NO: 45547 - DNA, 317 bp, Zea mays
  Clone ID: MRT4577_141545C.1
ggggccccccgccggggggggggggggggggggggggccggcggcccctttgtggaaaaaccactcgtggggccgggccgcaatccgggtcgaaccagcgaccggccggaaagaaaaagcggacaccaagcggcgcacaccaagccaggaaaggcgcataccaccccgaggcacgggacacggaccaagaccaccggcaggctgctacggccacgcccgcagccccaccgaagcccgcggacaaaacgaggcggaccgaccacacgtacggcgacccccgacgagacagcgacgagcaccacggccgccaccacgac

SEQ ID NO: 45548 - DNA, 282 bp, Zea mays
  Clone ID: MRT4577_141546C.1
ttatgcaccacgcactgccactgattcgctcactcgcccatcggactgctggcgtcctcatctatcgcgtcttgaccagtccatggctccatgcatgaataacaagggtgtgcgcggatctgtgatgccaaattctatcctcttcaagtgtcgaagcgttcgatcgtaggtctagtattgagcctgtgagcagcacacttactgttgcacatacatcagactctgcttcatgattcatcattatacatagcacaatgcatgcctactgatctacatcatact

SEQ ID NO: 45549 - DNA, 255 bp, Zea mays
  Clone ID: MRT4577_141547C.1
aacttgaaaaaaacgaacccaaatggtaatcctaatggttaagccaaattttcacaatactcacttgctcatgcccttcgacgcgggtgtccaaatacagctggatacaaacacatttggggtgacccagggtgactcctcctcggcagctaccctgctctcgccctacaaaagcttgtaacaaaaggctgtcttgtctgtttgacagaatcaccggaccacaaccaacatacctccacggtttaaaccctgggt

SEQ ID NO: 45550 - DNA, 1106 bp, Zea mays
  Clone ID: MRT4577_141548C.1
cctcgaggccggccgggccgggcttcactctcggcaacggatatctcggctctcgcatcgatgaagaacgtagcaaaatgcgatacctggtgtgaattgcagaatcccgcgaaccatcgagtttttgaacgcaagttgcgcccgaagccttctggcggagggcacgtctgcctgggcgtcacgccagataaccaaacaccccaaactgcctgttcaccattttcgccccaaatctgccgaggggattagccgatcgaagcgtcatcggcggctgcggcaatggcggggctgtcgctgcggtgcggcgactgcggcgcgcagctgcggagtgtggaggaggcacaggcgcacgctgagtccaccaaccacgccaacttcgtcgagtccactgaggccgtcctcaaccttgtctgctccaactgcggcaagccatgccgctcccataccgaggtggacctgcacacgaagcgcacgggccatacggagttcgcggacaagaccgcggaggcggccagacccatcgacctcgaggcgccgcttaagccggcctccgatgatgccacggacgtcgatgcgtcggcctcggcgactgaggagacacaagagacggttgtgccagaggtgaacaaggaggtgctcacggaccttgagggcatgggtttctcgacagcacgtgccactagggcgcttcacttctctggtaaagcaccattgaatgtgctattaactggctttctgagcacaagaggacgcagatattgatgagatgcctctggtaccaactactcaaaaacggaggtaacaaggcccagcctgactcctcagaaaatcaacattaaagcacagcagctaagggatcgtgctcgtaaaaagaaacagcaaaaagacacaagaatggaaagagaaagggagaaggcgcgcgcttgatgtgcgcaggggaacagagcgcgcagccaggacacaggaagggaaggcaagtggctagaaggaaagaatacgaattggaaaagaacttctggaagccaaaagaattgaggagcaaaatgaaaggaaacgcatgatagaactgcgaaaacttgagaaagaggaggagaaaagagctagag

SEQ ID NO: 45551 - DNA, 1405 bp, Zea mays
  Clone ID: MRT4577_141549C.1
ggaaacgcgtgaatcgatggccatgtaaagcggcggttccccgtgcccaatgcctcaggttcctattccatctcgaattcggagtcttctctcgtccctgtccccctccagcaccgccgccgccgccaccgcgccgcaacctcgccatggcacgccctccgtcggcggccctcaagccgccgtatccggccttccaatcccatcccagcgatctcgagctcgtcaacttctatctccgtccctgggtcgagaccggcgtcaagaccggcgcgttcatccacgacgcagacgtgtacgccgctgaccccaactacctcacccgtcagttcgcgccggcggtggcccaggacggcgagcgggcgtggtacttctacaccccgctgcgccacaagagcgtccacgggacgcggaagacgcgcaccgtggccaccggcggcgggtgctggcacaacgaggcgaaagctaggcccgtgtacatggtctccaacgggatgcaccagattgcgcatcgccagagcttctccttcgtcgagaaggatggcggcgtgcgggtccgcacgggttggctcatgatggagctccgcctcgtcgaggacggcgccgccgggcagaaaccggaggaggacggcgccctcgggagtcgcgtcctgtgcaaggtgtaccgcagcccgcgcaaccccgagccaagcggcatcgaagccgcgacggcgcccgggcagaaggcggaggcagacgacgatgaatcttgcgacgacgaatctagcgacgcgacgttggacgacgatgacagctccaacgcgtcactagcggcggcatcgggacccaagagggaatccgacgaggtggaatccagcgacgcgacggtggcggcacctagtcgccatagcgcgccgaacgacgagatctccggccggtccgcggtggcgcccggacgcaaggaaaagacggagatcggggaggtctccaccgagacgtccgcggcggtgcgcaagaggagaaaggccgacggcagcagctcccctggcactccggtttctacgacggatatgcactgccctcagtgcggcacccatctcatgctaacactgaacatggcggagtccaaatcggaaacggggctcgcgaaggacgagtcggccaccgccgcgcctgatcaaggcgggacgggtgagtcttcacagaaggatgttcgggttcggttccatcagttcctgtgagatccagggttccttcctgcccagacaaatcctgggaaacagagccatggtttcttgtctgttatttggaagaacgaaataagaagattttagattaagaattcgttagaagtaaccgtgtctattgctgcaacggtgatgtaatcgtgaaaccaagacataaggcgtacgaatttacacagtcatgc

SEQ ID NO: 45552 - DNA, 1183 bp, Zea mays
  Clone ID: MRT4577_14154C.1
aattaaagacagaaaaatccatcaaagtattactcagttatagatttctgccactgccgttaactccacgttagatgactaaaaaaactacaggacagttcaaaaactctattacagtagagcataacgcctccactccaaccccatttcccttaagcaagacacgtacaaatatcaacctataaaatgcattctgtagcaccatagttgcacacatcatctttcataaaaaaatatatcaaaagtcgcatactaagtttgctaattcatctactcaatgatgagcctctgactgattcctccaggtgaaatagtagccatttttctagttgttacacttgggctagttggagatagagacgccatccttctagtagttacccctgcacttgaatgaggcattggagatggttcaacaactgacatggatgcctgagcatcatttctagaggcttcaacagcttcatcttcatgtttgcttttcctatgaggtattaatgaaagaacacattgcagcacatataagaaacaaaattatcacattaccttggctttttttcctttttttggacgaggtggtggaagctcttgttctaattcagcttgagttgcattactacaatccttctcaacgtgtccaaattgaaagcaccttttgcattgatgtggtcttcgttttcctggctctccactagccttgatcctttgtttcctaggtctaccagcagccctctgtagtggtagaggaataatttcaaacccaacatcaacctttggccatccagacttgtcactcactggattaatctaaaactgatacaccatcttgaacctcactactgaatagtagtcatgcacaaaatcctcaatgtttagttgtctcatgcgctgtttcactgtcccaaataagtatatagcatgagtgcatggtttccctgacaactcccattatccacaaccacattctcttttggcaaggtcaaccccatacatacaagtcttcccttcgtttagtgcagatgatataaaagaaaacatgggaccacttttcttgatatcagagtgcagccatgggctgttcgtgttgagccttcgttaaggactagattctaacaaccatgtctcgtgtgaggcaaggcgcagtcttagaggatagtagactatcttcaggaacaggggcggc

SEQ ID NO: 45553 - DNA, 2010 bp, Zea mays
  Clone ID: MRT4577_141550C.1
gtgcattacctgtcaggccagccacaattgcagagaggatgagggactgtctaagaaatctgaagcaacagaataaggatgatgatgccaaagtgaagagggcattccaaacactgcttacttacattggaaacggtggtaaaaaatctggccagggagaatttagaaaggtcaaggctgcgaatggcacatttccaggaagggtggaaatcttcatccgccccgcgtccgccccgcgtccgccccgcgtccgccccgcgtccgggcggccgggccgggccgcggctaattgctcggggtcgtagccaaacaccccaaactgcctgttcaccattttcgccccaaatctgccgaggggattagccgatcgaagcgtcatcggcggctgcggcaatggcggggctgtcgctgcggtgcggcgactgcggcgcgcagctgcggagtgtggaggaggcgcaggcgcacgctgagtccaccaaccacgccaacttcgtcgagtccactgaggccgtcctcaaccttgtctgctccaactgcggcaagccatgccgctcccataccgaggtggacctgcacacgaagcgcacgggccatacggagttcgcggacaagaccgcggaggcggccaaacccatcgacctcgaggcgccgcttaagccggcctccgatgatgccacggacgtcgatgcgtcggcctcggcgactgaggagacacaagagatggttgtgccagaggtgaacaaggaggtgctcacggaccttgagggcatgggtttctcgacagcgcgtgccactagggcgcttcacttctctggtaatagcaccattgaatgtgctattaactggctttctgagcaccaagaggacgcagatattgatgagatgcctctggtaccagctaactcaaaaacggaggttaacaagcccagcctgactcctgaagaaatgaagattaaagcacaggagctaagggagcgtgctcgtaagaagaaagaggaagaagagagaagaatggaggaagagaaagggaagaaggaaagagtacggaaatgggaaaagaacttctggaagccaaaagaattgaggagcaaaatgaaaggaaacgcatgatagaactgcgaagacttgagaaagaggaggagaaaagagctagagaaaaaatccgccagaagttagaagaagataaggctgaaaggagaaggaaactaggactgccaccagaagacccagcagctgccaaaccaagtgcaccgcctcctgttgaagagaagaagagtgcattgcctgtccggccagctacaaaggctgagaggatgagggattgcctaagaaatcttaagcaacagaacaaggatgatgatgccaaagtgaagagggcatttcaaacactccttacttacattggaaacgttgctaaaaatcctgacgaggagaaatttagaaagatcaggctaaccaatgctacatttcaggagagggttggaaatttgcatgtgggcatagagttcctggagctctgcggatttgagaaacttgaagggaacgagtacttgtttttggcaagggaaaaagtcgacaaggctatcctgaacacagctggagccgagctgaattctgccatcaccaatcctttctttggggtcctttgagtcgtaaaaaaccagtacaatgtatactcaaaactcttggtttctcactttgtttgacatcaactgggcgccaactgtagatttgtaagtctgtggtcggtatctgatttcatgaattattatcagaccggattccgtacattgctgaggcaatctttgaagcaacttgctgcgcatatatgcttgggatctttccgatctcatcgcttcgctgaccttgatgcattttacaatgttctagcaccaaaaataagtgatgtactctgatgtatgcgttttacaacgacttcacttgttaatgacaacccgatcatctttaattatagattaaaaaaaaaaaaactcgagggggggcccggta

SEQ ID NO: 45554 - DNA, 418 bp, Zea mays
  unsure (1)..(418): unsure at all n locations
  Clone ID: MRT4577_141551C.1
ccaggaaaaagccatgattgggggtttaaaacccgttttaaggcccccctgaaactttgggtttaaactttaaaactttgggggtaggcggggggaagcccttgtaaaatgtttttaataaaacaagatccccttgctgggaaaaagttcctaatggggtgtcccattttggctccggggccttgtttttccgttttaaacagggggcccccttgagggggtggtggcaaattgggttgaaatcattggttttttcctgggaaatttttccgggggccggggccccaaccaaaaacccaaggggttcgtnntcttgggtttgggcaacatagcaaaacaagtgggctgatttttaagccttaaaggaagggccatttttacgggccccaacgggtagataacggggggcgggtttttt

SEQ ID NO: 45555 - DNA, 157 bp, Zea mays
  Clone ID: MRT4577_141552C.1
gcggccgccgtcgctgaccttgaaggcctccttcacgtcccgctgcgagaagccgaagctggggggtgaagaacggctagccgcccacattgtctcatgctcaagaagtcaatgcccagctttcaggcgtcattttacccgaacacccccacctggt

SEQ ID NO: 45556 - DNA, 776 bp, Zea mays
  Clone ID: MRT4577_141553C.1
gtctcggctactcctctcgtctctcgccgcctagcacgtgccgccgtcggccccatcgccttcgagcatcagccatggcggagcagactgagaaggctttcctgaagcagcccaaggtgttcctctgctcaaagaagaccacaaaggggaacaataagcctggcaaggagggtaacaggttctggaagagtgttggccttggtttcaagactcccaaggaagccattgagggaacctacattgataagaagtgcccattcactggcactgtgtcaattagaggtcgcatcattgctggaacatgtcatagtgctaaaatgaacaggactatcattgttcgtaggaactaccttcactatgtcaaaaaataccagaggtatgagaagaggcactccaacatccctgcccacatttccccttgcttccgtgtgagagaaggagatcacgtgatcattggccagtgcaggccgctgtccaagacagtgcggttcaatgtgttgaaggtcgtcccggcagggtcaaagagtggtgcggtgaagaaggcattcaccggtgcttgagcaagtcatggcagaatccgaaaccttttcaccatgaaattttgatgtcacatcatctatattgttccatctgtgtgtacctagggttttgtctcgagagttccccaaatttcaagttaagagtgaatgggtttagtgaagttcagagtgcttcgtgaagaagattattgatgcagttacctggttactcgttaaatacatcactcgtttttggcg

SEQ ID NO: 45557 - DNA, 1408 bp, Zea mays
  Clone ID: MRT4577_141554C.1
cattgggtacctcgaggccggccggggcaccgcccacccgtctgactgtctgagccgcctgtctcctcctcgttctctcagcccgttcggcgcaatgccaccgccggcgccgctcttcctctcgctcgcctccacgccacctcctgcgcttatgcccgtacaccaccccagggccccgcaatccctaagcctagtccctccggttgcctcctccagaaaggccgccgccgttcccgcgtgccccgtcgcctccccgcgtcactccgactacttcgatccgcgggctccgccgccgccgcgcggggacggagggtacgggcgccctcccaacggcgcgcaggacgggagggtcttcacgagctacagcatctacaagggcaaggccgcgctgtcattcgatcctaggccgccgctcttcgtgccgctcgattctggggcgtacaaggtggccaaggagggcttcgtgctgctgcagttcgcgcccgccgtggccacacgacagtacgactggacgcgcaagcaggtgttctcgttatctgtgtgggagataggaaccctgcttactcttggtccaacagattcatgcgagttctttcatgaccctttcaaggggcggagcgaagaaggtaaagtgcgtaaggttctaaaaattgagccaacaccagatggcaatggtcgctttttcaacctcagtgtccagaatcggcttatcaacgttgatgagagcatttacatccctataaccaagggagagtttgctgtcattgtatcaactttcaattacatcataccgcacctcatgggctggagcacatttgtaagttcaatcaaacccgaggagtcacggccatacagcaggccgcagtccacgtctgagtacgaatggcgaaggtgatgtgttgatcaactacagcaaaatggctgagacccacactgaagggatgagattattggtattgtttggctgggtaatctcagatgtggttagttgatggatgcctttttggagtactccttttgtttcctttctagttaagcaggcaggtagcactacttgtatccagagtttcacggggcggttggggagggggcatattttgggcagcaaacctcagttctgacatggaatgatgcagtcacgcagcaggggcggttgtgaatctgctccgtaaggccgtggctccagtgatagcgggacgcagctgacagatgctttgggttgctggggaagggttggcctgaaattgttgcttgcatacacgagattattgtgtacatgtagtctgcgactctgcgttacccccttaaagaatgaaaaccctgccgaactgtggtgtttttgctgatgattttgctgaattcaaaagcttaaaccattagaattaaaaaaaaaaaaaaaaaagcggcc

SEQ ID NO: 45558 - DNA, 363 bp, Zea mays
  Clone ID: MRT4577_141555C.1
gcaacaccacgaccacgagcccgtgcttaaagtttacacgcgctggggcgaaaggcaaccaccgcatgtggcttgacggtgacaatgcaagatggcacaggaaaataggaccaggggaccaaactgtatccaacatgacatagaggtactgcggcggatgtccgagcgcaccaaactgaaaacgcagtacctaggatgcatccgggtatgccatgagagatctagtgaaagagcaggaggtgctcaaaaacaagcccaagaggatgaaacacactgtaacacggacgctaaacagggtagtgggtaagacataaaaaaaacactgaacaacgtgatggatcgtgcgaaagtcctgaatggaac

SEQ ID NO: 45559 - DNA, 347 bp, Zea mays
  Clone ID: MRT4577_141556C.1
tcatgcgtgcgcccacgcgcacgagtatgccctgctttaaacgatcaatgcccttagctccagcacgatgtctagcaaccggagacaactcagatgcagtgtaacacagggccatgaaagcgtgacagttggtcgcctgctattaccataaagagagtagcggacactgtccaagctacaacgcacttagacggttctgcaagtggcaatacacactgaagacacaatggcatacaaccggttgtttgctcacaaaaaagcgctataatgtgatgcattgggctcaacatgcatgaaatgaacagagtgactgacaagcttccgagaaaactaaatcaactgggcac

SEQ ID NO: 45560 - DNA, 1153 bp, Zea mays
  Clone ID: MRT4577_141557C.1
tcgcgatctagaactagattacctttgatcccaaacaagccttaaggttgtcgttctaaccatagcgtgcactccttttggtgaatatgatcctggctagagtgctaggcttttgtggaaactgggggtttaccttcaattaaaagggaaaaactcttattatgtttgcactatttactctcaataatacttgaataccttttggaaaaccttaatagcagttagctgaaaaaggcttcaaaattttcaaggctcacgaaagtaagatggttgagaagtacaatgccgttgttagcttgtggagaagagtatcggctatgtccaagggattgcgatatggtgatgcagtaaaacttatgtcaatgcttgaggatgcttcaaatgggttttctagtgctgtgaactccaccatttcaagtctgcaccctgtccaatgcacccgcgaaaggaaggtcgacgtgcagctagacttgacaacacttcctgcttttctagctgtatttttgttgctttggtttcttctacgtccaaggagaccgaagcctaagatcaactgaacaccgagccaatgagcagcataggccatagagtttttgtgaatacgcgcatggattacagatggcgctggagcatggcccgggaattccaaaggtccaaaacaccgggtggcagggaacaaggtttcagaagattgcaatcctgacacatccccaagttgtagcagagttggaatgtcatgaaaactttaattcattcagtcctgtcctcgttccgggtttaaccaatttttcctcgttccgggtaaggccttgttcgtttgtgtcggattggtgggtcggaacaattcccggccggattgcttttttaatttatataaactttgattagccggaacgattccgggggcaatccgacgcaaacgaacaagccctaactgagattaatttgtccctcctgtaatgtttaaccagtcctgccccgatccggggaaatgaaaaattgtctttttcgcaacattaacgggtagcggttagtatcattttccagtcccctggaatgtttttagtacaatccaattgtttgtttcctcccgcttccatgtaaaagtccatacccaagtttttcaaaaaaaaacatgttttgtccttttttt

SEQ ID NO: 45561 - DNA, 659 bp, Zea mays
  Clone ID: MRT4577_141558C.1
gtacccgggtccccccctcgagtttttttttttttttttttttttttttttttttttttttttttttttttttttttttttttttttttttttttttttttttttaaaaaggggccctactcccccccccaaattttttttccaaccataaaattttttgtttttttgttccaaaacccaaaaaaattaaacaaaatttttttaaaaggtttttaaaaaaaccccccccccccccaaaaaatctttaaaaaaaagggggggggggggcccccccatcccccctttgaataatttggggggaggggcgggtttaaaaaaaacgggggggccccgggcgggcctaaaaattttccaaaatccctatgttccaaaaaggccccctgtttccctaaacgggcctaaagggggctcccccccaaaggctaaggggcacttaaatttttggccccccgggcttaaaaacttagggccaatccccaaaggggttcccctggaaaaccccccccacctcgggttggggaaaaaaaaacccccccgggggggtttgggggggagccccatttttttttgcctttttggggcggttgaagggccttaaccctcggggggtaattttttagggatgttctttaaagggggcacaaatttttttcaaagga

SEQ ID NO: 45562 - DNA, 268 bp, Zea mays
  Clone ID: MRT4577_141559C.1
attgcagatccatacgctcttttggcaggtgcttcttctcgtggcagtaagaaatcacatatcagcactggcgctatcgctggaattgcggtaccggtggaattcttgtgattgccctcattgggatggtattatttgcgttgcgacagaaaagaagggtcaaggaagtcacaggacgaaccgaccctttcgcttcatggggagtttcccagaaagacagtggaggggctccacagctcaaaggagcaaggttgttctctctgaatga

SEQ ID NO: 45563 - DNA, 536 bp, Zea mays
  Clone ID: MRT4577_14155C.1
gcatagagataaatgtcacaataatcagagtatttaatacatagcggaagacttattacaaaataaaagaataaatataaaatgaactaaggatcgtcggcgccaatgtcaactgagaaacgccacctagatcagatcatactcctcgatacgtggctcctcctgaatcacctgttcttctcctggcacttgagattccagttaccagggtgattcttcagatcctcgtgaccacacgcagtttcagagcccgcgcaatcacgagagtcccggccgcggagaggtcccgcatccgactggtcctttgtgacatccattgtgctggtgcggccgcgcgcatgcagttgtcgcggggcacggttgctatcgcataggagcgttcccggccgccatcctctgccaagaacagcttttttttttttttttttttttttaaaaacacaggggagattaatataaacaagtaacacccgcattcaaatacatgctatataaacctcataaccactaaaaaactacttaggaacttgatgggg

SEQ ID NO: 45564 - DNA, 1176 bp, Zea mays
  Clone ID: MRT4577_141560C.1
atggctccattgcatgggggcttcagcgcgggaaagtcgggtctccgttgggatttacttgttcgacgttgtgggccgtccggaagtggatattacctctttaaaattgacaacattactgatgaagggtggaatgatgagtccattaatctgggcaagagggcttctgttgatagacaaggatttggtgacctctctcttggtaaatctgttaaaaaggccaaaagtggtgatgatgactctggtagggatgttaagggaaaatcccccttaaaagtatcctccagtcatgtcaatgttgctggttccttgtctgaacaatctgaaagtatgaagttggggaaaggtcctgaaggaaccaaaggttaccttgatagtcagggtaatgatgatgaagaatacaatgaaagtgaggatgatttgttggattctaaggagttggaggaattcatcaaggatgacgaatttattccttctcccgctcaagagaaaaagaaaatgaatataaatgttcctgatgatgctagtaagaatgctggagttaagaaaggaggacctatggaaggtgatctggcagaaggagttagaaggagcagcagactggaatctacggaggaaatgaagattgttgataaggcggatgcaagagctatggctaaagatgcattcatcaataaaggtcggaagcggagggttaaaatccccttcttgaatcatgaaggagtctctgtaaacgatgctgaagttctgaataacaggcttgcaagttgtatcacaaaagtgataagtgattctcaatatggtttcattaaaaacagatacattatggatggggtcatttccctcaatgaaattcttcatgaggttaagaggaaaaatcaaagtggagtggttttaaaaattgattttgaaaaagcttatgacaaatttcctgttctttttgacttggcctatgacaaagatgttaccgttaatgatgcattcacatctaattttgagactcttacttttagaagaaggattgtgggtaatttgaggatgttattcgatgaaatgataagttgttgtaatcaggtgcctttgtctgatcaggaggataaaattgtgtggaatctaggaaaaaaggcttctcagttaactctatgtacaaaaagaaaatggaagaccaagttttga

SEQ ID NO: 45565 - DNA, 595 bp, Zea mays
  Clone ID: MRT4577_141561C.1
ctttttgcaacatgcccatttctcttaaaccgaccagcaaatttgactcacctggatgatcaaagggtcacaacaccttggcaacaaaggctttgactaaactaatgggccttaattttcaaattatctacaagaagggggtagagaacaaggtagctgatgccttatccagaagggcagatttacaatccgatgacactaccctgcaactgcatgtcctgagtagttcctctatgatccctagctggctgactgaggtcacgaaaggatatgaaaatgatgaagttgctcagaaaattcttagtgctttatctacaggacatccgttggagcattatacgttggtggccggggtgatcaagcataaaggcagggtgtggctgggtcacaatcaagatttgcagacgaaggttatgtcttcactgcatgacagtgccatagggggacactcaggttttccggtaacatacagaagaattaaagcaatatttagttggcctggaatgaaaaatcagattcgtgagtttgttggcacttgctcaatctgtcagcaggccaagccggataggagcaaatatcctggaacttctgttac

SEQ ID NO: 45566 - DNA, 397 bp, Zea mays
  Clone ID: MRT4577_141562C.1
agtacgtggaggagcagccatggcttcatcggtggccgccgcggcgagcacattcctgggcacccgcctggcggacccggcgccacagaacgggcgcatcgtggcccggttcgggttcgggttgggcggcaaggcgaaacctgctccgaaaaaaggggccaaaacatcgaacctcttttgaccggccgtttgggttccccgggccctggcccccgaattccttgaagggttggttggccgccaattacggtttcaacccgtcgggcttcggaaggccctggaggaccttcaattccaggtggacttgcttgaacaaaaccttgcccagaattaaggccgccggattattgggacccgggtcgaggtcttccaagtcaaattcaacccgttgcaaccc

SEQ ID NO: 45567 - DNA, 1511 bp, Zea mays
  Clone ID: MRT4577_141563C.1
gtctttccctcgcctctctctctctctctctctctctctctctctctctctctctcgaaacccacgtgaagcctgagcgccgaggcctcccctccgtccaccgatcccgccgctcccctccatccgcattcctggccacgagccgtgaaatcgggatccgctgcggccgctgatcccgacgacgagcccggattcgcccgccggccccatgggtcccgtcttctccggccgcatttgggacatatagccgtcgcgcgctcttcttcctgggtggagcgtccatgaggtggaagcagcagcgtccctagtgccagggtctgtcggctgagtgcgggggagaatgaaaggagtgtccgaaggcctgatcatcgggaccacggtcggggtggtcataggcgtgctgctggctctcgggacgctgctgtgcctgaggcggcgtcggcgttcccagacgcagataaggagcagcagctcgaggagggcgtcgactgtccccatccgcaccaatggcgttaacgcctgcgccatgctctcgaactcgaccacggggcaggagtctccgactccgcgggagctcgaagagcgtgggagttctctgtggatccaagggccaggtagaaagagcgtgatctctgcttctggggtacccagatatgcgtacaaggagctacagaaagctacaagcaatttcacaacattgttaggccaaggagccttcggccctgtctacaaagcagacatgtcttctggcgaggtactggctgtcaaagtgctgtcgaacaattccaggcaaggtgaaaaggagttccaaaacgaggtcttactccttgggcgactgcaccacaggaacctggtgaatttggtcggctactgcgccgacaaagggcagcatatgctactgtacgcgtacatgccgaacgggagccttgcgtcacacttatacggcgaagacagtgcgccactaaagtgggacttgagagtaagcatcgctctggatgtcgctcggggtctggagtacctgcacgacggggctgttcctccggtagtccaccgcgacatcaaatcccccaacattctgctggaccaggcgatgcatgctagggtcgccgacttcgggttgtcgagagaggagatggtcactcgcggcgacggcgccgccaacaacatacggggaacctacgggtacctcgacccggagtacgtgtccacgcggtcgttcaccaagaagagcgacgtgtacagctacggcgtcctgctgttcgagctgatcgccggcaggaacccacagcagggcctcatggagtacgccgagctcgccgccatcaacgccgacgacgggaggaggaccgggtgggaggagatcgcggacgcgcggctaggaggcgcgttcgacgcggacgagctcaacgacgtcgccgccgtggcctaccgctgcgtcagccgcgcgtcccgcaagcgccccgcgatgcgggacgtcgtgcaggccctggcccgctggcggaggcgcgggc

SEQ ID NO: 45568 - DNA, 312 bp, Zea mays
  Clone ID: MRT4577_141564C.1
actctgttgcagcaattgttgttgcaggtttgtaggtgcattacccacagcgagagggctagatgaaagcagttgttgctgttgtaggcagacggcagggttcaccatgactagttgactgagcgctggcagaaactgctgcaattgttgttgttgttgatatgcaaatacggttccctgattaagtatatcggttggatggatgggtttctactgttgttgtgcagagagggcgacgggtctcacctaatttacctgtttgagtggctaggggtggtgcgggtgttatttttcttgagtagcaattttttt

SEQ ID NO: 45569 - DNA, 573 bp, Zea mays
  Clone ID: MRT4577_141565C.1
cgctcgcctgagccagcacatatgcattcaccaacaaattcaagaacgcggacgtgccggggaccctgatgaagtgcgcgccggactactgcaacatctacatcgcggccaaggtcaatgccggcaatgtccggctcgccaagtgctgcgtacggtccatgcaccgtggcgccgacagcccttctgacaccgacttcgtacaggaatccgctctgtacattcaccgtggctccaggggacacggacacctgccggcagtgatgcctgacgccaggcgctctatggacggacgcaataccatgtcggagctcgacccggtcccccagcagcacgggcgctctctccgtcaagtcggacatctacaccctctccgtgctcctgctgcgactactcacaggcgccctacccatggggctcacgcatcacgtcgagaaggccatcgacgcgggcacctttgagcagatgctcgacatcaccgtcaaggactggcccgtcgaggaggcgctcggctacgccaagctcgcgctcaagtgcacggagatgcggcggagggaccggccggacctcgccaca

SEQ ID NO: 45570 - DNA, 825 bp, Zea mays
  unsure (1)..(825): unsure at all n locations
  Clone ID: MRT4577_141566C.1
gcgngagcagccaataataaaacgggcgtgcccacatctgatggagaaatatgatgatttcaatgagtttttctggtctcataagtgcttccacctacgatggccttggaacctgagcgacccgtttttctcgaagcccagtaggaaatataagggcttgctcagtaggaatcatcacttacggaaagacatcttttgtggaacataggacttttcttcatctttaccacagctttcatcgcctttggatgttccttattatgatgtttcagggactgactatcattgctttcaatgatggtagttttgacaggaagaccatattgcaacttcttagtctgggtcctacttatgtcgtaatgaaatttattgagagtctattggatattctaatgatgtatggtgcctattcaacatctcgtggatctgcaatcaccagagtggcatggcgattctgctggtttactatagcttcagttgcaatttgctacctatatatcaagacacttcaagatggcacagagtcagcaacattcaagatatatgtttttgtaatcagtgcatatgtgggcattaagataattttcagcctacttatgagtgtcccttgttgccatggtttggctgaggcttgctatcgctggtctgctgtacgccttgttaagtggatgcatcaggagaataattatgttggaagaggcatgcatgagagtcaccttgactatatcaaatacgccactttctggattgcgaatcatggtgccaaattttcattacactattttcttcagataagcctcttgtagaaccgacaaggactataat

SEQ ID NO: 45571 - DNA, 119 bp, Zea mays
  Clone ID: MRT4577_141567C.1
tctcactttattacgctttttctacaaacgtatgctacacgctgcccgcttaagccgttgcggtggttcccattaccacaacttctgcttgagagtcactttcccttagcccaatgagg

SEQ ID NO: 45572 - DNA, 413 bp, Zea mays
  Clone ID: MRT4577_141568C.1
cttgtcgtcgcacagcctcgcggtgctcgcgggcggcgcgctcctgggcctccttctcgcggcgctggccgtggccaccacggacgccaggtcccctccgcgcgggcggaggcggcgcgtgccgtggctcgccgcggggttcgtgatgagcgtgctgtgggcgtacaccctggcgcgcgagctggtggcgctcctggtggccatcgggtacgtggtcgggatcaagccgagcgtgctgggcgtgacggtgctggcgtggggcgactccctgggcgacctggtgtcgaacgtggcgatggcggtgcacggcgggcccggcggcgcgcagaccgtcgtgtccgggtgctacgcgggcccgctgttcaacacggtggtgggtctgggcctgtcgctggcgctggcggctggcgcgc

SEQ ID NO: 45573 - DNA, 200 bp, Zea mays
  Clone ID: MRT4577_141569C.1
gacaacgattcatgggtagggaatatatggagcacttataggtagagggctgaacagtgtaacacatatcctttggtcatacataattggctgatatcatggtattactggtcagatccaaaccttaattgttttattgaagccatgtaggtaatttttaacacaacaacaatttcatatttgacctattgaattttttt

SEQ ID NO: 45574 - DNA, 508 bp, Zea mays
  Clone ID: MRT4577_14156C.1
catcgttctccccctcgcgcagcaacaacactacaccgatggggcgcagactgcccgcccaacccctgctgccacgactgctcaagcatctggctcgacgatgacgatggtactggaaagaccaccttcatgaagcgccacttgactgtacatgtcaagaacaatacattgccacgctcatcgtcgaatccacccgctcgctttcgccaccagccttggccccatccagttcgatgctctgggacactgtagcgacaagatgaactctggtggactccgagacggatactacatctacggcaatgaaaaatccacatgtgtgacgtgacttcgcgaatcacatactacaacgtccccaattggcacccgagtcttgtcccgagtctgcctagaaccttgccttcgaccagacactggaacaaggtcgaccttaaagagagcaaggtccatgcaaaccccatcacccttccaccttaaaaaaaactcctgaactaacacatctctgcca

SEQ ID NO: 45575 - DNA, 1888 bp, Zea mays
  Clone ID: MRT4577_141570C.1
ctaacaatggctggaggattaccgtcacctcaatctgccatgcctgctatgtcagagcggtttaataatggaggaatgggaagggatctgatgattggacagcctacaggcagtgaagtaggtgattgtgaaacctcatatgaatctcggggtccgagttcaaggaagcgtaaccttgaggaaggtgggagcacagctgacaatccacaagataggctgcagcatgctgatagcatacaaggaaatttcattgatcgtgatggtgaggaagttgatgatgctgcacaggattcagatgtcccgaataagaagtcccgtgggttcgatctgtttgatgcctatcgtccttcctctggagctgggcccagtagaaattttgtctttggccctcatgaggatgctggtatgttcagtcactcaagagcaattgacctggcagctgttgagcgtccgactgctagggattcactgagagcatcttctgttattgcaatgcatactattcatacttccgaggaagattctatggagagtgttgagtattacccaggtgatggtaatgatatcgatatgccttcttctagtacacaaaggaacattgaaatgaatgatgccttggatcttaactatagcaaccaagcacagcaaagtgctaatgcacatgctggtgctggaagcgatgcaagagaaattggaggaagcagtacaaatgaaggggaggaggtcattaatgctgaaacagttcccccttttggaagggatcaacttagtttaggaattagtggtggtagtgttggcatgggagctagtcatgaggctgaaattcatggaaatgctggttctctgcacagaactgagagtgttgtaggtgatgctgaacctattgccgagcttactgagacaatgggtcagactggtgaatcagctccaggacctggattaatggatgaatttgtacctgaggtagaccgagatgaacctcatggagacagccaagatacggtgtcccggtcagttggccaagccgacagtggatcgaaaatatatggctataccaaagctgattctgttgaaagtggagaaaagataggtcatgccaccggtaatggaagcagcatgcgtccttctctttcttgcaacgcagggatgtgtgctggttttgatctgtctaaagatgatgtgacacatactggcaaaatactaactactgatgatgcattaatggggttagattatgatcctggaaatggattaggagctactaatggagaaaatgactatgaatcgggtctgctggaatttgatcctgttaagcatcacaatacttactgcccatgggtgaacgggaatgttgcagcggcttgctgcaacaacattggctccagctcaagtagttcagcgccctctggttggcagctaacaatagatgcagtcgacacgtaccaatcacttggtcaagcccaaaatcaaataatgcaatctgattctgcagcttcattatatatgcaggatgaccaaataactcataaccgcaaggtagggagacggccttctgtgagcagaagctttgggaagtgctgatcggaactcctgtagctcaagtgtttcctagacagaaacagcattacagaagttccagattggtgtaacaggagaaacaaaataatgatagtctcagtagattgttatcaccccgtgggtgtgagcttatagctgttttatgttgttgcatattgatacatcatatatatgtgtatttatattccgaaagggtttattcaacagtctttcatttgacagtaacattttcaagcgaactaggtacattattatggtgagattatgtaaacttcatattcatatatttatcgccgttcttgttgcgtcc

SEQ ID NO: 45576 - DNA, 191 bp, Zea mays
  Clone ID: MRT4577_141571C.1
aattcggcacgaggccgtgtgccggtctccgcgcgaggccgccgccctttctgcgccatctattctgttgcgcgtcttagtgcacgcggcgccccacttgccgcgtggccacagccacatccagacccagtcctggtccttccaggctcaggagctggctggtgaccatggaggccgtcctaagatggggt

SEQ ID NO: 45577 - DNA, 186 bp, Zea mays
  Clone ID: MRT4577_141572C.1
tttttgtgttttttaaaattttttttgggtaaacaacaaacaatacgggagttcctcccaagtccacggcaccttacgattcctccttctcacgagcaactggactggcacaatcgtcacatccccatgggggccggcacacacccaaacggtccttgcaacagggtattcctagatcatttctta

SEQ ID NO: 45578 - DNA, 300 bp, Zea mays
  Clone ID: MRT4577_141573C.1
acccgtcctgattgggggaattttctttttaacaaccaccacaaaaggaccatccaaccgcgggataaagtttaagcggacacaccggaccaactgacgataactctggagagcaactgggccagccagcaactgcagcacacttaagactgacaacaaaccgcttagtccacctcctcgatcttggggccagggccgccgatgccggcaggggcatcctcgtgcatgccgacagggccggccatgttttgaaccacgccctgatacatcttgaagatgatggggttgcaaatgctctcc

SEQ ID NO: 45579 - DNA, 569 bp, Zea mays
  unsure (1)..(569): unsure at all n locations
  Clone ID: MRT4577_141574C.1
ctcttgtaagtggttgagaagtgggaaaaacttgtatgcaatgaatggtggggtggtctccgncctccctcacccacaaattatgagcggaagccttggatctcgtaccccaccctgccgccgccagccttgtctgcgtatacggagcagatctccaccgagctcgccgcgcactccggactcggatactaggacacagaactcgccctgaccgtgggactcccgtgctccgaccccggccgatcctccctgttcgccgagccttcctacgatgcgccgaggttccaagccgcagcctggagacgagcacgacattgaggtggtaccacaagaacgcactcatctactgcaggaaggtcagcacgtcagccaagtttaagaaggaggacgatcacggcacgcactaactgccgaaggtgtaccaccaggcgtacggataatacgaccagctgactcgtgctctccatgacaagtatttctcccacttgaacatgaggaaattccactacgacgagaggaagctggacgacgcaatgaacgagacggagtacgttcctactctcgatgac

SEQ ID NO: 45580 - DNA, 352 bp, Zea mays
  Clone ID: MRT4577_141575C.1
acccaccggggggcgcttctaaagggcccaaccccggcccccagggggggggaaaaaagggcaaagggggggcccgcaagaaaggggtacccccggacaaaccccacagcggaagaaccggaaacccgatcccaaagccaaaggggcccaaggaggaagcaaacacaaaaaaaacggggggggctaaaagggggaataccgggggggaaaacgggggggccaaccgcaaaaaaaaaaggggcaaaacccggggggaggcgggtaggaaaaaaggcgcccccccccgggcaaaggaactgacccaatgggcccggaaggccggttgcggttaacggactcccccccctccaag

SEQ ID NO: 45581 - DNA, 243 bp, Zea mays
  Clone ID: MRT4577_141576C.1
gaaggctcccacagcgtggcctcttaacgccgcacgcctatgtgctcccggaagctgccggccttcctccaaagtgacaagaacgtcaccgtcatggacatcaacatggaaggtcgccaagggttcagttcgtggtaccaacaggcgataaactaaagcgataagggcgtagagatcccatacgacatattcgtcaccgtctccgttgctctgcagctcggatcagtcaacctcagccatatt

SEQ ID NO: 45582 - DNA, 2341 bp, Zea mays
  Clone ID: MRT4577_141577C.1
ccgggatcgaacaggaatagatccaacccaccctagctttgcagatgatctatcaactgatagttatccagtacctgctcactactctggcatttgtgaggttacaaatgatttcccatctggatcctgcaatagaaagctcgtgggggctcggcattttgcagcatctgcaataactagaggagtcttcaatgcgtctcaagatcttgcttcaccatctgatagtgatggccatgggacgcatacggcatccattgctgctggaaatcacggaattcctgttgctgtgtctgggcatcaatttggaaatgcaagtggcatggctcctcgtgcacacattgctgtctataaagctctttataaaagctttggtggttttgctgctgatgtagtagctgcaatagatcaggcagctgaagataatgttgacatcataagtttgtccattactcctaatcggaggccacctggactcgcaacattcttcaatccaatagatatggcactcttgtcagctgttaaagctggcatatttgtggtgcaagctgcaggaaatactggcccttcccctaagagtatgtcttcatacagtccttggatatttactgttggagcttctgcccatgacagggtatacagcaactacgttgtacttggcaacaatttgaccattcaaggagttggtcttgcccctggaacggatgatgattgcatgtatactttagttgctgcgccgcatgcactgaagaacaatacagtcagtcctactgaattgtcctttggggaatgccaagattcgagtcgcctagatgcagatttgataagaggaaagatactagtgtgcagctattctataagatttgtgcttggtctttcttctgtgaaacaagctctagatacagccaatgatgtcagcgccgcgcgggctgtagggtcttgccacgcgtcggttcttgggtttcaactgaacccaactccaatgcacatgcctgggcttataataccatcatctgatgactctaaggtatttctcgcttactacaacgactccctagtgagagatgagacatcaggccaagttgttagctttggcggagttgctaaaatattaggggggctaaatccagattatggaaattctgcaccaaaagtaatgttctattctgctaggggtcctgaccctgaggacaatacactgtcaaatgctgatatcttgaaacccaatctagtagcacccggaaattcgatttggggtgcttggagttcacttggattggattctgctgaattttctggtgaaagtttcgcgatgctctctggcacaagtatggctgcaccccatgttgctggcctcgccgctctaatcaagcagaagtttccttcttttagcccagcagctatagcttctgcactgtctacaaccacaactcttagtgacaggcaagggaaaccaatcatggcacagcgaacatacagcaacccagacttgacgcagtctccagcgacatcttttgatatggggaatggctttgtcaacgctaccgctgctttagacccggggctcataattgattgcagctatgatgatttcttctcctttctttgcggcataaatgggtctagcccagtcgtgaaaaactacactggcaacagctgcgtggcctccaccatgacaggagcagatctaaacctaccatcaatcaccatagccgtgctcaaccaaacaagaaccataacgagaacggtgatcaacgtggccgctgacgagagctactctgtcaattacagtgcccctaatggaactgcagtttccgtggtgccgacgcaatttttcattccaagcggacagaagcagctcgtgacctttgttgtgaacgccaccataaacagctccactgcgagcttcgggaacgttgggttccagggtaacaaaggccaccgggcgatcatcccattctcggtgatctccaaggctgtgtacagttcctgatgactgatgagccgagctgatgcagtggatgcaaatgcaatgcagaccagggcctgactgatccagccagcgtatgcagtggtgacttaactgcatggagccatggaggtggagcttacctttgactaggatttttttgttgttggttgtggtgtgtacactctgaagcatgttgatgtaagtagctgagtgattaaccagtaactgtaaaaagaatgtactaccagaatgttgccatgaatgggaaaaccttctgccaccagaatgttaaacagcactgtgttggggccgccgatgtgaatgtgcagtgagtgtgataaaaaaaaaaaaccagcacccgcaggagcagca

SEQ ID NO: 45583 - DNA, 1448 bp, Zea mays
  unsure (1)..(1448): unsure at all n locations
  Clone ID: MRT4577_141578C.1
ctgtcatctagatgtgtgacttgtcaagactggtaccatggctcctgcgtggaaaacctgtctgctactacacaaacgacaattgaatggatgtgttcattttgctcactcttacagagtgaggaccaattgaagaaccaactatctgtaaagatgtctaaaggaaactgtcctgcacttgccgcccctcgtccgctcatctcttctgcaaagggtttatacactgggattgaggaaattaatttgctaaaagaaattgttgataaggctcgtaacttgaatgcctacttgatgcaaattctggatgattcagactgttatcatggagaagatcttactgtcatattcaaatctcttttagttgctctcaaggcgacatcagcttctggcttgtatgatgacaatgtcagttgcagaattgagtctgttttgagcagatatttgtggaagaaacaaatacataaactattgtatggtggtaaaaagtcatcgattcaagaagtactgtgccttgatgaagagggttcacatttagagatatgtgatcaagatttcttcaagttggagattagtaaaataaaggaaaccagcctgcagtggctggctaaagcagaggaggttgcatgtgattctggtgagcttgcactggatcttgtgtatggacttatagctgaaggggaaaatctctctgtagactttgagaaggaactaaagttactgagggatcgcagtgtcctctactgcatctgctgtaagcccgacgataacagggccatgattgcatgcgaccagtgtgatgagtggtaccattttgattgcatcaacctgcttggaccccctccagaaagcttcttctgccctgcttgccatccaaacaatggtgaagaatctgtatcacttgcacgctcagaggatgatgaggatagatcaagcactggagccggagctcacacgccgccggacagagtggtggagcgagacttaataaagcttcttagctgccatagcggtagctcatggagcgagagcagaagggctcctcatcgaacagctagaaggcgtagtagtttcgtcggattgttatgatgtgcaggaaccttcttagcaccgtgaattgattctttttagttaggttagaagcaggaacgatccatcatctgctgttgtaatttgtagctgttgacaggaggtagatgtagcaaggcagagctgtaagaacccattattattgatcttgtagcagtctgaggttttggaaattgtatcatatactaccgccgttcttgaatatttgtcgcctattgtttcaaaaaacgacaaataaaaaaattaaaaaagaatggagagtatttttatgctgctgctatgcacggctcataaaaaaaacaaaaaaaaacctaacaaaaaaaanaaaattaactccaaacacatatatttggggcggccgt

SEQ ID NO: 45584 - DNA, 342 bp, Zea mays
  unsure (1)..(342): unsure at all n locations
  Clone ID: MRT4577_141579C.1
gacacagaggccatcacaaatgtggaaccctcattatttctgtgtcacctcacttactctgcatcgtgggcgttgtctgtcgtcgccatgggccatgcacnngcagctcggtcagcttgggcggcaagctccttggtcaccgcccgtaaccaaggacgcgttccaacctccttttacagtgcgcccttaaaggacggccacccgttcgtcctcaacttaagtagcccgtcttttcgttggccacttccgcaacttcttccaaaaccaacaacggaacgttaaccgcaacgttttcggcaaacgcaaccaacggcaaaaacccgttgttcccggcttcttttt

SEQ ID NO: 45585 - DNA, 464 bp, Zea mays
  Clone ID: MRT4577_14157C.1
gggtacctcgaggccggccgggcagactcatcgccgtgccgcatactgacatgatacgttgcgccgtcgccgaatccgcacatcatcggggagaagaaaccacaccactctactgacacccgacgagcagagatcattttccttcactcatgggcaaggacaacactcacatcatcttgtggtgattgtccatgtcgactctggaaaggctaccacccctgaacacctgcatctacaagcttgaagggatcgacaagcaagtgattgagaagttacagaaagaagccgcctagatgaactctcggacgttccagtatgcatgcccgcttgacaagctcaaggatgagcgcgaaatacgaattacaatcgatattgccctgtgcaagttctagaccaccaactacatactgcactgatatcgatgacccgagacaccgtgacttcatcacgaaatgatcactggc

SEQ ID NO: 45586 - DNA, 804 bp, Zea mays
  unsure (1)..(804): unsure at all n locations
  Clone ID: MRT4577_141580C.1
ccggccgggacgccggcccggactatgggaccgtcaccattgtgcgccttgggtgctcaccgtggcggcgagcaccatgacccggcgcgtcgtctccaggatcaggctcggcaatgggctggtgatccaaggcgaggcgggcaggaggtacaagggcctcaaaccagcgccgctcatctacgtccaaggcgtgttcgaagacggcgcgctcaacaccgtcgacgtccgcggaaagatcgtcttctgcgaccgctccgaaaccgccaccatgcgcggcgagatggtccgcgctgccggcggcgtgggcatcatcatgttcaacgacgcctccgagggcggtgtgacgaggttcctggggaacgtgtccatcgcggcggcgcgcgtcagcgaggccgacggcgccaagatcatgtcctacatcaactccacggcgaaccccaccgccaacctccacttcaccggcgttatgctggacccttcctaccagccggccatcgccgaatactcctcacgaggcccctgcaacatgtcgaacctcggcgtgatcaagcccgacatcaccgggcgccgccggcgggaacggcagcgcgcccagccacaccttcggcttgctgagcggcacatccatggccgcgccgcaccctctcggggatcgcggccgtgctgaagcgagcgcgccccagcgtggtcgccgtctgcgatcaagtcggcgatgatgacaaccgncgacgtgacgcatccggatggcacgcccatcacggatcagatcaccggcaagccagcgggacccctcctcatgggatc

SEQ ID NO: 45587 - DNA, 2609 bp, Zea mays
  Clone ID: MRT4577_141581C.1
ccgggatgcctcgctgttggtggaccggaccgttgctgcacacctgtttgtcacaggcaacacgcgtctccgtcctcccacctcactctagtctagtcttctcccccagcagcaaaaatggtaaaaggtttgaggtctgcgtgacatgtgaagaagagagagtgctccagcattagcctttgctctcgtctgctcgctcaacggctacttcctgcgtcgccgtggtgctgggtttgggagactgggggaggcggattgtaggaagagctggtgtgtggtgcggtggtcaccaaagagcgccggaaccggagcggcgatgggctgctgccagtcgcggctggagcggctggaggcggtgtcgcggtgcaaggctcgccggcggtacaccaagcacctggtgcaggctcggcgggacatggctgcggcgcacgcgctctacctgcgcgcgctccgggccaccggcgcctcgcttctacacttcgccagcgccgaggccgaccacccgcacccccattcctccgcggcccaccacgagccgccgccgtccccaccgccgccgcctcccccgccgccgctcagcccctccacgacagccaggtcctggacgaccaattcctcctcgatctccgcgtccgcgatcttgcctcctcccccgccgccgccactgccgccactgccgtccagctgggacttctgggaccccttcgcgccctcctcctcccgctccgctgccgacgacgccgactgggacgacgccgccaccaccgtcgtcgacgcacccatcgccgcgccgccgcccgtggtcacggccgctgcggcggtggccgcgcccccttccatcgtcaccgccaccaccacctccaccactcccagcgagctcaccgtcgttgcggtaccccgcggcggcgccgggaagaaggacctcgcggagatcgccaccgagcttgatgagtacttcctcaaggcagccgacgccggcgcccgcgttgctgcactactcgaggctcccgtttgcgagccccccgagcccaccaccaacagcagcctaccagggaaggtacttagttacagcaagagcttgaagcccatgggatgggcatggggcggcggagggtatgggaaaggtaacgatgggttcacaaggttcgggagaggagacggtggaatgcccatgggcaatggcggaggcggtggaatgctcagtcattcatccaccgtggagaagctctacgcatgggagaagaagctgtttcttgaggtcaagagttacgaggggtataagcaggagcatgataagaaggtcagtctgttgaggaagcaagaggtgaagggtgtggattacttgaagatggagaagaacaagatggagattgagagcctggagtccaagatgctggttgccaaccagtccatcgagaccaccacttctgagataatcaggctcagagaatccgagctatttccccagcttcttgagctgattgctggcttgatgagcatgtggaggggtatgtacgagtgccatcaagttcagacccacatcgtgcagcagctggagtacctgaacaatgctcggaataccaacccgacttccaatggccaccggcaagcagctcttcagctcgagatagaggttgacaggtgttattcagccttctgtagtctggtgaaatcccagagagactacgtctactcattgaccggctggcttcgtctatccctgttctgccaccacgacccactgactaaagctcagaactccgatatctatggcttgtgtgaggaatggcagctagccatcgacagaatcccagataaggtggcctcggaagggatcaagactctcctgacagtgattcatgctgtcgtcattcaacaagctgaggagcataagcagaagaagagggcggagtctgcattcaaagagtttgagaagaaggcagaggagctgagagccctggagtcaaaatatgtcggcgctgaaggttacagagaaatgtcacgaaaatcatcggtagctgacaagcgggcgaaggttgaggctctgaggagccgtgccgacgaggagaagatcaaatacgagaagagcatcggggtcaccagagcaatgaccctgaataacctgcagactggcttccctaacgttttccaggcgatgacgggcttcgccagcgtgtgcatggaggcatttgagtcggtgtacaacttcaagcggagctcggacccgaagaggctgctgacctgaagcaatgttgtataaaatgtatacagtcctaggtttttagtaacaatgataccttgcaacctttgtctggctgttatcaggttctaatggcgcaaaaaaaaaaaaaaccccgtcaagttcaattacaccaagtaattgaaacttgaggccttgttttcctttttggttgagataatctcttgcctcggatgcaggttccaaaaggctcagctttgttttttcaatcggaagaaggtttgaactgtttgtttgcttccagcagctaatgacctgttgtttgtagcttcatgtcacgagctgagacttggatgggactggtaactgtagtctgtgcaattcagaaatgggccacacctgttgtttt

SEQ ID NO: 45588 - DNA, 442 bp, Zea mays
  Clone ID: MRT4577_141582C.1
tcggaacacactcaatccgcaattcacatccctagaccaaccctagactaccacagttatgaagaccacctttgccacctttgccatccttgcagcagtcgccgctgccacaccggctaagcccatctgcggttgcttcaaatgtcccagcggaatgaacactcttcccaccgttccaaagggtccaatcaactgccaggtcatgaacccgattccccttgtcggcgacctctggacttgcacatatgaccgggctcagggcggtttgaccgataagaccggagcgggaaatgatgtttgcccaagcaaggcaacttgcattccgggttgtctggagtgaagggcatcggtcgtgaccatgcatgagcgttatatatatgatacaaatatgattactgtaatgttgtcagcattttaatcacaatgttggggtccgagcggc

SEQ ID NO: 45589 - DNA, 209 bp, Zea mays
  Clone ID: MRT4577_141583C.1
aaaggctttagagctaatgatcaacatcacgtaggaaacgacttcaacttcgcatcggaagatggagagattgcatagtcttgaggaggaacacatgaatgctcttcagagagcacagaccctggatgaaactcatgctgctgacctgtctgaagaggagattcatgaggatagcactgaaacatcctctgatactcatatctaaacaa

SEQ ID NO: 45590 - DNA, 475 bp, Zea mays
  Clone ID: MRT4577_141584C.1
ttcgttgaccatcaagcaacataacaggtggtttctagtagcgacaatagcagcagcaatggagaccaagatgtgagccatccttatgctccttgctctatcaacatgtgttgctagcacgacaattgtcactgaatgctcacaggctcctatagctaccctttatacgccatacattacatgaattatagatagagtatgcgaaaacccagctctttgatcatataggctgcaacaagcaatagcagcaagcaacatacctttatcggccttgatgcgtaacaatcgccagccctatctttggtgcagtcataggtacaaaccatcagggcacaacaggtgaaacaactagagctacctgtgatcaaccaagtggctctggcaaacctttatgcctactctccgggacaacaatatcttccattcgaccaactgtctacactgaaccctgctgattatttgcggcatcaactat

SEQ ID NO: 45591 - DNA, 397 bp, Zea mays
  Clone ID: MRT4577_141585C.1
tgttcttctccactgtacgcaccggcaatgtgaatgagttgagaaattcatggcactccgggtggtggccagtgaagattgccctcttcatggtctgttctctcatctctgtcttggctccatcctggtggatccaaatctatgttatgaaacattgtagagtcagaagacgacgtaccatatgggtatggttttttccattttgccttcgcggcgggctccatgtacgtcaggatggtgtttgtcggctgggacacacatcatacaatgaagcaatggagcgtggatattgggtggatgagcacgtgggttcatatcgccaatgaggctctcgtagtagtattctacatagcaatacttgctgctagaattttcggaataggcttgctccgacatc

SEQ ID NO: 45592 - DNA, 358 bp, Zea mays
  Clone ID: MRT4577_141586C.1
gttcacccatctatcggaggcaaacaattagttattttttttaaacttctacacaactggaatcaataccccacaggggccatgataacgccaaatgtacggacacaaacaaattatgggcatccatttccattaaaaatgctgactgcatcatggtgaacacacacacctgatcgaaaaaggtcacccaaatcaaccacacacaggtagaggtcgaaatggacactttcatttacatcggcatccatacactgatcacccctggaaacaagtcgtgacaaaactcatagccccctcctgtgaaaaatacttatattttcacacttacataataaatactacccaacaacaaaaagta

SEQ ID NO: 45593 - DNA, 1041 bp, Zea mays
  Clone ID: MRT4577_141587C.1
tcttcatgttataactaatgtctcatttggtttcgatgctcacatctggttcagtgttggaatctgggaccttccccgatcctcattgcccctgaaatctgattagcatgacttattttttgctacaatttctttggatctttttctttacatcctactagaacttgatgcacctttaattgaggtgtcagcaaatcctggggatcatttgcttgcagtgccaagttagcggtatttgtataggtaaaccctctgtgaatgaatgcagaattcaggttataggctggatgcgatttgagctttaaaagagattgctttttaacaaactgaacacctgcactcacaggtgctacataaataatatgatttcatttagtcgagtcctgtatgttctaaaatatccttaagccctgtgctagcatcttgtgtttgttctatttcaaagatggtttttactgttctttgctgtattgcttctatgcatattctttagagccgtgtgttaacttgtgctattgtgcattgcagaagctagaaaaggcgaaaaccgaagattgaaaaagaccagcaagcagttttagagagcagatgaaaggcgggcatttttgttgatgtcttatctttcgtgtcaattgtgtttttgcttgtcccgtagacctttcaggatatctggagtgtatcttcaagtatgtgatatatatatatacgattcaagaacctgtctgggatgattattcatctttcgggacacgtcctgtttggatcattatataacaacatcgcaaatgtcttgtgtatgtaacattttttactctggaactgctaatgctcagttaagaagtggggacacgtgtgtgtttttcctcctttgcagccaactttcatgacatctcaaatactactgaagtagtattcgtatacaaggtgaaacatctgagaaagcatgtgatagtattaagcatcaaacattctagagaagaagaccaaagaccagttgtaataagtgaaaattttcagttcctgaagatgatttattttaaa

SEQ ID NO: 45594 - DNA, 276 bp, Zea mays
  Clone ID: MRT4577_141588C.1
aacaaaacataacccgactagtgcaagctactatgaggagagcgaggtatgttgtgactgtgcgtggggcatcaaaaccaagcgcgatccctagtcgtggaaagtataaaccaggcatacgattcgatcgtcgtctggcggtcttagtagtagcttcttattttgcagcgggcgatgaaagaatggtgtcatgtaaatgtagctccagtcgtgtcgcattcttcgatttgttgcctcagcagcaccgggtgtaacatggaaaaatcccatctttat

SEQ ID NO: 45595 - DNA, 761 bp, Zea mays
  Clone ID: MRT4577_141589C.1
cactcgaggccgcgcgggcccggccgggccgggaagaaatccccattccaagcgcgagggttttgctgctgctccagccggacccaggacaagaagcggcgcgatggcggtgggcgacctggcgttcaaggcgctgacggctgggctgggcgtcgccacgctctacctcgccgccaccttctccgtcaacgtctaccgcggcctctcgtggcactccgagcagtccaagctagaaaaggcgaaaaccgaagattgaaaaagaccagcaagcagttttagagagcagatgaaaggcgggcatttttgttgatgtcttatctttcgtgtcaattgtgtttttgcttgtcccgtagacctttcaggatatctggagtgtatcttcaagtatgtgatatatatatacgattcaagaacctgtctgggatgattaaaaaaaaattcatctttcgggacacgtcctgtttggatcattatataacaacatcgcaaatgtcttgtgtatgtaacattttttactctggaactgctaatgctcagttaagaagtggggacacgtgtgtgtttttcctcctttgcagccaaaaaaaaaaaaaaaaaagcggccaggcctacatgacatctcaaatactactgaagtagtattcgtatacaaggtgaaacatctgagaaagcatgtgatagcattaagcatcatgcattctagagaagaagaccagttgtaataagtgaggattttcaggtcctgaagatgatttattctt

SEQ ID NO: 45596 - DNA, 564 bp, Zea mays
  Clone ID: MRT4577_14158C.1
cctcgaggccggccggggtatagcattcccactaaggactaagctaagcttgatatacttactacacaggcccggcatatggcctctcataatctgaatttaccatggccccctgatctcttctgcaagcgaggaacgcgcaacttgttctttgatggcatcctcgtcgccactggcgtagcgtcgcacgacgaagaacgagaacacgacactataaggatcatcaaacaaccaatcgaccaagagacctcaggatgaagaacctctgacacttgaccaagtacgtagtgcactccagggagataacggtctctaccttatagctcaccaaggtttaaagccatccctacctgaaatttctctcatcacatattggcgacccgagtgagaggatcaacacctacaaccacaaggagaacggcaaataaacggagcgcttcaactacaaccatctaccattagcctctggaacacaaagccctaactggatctgggccgatgcctacgactccaggacccacaactccgacaccttgaccgagctcatcaagatctgatcacgat

SEQ ID NO: 45597 - DNA, 368 bp, Zea mays
  Clone ID: MRT4577_141590C.1
atccaataagcaatttgccaattctcaagtgtgcaagttgcatcatgaatagagtacaccaaaccaaaagtgaaggacgccagtgtaacatagtactggagtacaccaaccaaaaacatcataactaaccattagttggatcgtttgaatgtctctaaataattttagcagctaactattagctctaccacatttaaacagggcatcaacaagtgaatgatttacaaggtgaatgttttactgcactgcagtaactgggtatcttaccttgaaaacatatggaaaggtagttttcccctggcacacaaactgcgcaccgacttagaagaaaaggtcatacgtgaagaacaacatcaagaacgagaagc

SEQ ID NO: 45598 - DNA, 260 bp, Zea mays
  Clone ID: MRT4577_141591C.1
tgcgacgagatcttcaatctcctggacggcggcgcgcacatctacttctgcggtgtgaatgggatgatgcctgtagtccaggacacccttaagaaggtggcggacggagattcgatagtttggaccagaggcttgcccagctcaagaagaacaagcaatggcacgtcgatgtctactatggctcggattgctgttgttgcgacccttgatgctgccgtggcagcgtcatgatacaaacacatgattgacgattaatcgat

SEQ ID NO: 45599 - DNA, 410 bp, Zea mays
  Clone ID: MRT4577_141592C.1
ggcttggaacctttgggctgatttatgtgcttgtttatgtgcttgtttgtgttggactgcacggagggtaggtggatgaggaggagggacgagctctcctgggtccggatgaaattagaagataccttgttttaagaagagtgtcttactaggcagtaagggagtatagtcttgaaagtatacagacgttatctctggtagcggaaattccagggaagtcgcgaggccgttcttcggagaggacactaacgaacggtccgtggcgaacatcgcggaccctcccaattaagccaacacgtcgcacggtatatctatagaaccccgtatattcgagagtcgcttgataacgatagtcggtttaaagcatgagcatagacgggtcgacggcgcgtagacaaagaaatttacag

SEQ ID NO: 45600 - DNA, 318 bp, Zea mays
  Clone ID: MRT4577_141593C.1
gagagcgcgatacagtcgcatcaactacccagccgcggagaccatgagatacacgttgcaggccctccgagacgtggatactgtgtcgctaacgcgacgctcattgaccatggctcacacgctcccatgacctcccagcaccccgcatacctacacatgaacaagagcaccaggctgcgctaacccaacacgacaaccatatacgcctcaacgagccgtcaccatatgcaacaatcgcaaagcggaccagttgacacaacaactgccagccctatgcataacgcacacagtggcacataacatcatggcacatcaact

SEQ ID NO: 45601 - DNA, 240 bp, Zea mays
  unsure (1)..(240): unsure at all n locations
  Clone ID: MRT4577_141594C.1
tctagccacacatccaagcttacaacctccaacatnacctttttctcctcactacntaaccctaataaagttgttatattaaacatttttcgcgccataaaacaccatactacacattaactatctacatatttcttcttaaatcatatattctcatctaaaaccactatcccattttttcatactcaaaatctaaaaatcattatccattataatcaaacatcaattaaccactttata

SEQ ID NO: 45602 - DNA, 222 bp, Zea mays
  Clone ID: MRT4577_141595C.1
agcgcgcttggatgcaatgtctatgatacggttcttccgcctaccgtgcgaaacagggtggtttgaacaggtgggtggggcggccggagccatgggcctcctctgcgcagagctaattcttgtaacgatcatcacacacgatgcctggtcggcagaagacaacgttttccacaacatggacaacaccgatatgctcaacctgaagtacgaccactcggacag

SEQ ID NO: 45603 - DNA, 233 bp, Zea mays
  unsure (1)..(233): unsure at all n locations
  Clone ID: MRT4577_141596C.1
ggtnggggactcggattaaccatctaaaggtcttcgaatgtcccaactggcagaattttcagggccaaacaaaaaaaaaattggttggttaaggggatccccccgcttttacagacttaggggccccttacaattaattttcagattaccaacaacccagcaacaggggacctttcaggtgatgtccgaaaacccaaactttttttggaatggtttttaaagccccggagttt

SEQ ID NO: 45604 - DNA, 253 bp, Zea mays
  Clone ID: MRT4577_141597C.1
cacaagccatgccaagcaaaaccctatgattcccttcctccctctagtctcctcttttcccgccgccgccgccgccatcacaacccagatcaccccctccccatcccaccctgtcccgatggctgctgacgccgccgctgctgcgatgtccgcgacttccctctgcgttgatctcgatccctccaccgtgcgcactcgcatccgcgatgtcctgtccgcatgtgccgcgcgtgccggggaccgcgtcttggtc

SEQ ID NO: 45605 - DNA, 429 bp, Zea mays
  unsure (1)..(429): unsure at all n locations
  Clone ID: MRT4577_141598C.1
tcggatgggattaggnccatgggaccacagctatctgtgattgggcgaaacttgaaacctcagttttgaaaaggggatgggacgtaccatagctgcagtgcgaattctcagtttctaagtgagctgaaatggatgccttggaagcctngattacttcgtcaaatgtaaaatgaaatctgatggcntttctgaagaaaaagggctttgcctcattcattcgtgtgtttatcagcgagcctttgtcggcttgtttggagttggatcccaagctgttaatggagcgattggtcactgcccgtggctcattccttgcttgctgtgaaagtctgcaaggcctttgagattggaagacaattgattttgtttgaacctgaatgaaggccttcgctctctcaagtttgtctatttgctgcaacaaagttgggggct

SEQ ID NO: 45606 - DNA, 532 bp, Zea mays
  Clone ID: MRT4577_141599C.1
aaaaaaaaaaaaaaaaaaaaaaaaaaaaaaaaaaaaaaaaaaaaaaaaaaaaaaaaaaaaccagggcaacaaaatccacgggaacaaaccaaggggggggccacggggaacccgaacccccttccccgaaaaggaaggggaacgaagttgacgggggggaagttgggggggaacaagggaaccgacccgtcaaagccaatcaacgtctccgtcgggggaaaggtcaacaaggtcacctcgggccggggtttcaacggccccgggggggccaacgccgttttcgggggccgggaggcaagccgggccctcggaaaaaggtcaaaggacaaggccaacgtctccgggaacctctcggggttcaccaaaaagaagctcggggcccccgccaatgggaaaacaaagttccaggcaaagaaccccgtcgtcgcccaattcgccgccaaggcctgaactcggaagtcccggggaaaattaactcggcccggcctcttggggggttaagggtggggctggctggcttgtggcaagtggc

SEQ ID NO: 45607 - DNA, 290 bp, Zea mays
  Clone ID: MRT4577_14159C.1
aaacgctttctactctgaagcacacaggggctggggctggccttcggagttacgaggaaacgaggaccaggaccagggattctgcatcagcacagccgccaggagccggccggggccccatccctgacactgctgtcgcccggctgtacctgggtgctgtgtccgcggggcgtctggagacgtcgatgtggtcatagcagggcctggaacggggatgtctggcctgaactagagaaatgaggggcgtatccgcttctccaccctggcctcagatgaagatgctctcgggg

SEQ ID NO: 45608 - DNA, 311 bp, Zea mays
  Clone ID: MRT4577_1415C.1
ccccccaccgaagggggcattaattaattgaaaaaaacaactttatacaaaaacctccctgggatttccccggggagaggacaggataggaaaggaaaatccaaatgccctgagggattccattaattggcacgaaaaaaaaacccattccattccatcctagggggaaaaaaaacaaacccgaaaccaaacattttttggtccaaccctttggggccaagaaaataactataaacggggttccaaacccatttaacaaggaacctgccccccccccccccttttaatttttaagccccccccgagccccc

SEQ ID NO: 45609 - DNA, 559 bp, Zea mays
  Clone ID: MRT4577_141600C.1
ttttaaaatcttttttttttttttttttttttttttttttttttttttttttttttgtttgggttgttggaaaactaaaacaaacatgggcaaacggtttttgtttttttttaccttacaaacatttaaaccaaacggggccttatttcctatatggggaacatacggggacatcaaacatataaaattaccggggcaagggaacccccggcggggggggggcacttttttttttgcctgggaagggattttttaactacggggggcgctttttgggtgaaaaaaaacttcttcatattacccttagggggggggggttttttaattttgaataccgcccacccagctccaaaaacatttcctgtagcggggggggaattgggggggggttcacctggttgttcaccggatttggggggtacaacaaaagggggcccaacggggggggggggcgtaaaatttttggcaaacacttccacaagatcccatattttcccaaatccctgaagggaaagaagaataacttcgccgggcattaacttgaaaaacttttgggggg

SEQ ID NO: 45610 - DNA, 185 bp, Zea mays
  Clone ID: MRT4577_141601C.1
cggtaattctgagccgacaaggaaggaaacacggggggcttatagagaaacatttgcgtgcaagtgaaaatgaatggatatgcttctgagaaaatagacagagaatccctggcaccacatgagatcctctaggagccctagaaccggagtctagctggaggacctgaatgcattccatctattca

SEQ ID NO: 45611 - DNA, 352 bp, Zea mays
  Clone ID: MRT4577_141602C.1
caagaccaccagcaggactcgcgaggagagcgcgcccggaaagaaaaaaaaaaccctagccccgcccgggcctccgcctcgcgatgtcttgcacggtggccatcccgagctcgccagtcttctcgccctcacgccgcccactctcctgcaaggctgaggccaaggagagttgcagcaatgtgcctgatgtgctgcaggacggtgctatgacaattgatcggcagtatgcattgtcaaatttacagattcgagtatttgtctctgttcccgggagttctgtgccacaaaatgatgtaccagattccttttacaagcttactggtgaggagataaggaatgaagcaaagatgag

SEQ ID NO: 45612 - DNA, 330 bp, Zea mays
  Clone ID: MRT4577_141603C.1
ccacacccacagcctgctgcacaacctcctggacagggcgcaactgtcaacaaccctcgctctgctggcattgagaatcgtgctggtaggtggcgcagcatcggtgctcctcatcagcaccatgctgtcagatgctgccaccccgctgcttgcaactacaatgatcctggttgccaccccatagaccggtacccagatccgcttgcgaaagccgacgctaaagacatttatttctacaaaaactagaatactatgatcaattacaaaacctaccaaaacatccctattgagaccactgcccatgatgtgcctgcaccacccaacacattt

SEQ ID NO: 45613 - DNA, 266 bp, Zea mays
  Clone ID: MRT4577_141604C.1
aaaaaaaaaaaaaaaattttttttccaaaacatcagttcacaaaatccaggcgcattttaaacaacgggggcggatttaaaaatactatgttctcccggaaatgcacaaacaacacgaacatgcaaaacttgtaacaacttgttatgattattcaagataaaacatattgattgattctcttttctttcaacataaactgttcattcttaaaacttaactaccttttcctctctatttttcactcctactcatttatataacttct

SEQ ID NO: 45614 - DNA, 256 bp, Zea mays
  Clone ID: MRT4577_141605C.1
gaggagggggacaattattccttggcgattgaacaataactaacatcatggaccaaacccaaaaccagggtgctcctcatatgcattcggacacctaaaggtaaccggcggggcctcccttacttggcggggacgaatttggtggcacaatcccaagcctttgctttgtctgggtccccattgtggccaacaaggttctatagcggcccctttcccgtgacgatgccttgtagcaaaaatcctatccctataaaca

SEQ ID NO: 45615 - DNA, 636 bp, Zea mays
  Clone ID: MRT4577_141606C.1
ccacgcgtccgactgatgttacctgcagagatatcccattgcatcccaaacggcgaagaacgcctacaaaattgatactgtcaacttctgcagcagctgcaaatcatgaaataccatcagaagtggcaagaccatacaagaaaaggcggatttttgtaagaagtgtttctgacctgctaaagtatgcaaagagggaaccttcccatgggagatcagcttctatgctgtccagcatattagagaagtcattagctgcttctcctgtacttaatttttctgtatgtggtgacagcaaaacttcttctgatgtcattagctctgcacagagaccgaaggaatcctcccatgacgaggatacaagtaaatcaccagaaaacaatcctcaagttccaaatcgttccatgaaaacaccgtcaaaagtggttaatgaattgtcacccacttttagtcctgcgaatccatcaaaaggctcaagtagaaacttgtcaaaagcttctgttgcgagagaattgctgaagctagatcctgaaaatgtactaccaaatcagcagagaaaagattctagaagaaggaaggatatggcccatgtcagtattctattaagccatcatttggatgatgatgttgtcaagcgtc

SEQ ID NO: 45616 - DNA, 516 bp, Zea mays
  Clone ID: MRT4577_141607C.1
gggatttcttcgccgagggcgagggatctcacaacgtctcccttggcggcgatttcagcatccaggttagtccagaccctccaggtctaggcttcatgaaaaattatccatttaggtttcttgggctcggttagatcgaccaatgcgtagatcatatcttccgtgggcacggttacgagttggttgtctgttaaggtctctgcctagaatttaggggatttttgctcgagcattgctgcttggagatcgtcgattgccttctagtctagtcgaagattctaggttaaatgtggcggtatatacttcaataggatggatttgctaacaacgaagagagttacttgaagcagacaaattagcagggtttagcctacatatagaagaaaagaaaattaggtagttaatgcgtcatcccagtcatgtgaaggaatacttatcaagtgattgcatgattagagactctctccttgacatagatgatgcaatcatattccaatctaatggtacttaggcaac

SEQ ID NO: 45617 - DNA, 258 bp, Zea mays
  Clone ID: MRT4577_141608C.1
cgagataaatctcaatcaatatattgattatttctaggaaaacatgtcggtttgagggcaccattgtcgggtccatctgatatgtaatttaattttggtacctccaacgatgggttgctggggggggggggtcatcaaagagaactggttgtctggccgcaattgttgttgcttttgctggaaggttgtgaccaatgggttggccactgccaatgggttaagttactgttgtttttgttgctggtccctttctttttt

SEQ ID NO: 45618 - DNA, 270 bp, Zea mays
  Clone ID: MRT4577_141609C.1
attatgtaatatatatggggtttggatcagaaacagctgagtaaaaaaaagtgaaaaacatgtcatggggtgtgcgcataacaacccctaaacagcttaagtagctattactagaaggctacaaatcccaaaaaaaccaataaaaaaattccctattccaggaaaaaagctgtctagctttgaaacccatggctcatgtaaattcacaagatgggtcaaaagaaatgtttcatcggatattctggctcttgctggctagcatcctttcag

SEQ ID NO: 45619 - DNA, 284 bp, Zea mays
  unsure (1)..(284): unsure at all n locations
  Clone ID: MRT4577_14160C.1
ctatagagggcgcccccttttttttttatggttttttttttttgggggggagacaaagggggaagacaacnttttctttaaacatctccaagtcttaaactcaaattaaaaatgtgtaccctaacaaaaagaaaaacatcctggattcaggaaacaaaaaacatagtgccattgtttataaggaagttaattaattgaggaagattcattccatacaatgcctataaatatggaaactaaaactaactttaaaacttataattaaaaagactagacatttaaaa

SEQ ID NO: 45620 - DNA, 565 bp, Zea mays
  Clone ID: MRT4577_141610C.1
attcggctcgaggaaccaagcatctgtttctgtgccaacaagaaatgtaccatcaggtgcaccaggtatcactagcaggtccctgacaaggagggcttactatcctgtggttggaagtagcaactcaagcgttgatgtcgttccaactatctgtggatcatctggcgcagcaatatttgctaatggtggctatgctcttaatgctgatgctggaactgtttctatctaccctaatccagctcctgctacttcatctggctctataaccatgcccatgcccatgctccatcagatggtcattcagagccatccacctgctacctctgcagcaacctctacatccatgtggatcgctcaaccattacctgccagaactgctgcggcttctagacatgcaagacgcgtatcagcagggcttgccaacaatggaaggtacagaagggctaggagctcttactacagccttcatccactgatgatggtagaggcagagcgttacatgatggaccagtggtcttttacgaataagagcagcagccggtgacccccacagggacatgagact

SEQ ID NO: 45621 - DNA, 246 bp, Zea mays
  Clone ID: MRT4577_141611C.1
cactggtggcaggttcttcagtggagggagtgtgcttgaccgccaaatcaccaatctcttttcgcggtatagctcatcttctcccgtcttcctctcctcctcgcctactctaagcatactagttgtctgccccatctcccagagtattaatcgatttggtggtgggccccgtcatctccttctaaggtccagttgtcacacagtgtgggggggcccgggccgccccgagtggtagtagtcaagaca

SEQ ID NO: 45622 - DNA, 809 bp, Zea mays
  Clone ID: MRT4577_141612C.1
ggactggttcgccggcaggagcagcaactcctcctatatcctaagaaaacgttgtggagcgtgaaaagcaaagcaacccaatcctaggtcacgccgcccatccgcacggcaccgaaattcccgttcttctcgcctcccctgcagccgacgaccgcggcggcggcggcggtccgagaagaatcagccgccgtgcaggcgcattaccctctcctcgtccatctaggtccagcggaaggggaggaaaatacgaaggcgggggcaagtcaatcgaccctcctcgccgcctgatcgcgcgccttcgccaccgccgatgctgcggcgccgtccatggcgtcggcgctgctctcgtacctgcaggccctgtggccgttctctgccctcctgagggaggaggacgacctacgcgcgtcagcgcggctggtcgggtcgctctctgtgccggaggagacgaagcagttcgtgctcgcgctccgggagcccggcgggtcgccgcacgaccggcaccgggacggcgctggcgtgatctacatcctcgccgcgcagaatctgtcggagcagtccgcctcggacgccgagcgcctgatcagggaggtgcgaccgagggccgtggtcacccaggtcgcgcgtccggccctcgaagacgtccggatcgaagaggattgcctggcaggcaatggaggcgggggcgtgccggtaccggcgtcgccgtttcaggtgatcaagcggtgcgtcaccgagaagaggagcagggaccagtacgtgaaggctgccgcgtgccaggtcctgcaggagaatttcggggtcgggtt

SEQ ID NO: 45623 - DNA, 280 bp, Zea mays
  unsure (1)..(280): unsure at all n locations
  Clone ID: MRT4577_141613C.1
aaaattaaaaaaaaaaaaaaanaaacaatactcaaaaattaatataaacaaacatacggggaaagggacatttgtttttttttcataaacaccctcctgnaaactgtaaaccactgtgacctactgtagaagtatgcatgtcactagtaaaaactgataaactgtgtgatggactgatgaagtacacttgagcatttatactcacataaagctgaccatcacatcacgtatataacaacataaaacactattatgcactataaataatactgttctaatt

SEQ ID NO: 45624 - DNA, 672 bp, Zea mays
  unsure (1)..(672): unsure at all n locations
  Clone ID: MRT4577_141614C.1
aattcggcacgagggcaccctcccgcctccaaacgccatccgagtctccgaccctctcgtatcaccgcagctttggcccccgtctcatccccgaccacgtccatcgactgcatcgtccaccgcctccacaacctcgacctcgcctccgacaacgatgatccctccgcctccacttctgctgccatggctaccgcccaccccacgacaccgaacaccacgacgatctgctcgaccgtggctgggcgcgacccgacctccagttcgcagctgtcggattcgatgatgtcatcctcctatgggagagagacgatgagcccacgggaccggtgaggggcgaggaggatggggccaagaggagggcagttcggattgccagacctgatgccgcctcccccggtgcacctcgcgcctgctccccgagcccgcctcccgatgcaccggcgtgacgtggctgcagaggtgggcaccctccaacccctcccgtcccgccccagctccaaccccgtgggcccatctcccgacgcactggctcgcaatcgcgcggccccaacaccggcgtgccgtgtctgcagaggtgggcaccctcctgcccccatcccttccncgaccacatccatcgatcaaaccctanaccctcaccctctatctctgnttgcatctggttctcgccga

SEQ ID NO: 45625 - DNA, 113 bp, Zea mays
  Clone ID: MRT4577_141615C.1
gacgagagccagctctctacattacacaatcacatggcgtacaccaccgtcgtctatgacaaccggctcgtggttgttttcgacacgcaaactcgcaatggcacacatcgtaa

SEQ ID NO: 45626 - DNA, 264 bp, Zea mays
  Clone ID: MRT4577_141616C.1
gcgtcgtgaacacaccccaccacactacccacggaatccgccacccgcacccgacaaggagatatgtcgctgggaagggaggagcgttaggaaggaggaggtggtcaccaaggagtacaccatcaacctccacaagcgcctaccggttgcacattcaataagaaggcacccaacgccatcaaggagatcaggaagtttgctcaaagccatggcaccaccgacattaggattgatgtgaactctcaagcacatctggacagcggg

SEQ ID NO: 45627 - DNA, 404 bp, Zea mays
  unsure (1)..(404): unsure at all n locations
  Clone ID: MRT4577_141617C.1
ggtcaatcctggcccacgcacttttttttttggttaacaaaactgggaacactgaaacaaggttttctctacaacacttggcaggggcgggggggggacccaccaaagggacaaatggttcatccggtgggccttttcaaaactgacaattgcccagggtctcccttggacagggaaacctccagcggggaattccagggggggaacgaccacctagagagcctcgctggggggtgtaagatcctgcttcctttggggcccgggatggttagggggcgtgacccggggcgcattttccaaaccttttttatgccttttcgcggggcatggattgcttnccccccaccatgggcccttttcgttttctctttgggcgtcggccctggccaagccttatttttgtt

SEQ ID NO: 45628 - DNA, 1141 bp, Zea mays
  Clone ID: MRT4577_141618C.1
ctggccgggaatccgtagtttacatcccgaagggcggcaagggtgatccaggccgaccatggcttacgtcgagagaggtgttgtgaaagacaagcggactatatggcgactgagcataatctcagacttctttcgggctattgtcaacttcatcagaatcttctttgacacactgttctcagtggacaaaactgacagctacaagaaagggtatggtgctggtaagaagtgggatggtggacccggtggtggtggtgggcggggcccatatggaggtggaggtggtggatttggcggcggaggtggaggttctctccctgcttgtggatcctgctgcggctaatgagcgcacagccgttctgcctgatgactgcttaacagatgaatacacatgcttcaatatgttctgaagaacatcatagctatcgatatgtatttcactgtcagacgattgtattatatataattagtgtgtcgtttattaacagttaatttacctgtaacttgactctggcatgattcacatggcacattcatggtttatcttttgtgtaaaaaaaaaaaaaaaaaaaaaaaaaaaaaaaaaaaaaaaaaaaaaaaaaaaaaaaaaaaaaaaaaaaaaaaaaaaaaaaaaaaaaaaaaaaaaaaaccccccccccccaggacacaccaaatttgggggggggggggggtttttcttttttttttcccacccccgggccaagggaaaacggggggggatggcccttctttttttttcggggggggggggggtggcccgccttattggggggagttttggtggaagcccttggagattgggcaaaagttttttccgaaaggggggggaaaatcgggggattgggggcgggttttggggggggccaaccctgggtggtattggccctaaggggccaaaacttgggggggggggtgggggccttccccaacccccgtttgggggcgggaaaaagggaccccttccggttttaggggccgggcctttttgtttttggaaacaagggcgggggcggaaccctttttttaagccttgttgttgaaaaccccgtcgttggggtggaaatatttttggttggggggaacccccccccaaaaccccggggcttgggacttggaaggg

SEQ ID NO: 45629 - DNA, 253 bp, Zea mays
  Clone ID: MRT4577_141619C.1
aaaaaaaacacacaatttttttttatgacccaatcttaaaaatctgcagggtatacacaatacaagctgggggcacattcactaataatatataaacacaatgcctaaattcacatttaattaccttaacaaaccttataacaattttcaaacacccaatctaaccatctttaaaatcaaacataattgtaatgatattttatcttttatattattctcatcttattattcaccatttttattattaactttt

SEQ ID NO: 45630 - DNA, 557 bp, Zea mays
  Clone ID: MRT4577_14161C.1
accctacataaaaaaaaacaaactacccaaaaaagggcggacacaacaaagagaaaggacaaaaaaaggaagggaggggaaaaaaaaaaaaaaaagaaaaaaaaaaaaaaaaaaaaaaaaaaaaaaaaaaaaaaaaaaaaaggaacaaaaaaaaaaaaaaacgggaaaaaaaaaaaaaaaccggaaaaaaaaaaaaagaccaaacaaaacaaaaaaaaccggaaccaaaagaaaacaaaggccccggaataagtggaggaagcacggcatgaaggacaaaaaaccggacgtccggaacaacccaggaggggccgaaaaaaccccgaaaacccggaaaacccccccaggagcccaaggggggcgagggccaaaagggggagagccccaaagcccccgaaagccccccccgccccaaaaatccgcggggaaaagaaaaaacggacgcgggggacaacccgggaaaaccggaaaaaaaccgggaggcccaacagggttcccaaaagggagccgggttacagaaaggggaaattaagggaaaaagggggaaacgggggaaa

SEQ ID NO: 45631 - DNA, 1063 bp, Zea mays
  Clone ID: MRT4577_141620C.1
attgggtacctcgaggccggccgggagtaaaagcacgtagtgtagtggtttgtcttggtttgctagcactttattaggtggtggttcgattcccatgtataaactttattcttttctttaaaaaaaaaaaaaaaaaaaaaaaaaaaaaaagcaccaagtttgagggctcgatgctggttgaccttgaccttgtgctcgtcaaccgagtcccgactgcatcgatctgacggcctttctacgcgcaacgacgaagcttcgcgaatcccctccttccttcggcctcaccttcttattctccgccgaacaagtcttagacgcctaatccgtagtttacatcccgaagggcggcaagggtgatccaggccgaccatggcttacgtcgagagaggtgttgtgaaagacaagcggactatatggcgactgagcataatctcagacttctttcgggctattgtcaacttcatcagaatcttctttgacacactgttctcagtggacaaaactgacagctacaagaaagggtatggtgctggtaagaagtgggatggtggacctggtggtggtggtgggcggggcccatatggaggtggaggtggtggatttggcggcggaggtggaggtggtaggggtcctcgcactctatctgacatccaatccaatgaccacagttctctccctgcttgtggatcctgctgcggctaatgagcgcacagccgttctgcctgatgactgcttaacagatgaatacacatgcttcaatatgttctgaagaacatcatagctatcaatatgtatttcactgtcagacgattgtattatatataattagtgtgtcgtttattaacagttaatttacctgtaacttgactctggcatgattcacatggcacattcatggtttaaaaaaaaaaaaaaaaaaaaaaaaaaaaaaaaaaaaaaaaaaaaaaaaaaaaaaaaaaaaaaaaaaaaaaaaaaaaaaaaaaaaaaaaaaaaaaaaaaaaaaaaaaaaaaggggggggcccttttaagggatccaattttacttccccggccttgcaaaatt

SEQ ID NO: 45632 - DNA, 823 bp, Zea mays
  Clone ID: MRT4577_141621C.1
cattgggtacctcgaggccggccggggaccttgatcttgtgctcgtcaaccgagtcccgactgcatcgatctgacggcctttctacgcgcaacgacgaagcttcgcgaatcccctccttctttcggcctcaccttcttattctccgccgaacaagtcttagacgcctaatccgtagtttacatcccgaagggcggcaagagtgatccaggccgaccatggcttacgtcgagagaggtgttgtgaaagacaagcggactatatggcgactgagcataatctcagacttctttcgggctattgtcaacttcatcagaatcttctttgacacactgttctcagtggacaaaactgacagctacaagaaagggtatggtgctggtaagaagtgggatggtggacccggtggtggtggtgggcggggcccatatggaggtggaggtggaggtggtggatttggcggcggaggtggaggtggtaggggtcctcgcactctatctgacatccaatccaatgaccacagttctctccctgcttgtggatcctgctgcggctaatgagcgcacagccgttctgcctgatgactgcttaacagatgaatacacatgcttcaatatgttctgaagaacatcatagctatcgatatgtatttcactgtcagacgattgtattatatataattagtgtgtcgtttattaacagttaatttacctgtaacttgactctggcatgattcacatggcacattcatggtttatcttttgtgtactgctgtccggttgcataatctctatttatttatcaaaaaaaaaaaaaaaaaaaaaa

SEQ ID NO: 45633 - DNA, 268 bp, Zea mays
  Clone ID: MRT4577_141622C.1
cccacgcgtgggtgcggggtgaaaccgttcccgcgtataagctcatgcgtatgtagggaggctggcgttttccctaaactacgtcattctaatctgaatagtagactggtgagacgaaaaggggtctgtacaacttatctggtccttacgctacggtacctccctcaatgctaccaaaccgacataaccaattggagcgtatgtccctaccacgggcactacttaaatagatgatcatcaatctggaacgcatggattaagatgcttg

SEQ ID NO: 45634 - DNA, 393 bp, Zea mays
  unsure (1)..(393): unsure at all n locations
  Clone ID: MRT4577_141623C.1
cccgtccgcttcaggggccagttttggcaccccattanntgatgggcntncaaagttnctcgccttggagcctcgtccatcggcgggagaccatnntgtcactggctagaaacctatgcnngggaagggaaggggcatctgagcctnngtcgaggagggtggtgnnngtggttggccttggtgaggccttcnttagtaaataccccaatnncatctttgggtatggttttgggtggaaatggtggtnntggcaaccgtnntgtttaatttaatgccgcaangncctgctggtgnnngtttcgggaatggaaaggaaaggactcnntggtccctgggaaacaaagctnnngcggagaagggannngcctgtcangnntgtattggggtgtctgg

SEQ ID NO: 45635 - DNA, 797 bp, Zea mays
  unsure (1)..(797): unsure at all n locations
  Clone ID: MRT4577_141624C.1
agagttccggcaaaatccccaatcccgcagagcacgttccctccgcccctcgtttccccacccaccagcctagggttccggcgagatgaagcagcaggatggagctagccccgccaagatgttcattggcgggctctccaggcagacaagcatgggtacgttcaaagagtacttcgggaagtacggtgagataatcgatgcggtaataatgaaggaccgccatacccaaaagcccagaggctttggatttattacctattcagatcctgctattgttgacagagtgattgaagataaccatgtcatcgatggcaagcaggtcgaaattaaaaggactatcccgaagggtgctgcccccctgaaagatttcaagacaaagaagatttttgttggcggattgcctactgctctaacagatggtgaattcaaggacttcttttcaaagtttggaaaggtggtggaacatgagatcatctgtgatcattcgaccaaccggtcacgaggatttggatttatagtgtttgatgcagaaaaaactgtagatgaattgttagctaagaaaggcaataagattgatctaaatggtactcaggtggagatcaagaaggcagaaccaaagaaaccctctaacccacctcattcacttgatagcaaacctaggagatctccttatgcagatggttatgatggatttgccagccgttacaacaatgggtggtcgctttgccccctatnaatcacctggttttggcgctaggcctggcagctaaggtagtgcttatgttcctggtgactat

SEQ ID NO: 45636 - DNA, 563 bp, Zea mays
  unsure (1)..(563): unsure at all n locations
  Clone ID: MRT4577_141625C.1
gnaaatcgttaaattcctggtagagttaggttgcgacgtgaatgctcaggactcggacggctggacgccgctgcactgcgccgcgtcctgcaacaacctagctatggtgcgcttcctcgtcgataatggcgcgtgtatattcgcaaccacgctgtctgaccacgagacggcggccgagaagtgcgaagaggacgaggagggcttcgacggctgctccgagtatctttacagtgtacaagaaaaactaggcataatgaacagcggccttgtctacgcggtgttctcgtacacggcggcgcggagcgacgagctgacgttcgagacgggcgggcgcctgcacgtgctgcgcaagggcgacgacagcgagcgcgagtggtggtggtgccgcgacgacgccggcaacgagggatatgtgcctaggaacttgcttgggttatatccacgagtaaccacacagcaagattaagtcttgaatttatgacctgattaatttgtaaatatctattagttacttttattttgtatgtatttatatcactaaaagtaacgacgctgtatacaat

SEQ ID NO: 45637 - DNA, 594 bp, Zea mays
  unsure (1)..(594): unsure at all n locations
  Clone ID: MRT4577_141626C.1
ttgggtacctcgaggccggccgggctattcatcgaacatgggccattggacgctgcgattgtacatgggaacgctgtagcagtcagatccatctcctacttttccatcccaaagacgccatcatccctttatagagcccatcagctctcgccgagcntcatacatatctacctgccgcacaacaatggcaacacaacgcaaacctctatccgctgaaagcaacggtactcctactacagctgagacgnctgctggtaacatgcgcctcccgacctcgtctgctcgtcgctcgccgttcctccctacgcgcctcgaggcccaactcatcgccatctacccgcttaccctcctgctcggcagcgtattcagcacgctctcgccctcgacgcgcaatgcgccctattcggcaagcctacngccgcacccagccgagtttgcgncctcgaactttgcgcaanagnagaacgtctncaacgggtactttgtcaaagtaggttggctctggaaccacncttcgatttcgccgtnttnggcnttctttccancccagttttggacagggtggaagcaccgaggagatggaaagcattcttg

SEQ ID NO: 45638 - DNA, 382 bp, Zea mays
  Clone ID: MRT4577_141628C.1
tgaaaagcttcgtttgttgtttgctccttttattctccctctacgggtctctcaacgcttttgttgtaaaccaccaaaaagcttcttgcccatctgggggtaaaataggccccgatggcaagtgctacgtcttttatggcaccggagacgtctgtaactataattggggacagtcttcggacttttgcaaaaaacaaggcggacatttacctattataagagatgcgttcacaaacgcgttccttcggaacttgacgcagacttcgagcacgtgtgattgggcctatcatggatcgtggattggactaagggcatatacgaagggcagtcaatgttgttggcaatggaacgatgggagtgatattacctatcataattggga

SEQ ID NO: 45639 - DNA, 283 bp, Zea mays
  Clone ID: MRT4577_141629C.1
ataaataaataaaaaacaaaataaaaataatttttaaaaaaaaaacaaacaaaactaaagggggaactttcatacgcttgccacgcttacgatcacctggttctgctccgattcctttttccttttttctgccccgtttttgccccctggtcgtcttttttaatcgctgctttcccccatttcccttcccttactgttcatcgcccccctccctctattccccccctgtcatctcctgtatcaaactcgccgctgtcgccccaccttcctctgaaaaagtttc

SEQ ID NO: 45640 - DNA, 227 bp, Zea mays
  Clone ID: MRT4577_14162C.1
gtaggtaggagctttcacattctgtctctattgatattttattactcattagaatcattgttactatttcatacatgactgggtgtggaggttatgaatacatatacaggctatacattcctacaaacatcaagtaccatccttacacttcatggatacctatttctgttcatttctgtcggcggagtcggtaccagtattaaaggagggggtcgatttatccgttc

SEQ ID NO: 45641 - DNA, 360 bp, Zea mays
  Clone ID: MRT4577_141630C.1
ggggaaaaaaagtcagaatatggaatggtttcttgtcgaacataatcaggattacagagattaccatagaacaaaaaagggggctgctcgaggataggataggccggaccaacgggcccgaaattaaacagcaaagagaccaattaacaaacaaatttaaagatgaccataatcccacataggaagcatgtttttaggatgggccaaaataaggtttaacgagcaaaccacactgacgcaaacccaccttggaggcgggagttccaaaacgggcacccaaagagaagcaacttagcccttgaagtccttggcgtggaggatatgggtgaaggtaggagcataacccttgtaggtggcgag

SEQ ID NO: 45642 - DNA, 389 bp, Zea mays
  Clone ID: MRT4577_141631C.1
gaccaacacgcagcatttgaagtgtgatgcaggtggagcaattcttgggcaatggttaccaccacatgattgctccttatacaccttgctctttatacatgagttgctcacgcgacaattatgcctcaatgctcacatgctcctatagcttccctttttgccccatacctgctattaatcataggtccacaatatgtaaacccaggtctgcatccatataggctctaacaagcaatgagagtaaggagcatacctctatcgcccttgatgtgtcaacaatcggcagccttatctttggtgcagtcattgttacacaccatcagggcacaacaaatgaagtaactcgtgctacctgcgatcaagcaagtagatctggagaacctttcttc

SEQ ID NO: 45643 - DNA, 659 bp, Zea mays
  Clone ID: MRT4577_141632C.1
caaagacctctctgcgcccagttcagagatccacatccttgcccagagacgagtgcttcggttgacctctctcctctgccggaccacctccaaagctcttggtgtaactcgccactctgcaccaatcaatgttgatgtgctgatctccacattcagatcccaactgccttcgatcccctcgctgagggcaatgctggagactccggtgcggcagcacgggcaaaggactacgttcacgtgagcatccagcagcgtaatggccgcaagagcctgaccaccgcccatggattgaagaaagagtggcagctacagcaagatcctcaaagatctcaagatagagggctgctgaaatgatactggggtccaagacccagaacttggacaagtcattcaactccatggcgatcagaagaaaatcggatcgaattgcctcgcactggccggcatcgtgaaaaaagagcacagcaagatgcatggatcctgagctaacgccgggcccatagcaaaacaaccctgcatgcatggacaggttattatatataatatgcgaggtgaaacatatctacgtgactgcgtactacatgcatgactagtacaccgcctgcgcgttcctgctattacacataacacatatagccccctcactgcgtgtatgcttg

SEQ ID NO: 45644 - DNA, 607 bp, Zea mays
  Clone ID: MRT4577_141633C.1
atcacgcgttcgtgagtaaccaagactcagagacattcctcgtaaatatattatcttgtgtgccattggcatgcacactgatgtgcaacagggtgcttattttagttacaacactagtaaaaaagtattcattgatttagtaactgaatgtaatataacaccatgaggtgcagggaataaacatgagataaaatgctgggtgcagcaattacaaaaatgacaattattcttggatcgaagcattgattgtggcctccatgggatctactgctgaatctactttgttgactttcttgttatttgcacacatctttcattattagagtttactgcgaaatagctagccatagtgtttatatgaagattgaattgaatggattttgttgactctaacttctgtagaaaatatgatgtaatactattcgatccataggacattagaagcacatcgaactttatgtgtgcaacaaggaaacgctgtgttgtgatgaagtacatggttctagctgctatagctcatggttcatgcatttcaccaaggctaatcgtgcacgcttatcttctaatgccctagcatggagaggcatgattgggaaattttggctga

SEQ ID NO: 45645 - DNA, 298 bp, Zea mays
  Clone ID: MRT4577_141634C.1
tgcgctcgagaccaacgcgcgcactcacacgtacatctacatgtgggatacttcagagacacaatatgccacaagagcagtggggtcttaataacgagcactggggattcctggctcaaaatcgttagacggaccgccgctatacgaaaacgcacctaagaattactctagctgcagctccactaccgccaattcagcccggtctcctgacaggcagcagactcgtgctacgatgcctgccgatttaacggcgctgtttcgatacacgcagacgccgtccaatgtgctggacctgctg

SEQ ID NO: 45646 - DNA, 378 bp, Zea mays
  Clone ID: MRT4577_141635C.1
cgcagcgtccgtgcgctgtaggtgtgtgtgcgccaagttcctgtggccattgtcttgtgtacaggtactgttcatctctgtctatctctgttcttggcgttccatcgagtgtgtagcgctagtagattccaacatttggtatcagaggcagtttatgcccaagatcctgcgctactacctcgagtccgaagctatggcgatggttccgcacggcgccggggggagttcggtctccatgtcgtacccggtgctgtctccggcgagctacacggcgtgggcgatcaaggtggagtcgatcctcgacgcgcaaggtctctgggaggccgtgtctccaccaagatggtggcgaggtgaacgcggtgaataacaagacggcgc

SEQ ID NO: 45647 - DNA, 119 bp, Zea mays
  Clone ID: MRT4577_141636C.1
cttcgcatccctctccgcagccgcatcgctcgcccgccccatcaccgtcaccgccttcaagaagctctccgaggcgtcccccgtgcccatacctcaggagcataacgagcccctcctgg

SEQ ID NO: 45648 - DNA, 205 bp, Zea mays
  unsure (1)..(205): unsure at all n locations
  Clone ID: MRT4577_141637C.1
gttccagcttttcctcagcgatnncttctccagnncaggtggnnagtcaatgnnnagcaatcaggnaaagnaaagtagaagnnctgcgccgcctaagnaattgaagctatttaggnaattagnnaagtcacttaagggtactcaggagcgaggcgcgcgtaatcatnnnctcagcgagcttagaaaatnnagctgcagnnagttg

SEQ ID NO: 45649 - DNA, 698 bp, Zea mays
  Clone ID: MRT4577_141638C.1
attgccgtcagctctctcattatctctctctcttgctgtgtatccacgacctccacttgcacatcttccccggtggtgtcgcggtcagttgaaccatgacgcactccaaagccacctcggcggtcaccctccgcacccgacaagttcatgaccaaccgcctcctggcccgcaatgaattcgagcttgaggtgatccaccccgaaccgcgacaacgtctcgaaggcgaagatgaatgagatgcttgacaaggcgtacgacgtgaatgaccccaacaccatctgtgtcttcgagttccgcacccacttcagaggaggaaagcccactgcttatcggtctcatctactacaacctcgaggttgacaagaagctccagccgaaataccgcctcatcaagaatggccgtgctactaagggtgataagtaccgcgagaaaatgaaggagcgcaagaacacgaccaataacatccggggagacaagaagaccaaagctgtcgacgcctataagaagtaaacgttcgtttacatttgtattactggtctgaggtctgcctgatctagctgcaatgtcataattatggacgtgctaggtttatgatccacctttggcactgaagcgatatttttgtaaatcctctgcactgatataaagaattgtcagaatattgcctcacaacataattgcccggtgcctgttctg

SEQ ID NO: 45650 - DNA, 318 bp, Zea mays
  Clone ID: MRT4577_141639C.1
attttacaatgctcggataaacaaatggctacgagctccagatatgctgcaaaaacggcacttctttggttcttgtgtcataaacaactgcctttatgttgctggtggagagtgtgtagggatacagagaattctaagatccgctgaggtatatgatccgaacaggaatagatggtctagcattgctgaaatgagcacaggaatggtgccctctattggagtagtacatgatggcaagtgtgatctaaaagggctaaattctcattgccaggtcgtgagtgaggtctatcttccagcatccaaaaagggggaggcacc

SEQ ID NO: 45651 - DNA, 504 bp, Zea mays
  Clone ID: MRT4577_14163C.1
ccggccgcatgcgcttcactgtcagcctggcgcgccagctcggcgttctgacgcacggtggaggtcagttcctccatcgatgcggcggcttcttccagattggccgcctgctgctcggtacggcgcgacaggtcgttgttgccggccgccagttcctgcgccgcgttgttgatgctgtcggcggctacctggatgccacgcacgatgccggtcagctgggcggtggtggtgttggcgtcgtcgcgcatgcgcgcgaacacgccgtcgtactcgccatccatgcgtgcggtcaggtcgccgtgcgagatcgcgcgcagcacgtcggaaacatcggcgatgctggcctgcgaactggccatcatgccgttgaggtgctcgaccatcgccttgaactggtactggaacgcggcggcgtcgccgcgcatggtgaagtcaccggcgcgtgcagcgcgggccagctcatcgatctgcgcgttgatcgccatcaggctctgcttcaccgcc

SEQ ID NO: 45652 - DNA, 293 bp, Zea mays
  Clone ID: MRT4577_141640C.1
accgtatcaaggtgcacgagctccgggggaagagcaagacggacctgcaggcgcagtcaaggagctgaagtctgaagtcaccctcctccgcgtaaccaaggtcaccggcggcgcacccaacaagctctccaagatcaaggtggtgcgcacctctatcgcgcgcgtgctcacagtgatctcgcagaagcagaagtcggcgttgctggatgcgtacaagaagaagatcctgctccccatcgacctccgtactaagaagacccgtgccatccgccgccgtctgtacaagcaccagc

SEQ ID NO: 45653 - DNA, 367 bp, Zea mays
  Clone ID: MRT4577_141641C.1
cccacgcgtccgcggacgcgtgggttcgtacagaaaatttaggacaccactactaaccacggactaaacagagtaagggcaaagaaaaaaaaggaaatcaggagcacaagaagtggttccttaaaaaagaaagatcgtgccttgaagatgctgagtcaagtgatgagatccatggtggaggggaagagcaggaacaagggagcaaggttaatgctgccactgggtgcgatgaaccagatggagaggtcaaggatggtgctctgactatggctcacacggcaggtactgaagagggggagaagcaatttggtgtctggtggaagctgccgttcaagctgctgcactactgggcttggaaggtgaagcc

SEQ ID NO: 45654 - DNA, 1074 bp, Zea mays
  Clone ID: MRT4577_141642C.1
cacagatactgaagaaacttactcgcaatgctaggaaagcttgcccacctgccattccccatcctgattgggtttttaaatcaaaggaaatcggtggccttccttgcaagtttgaaggcattttggagtccccagttgttaatggataccgtaacaagtgtgagttctctgtaggatattctttagagggcaaaaagacagtaggatttatgctcggaaatttcagggaaggtgtgactgctgttgaggaacctgagaattgtccaaatgtctcagaaatttcctgcaaatacgctcaaatgttccaagattttcttcaatcatcaagtttccctttgtggagcaagattgacaactctgggttttggcgccaactcacagttcgtgagggaagatgtccagctgaagctgttgtttcacagaatgcagaatcacaaatatcagaagtcatgcttattgtgcaggtgtgttcgacaagtgttgatgaagctcttatgaaagaagagtttgacaagctgtctgctgccctggtacaaggagcagcaacatgctcacctcccttgccactgacaactattgtagtgcaagatcataaagggatatcaaatgctgcacctactgattgcccactgatcccactattggtaccaaagggagatcagttggatggcacaacagaagataaaataagaatccatgatcacataagcaacttaaagttctctctatcaccaacagcttttttccaggttaatactcttgctgcggaaaggttgtacacccttgctggtgattgggctaatctcaattcagacacattactttttgatgtgtgttgtgggactggaactattggcctgaccttagcacagcatgttggaatggttgttgggattgaaatgaatgaatcggcagtttcaaatgcttgcagaaatgcccttgtcaatggcataaaaaattgtcgttttgtctgtggtaaggctgaagatgtgatggggccccttctcacagaatatcttggttcaccacagcagcaggctgcagcttctaaaagtaattctgaaatcgatgatg

SEQ ID NO: 45655 - DNA, 472 bp, Zea mays
  unsure (1)..(472): unsure at all n locations
  Clone ID: MRT4577_141643C.1
accggccggaattctttgttgacccacgatacttccacgcgaccgcgaccgccncncatttttgtgtcctgtcggcctgggtgccggccagctcctcaaccaaggcacagtgagtctccttttctcttatcttcccctttcctttccccacggcgagctgctcaatctagacgcgtcgcttccttggagccacttcagcggcatcttttcagatccaccagatctagctcgcgcgtagggagctccttctctcgttcggcgagaacactccattggatcagatcttctcgcacgtttgatcggtcttgtgttttgtgtccaagcagctttattgggtttggttgctgcttgctcccgttgaatttccaagacataatgcaaacatgggtatggacagggttaggggcggtaactcttgtcagtctgtgataccttttatattcatttctaatagcctaatactttggtactg

SEQ ID NO: 45656 - DNA, 334 bp, Zea mays
  Clone ID: MRT4577_141644C.1
agacgtgcaaccatccaatcagactgatatagaagccaattgttttagataaatacagtacaaatttaaactagattctagtctatcttaaaaccaaaacatttatcggttacaacttttatcctatgcaatatctcttaacttcctcgctcctgtctttttcaggatcctgagtcactaatctccgacgatgctgttgtcgtcaatataatgtagtagctagcactactacattatcaggcactaccaccctgcctgtatagtagtagcacgaaatcatggagaggctaacaatggcaatcggtgtcatcttgcacaaaaatgatgatgaaaa

SEQ ID NO: 45657 - DNA, 588 bp, Zea mays
  Clone ID: MRT4577_141645C.1
gccgcccgcgtggcgttcgagacgggcacggcgccgatcggcaacaggatcaaggacagccggtcgtacccgctgtaccgcttcatccgccaggacctcggcgccgtgtacctgaccggcgagaagctcaagtcccccggcgaggagtgcaacaaggtgttcctggcgctcagcgagggcaagctcatcgaccccatgctcgagtgcctcaaggagtgggacggcaagcccctgcccatctgctaagcagcaggacgccgccaccggccggcgccggcgccaagaggcaagaggatcgaggaggagatcacaccgtaccgtatgcgagaaaggaataaagaagggagtatttttcagtattctcaaggcttcatttcgtttgcgacttgaagttgaagattattattatatgttgttgttctgtgttcgtccttttttttgtgattgtagcagtgatccgtgtaaacgtgtattctgtctctgttgttcttaccttgctgccatgtcattggccatggtctgccactcagcttttctgatctgtaatctacttattttgaagtaaaatgcactactactatattgagt

SEQ ID NO: 45658 - DNA, 177 bp, Zea mays
  Clone ID: MRT4577_141646C.1
ccgcacgaccgccggattccgggcggcgcctttttttatttaatttttaatttattttttggcatctgaacaaatgtaatctgcttatatgagcattgaaacatctcccgttagaaaattgataggattacacatccttatctctgtttcagacctttaaatgacatacaaactaat

SEQ ID NO: 45659 - DNA, 982 bp, Zea mays
  Clone ID: MRT4577_141647C.1
tcgaggccggccgggccgggaatatgccaacgtttactaaacatgcaagtgaccaactgctcttctgccgtctagtcctttgtactgatcggcgctccggtcggctcctcgcgcttgcgggttccccgtccccaccccacgccgggggcaagagatggagaacgcggtggtgctccgggagtggtttgaccgcgtcgacgccggccgcaccggcaacatcaccgctgcccagctccagggcgcgctcgctgtcggcaacctcaacttccccatctccgtcgtgcagcagatgattaggatgtatgacttcgatcggaatggcaccatgaacttcgaagagtttctggctcttaacaaattcctacagaaggtgcaaaatgtgttttccaccctggataggggtcgtggatttctaagtcttgaggaggtgtaccaggcattaatcaaacttggtttctcgttggattcaccagccttctatactgtttgtgagagctttgacaagagcaagaagggcatgattcaattggatgagtttatatcactctgcatttttgttcagtcagctcgtaacctgttcaattcgttcgatacaagcaagcaaggaagagtgactttagattttaaccaattcgtgtactgcacggcaaactgcaggatataatgtggttgtacatggacgcccaaacaaaaaggttagcagtgtgaagtgggaaccgttcgccaatcaaacttcgttactgaaccggcagctgggtattacaattcactgttcgccatctaaggcttgttgtatcatcattttgcctgaatatattcttggtcacctattggtcaatccgtctccagttttcttacatcctgggctgtatatacagagtaagacatggcaatttgtggctgtatatacagaataagacttggcaatttgtggctgtatttatataaaatatttcaagtaatccagacattcactcctttc

SEQ ID NO: 45660 - DNA, 1136 bp, Zea mays
  Clone ID: MRT4577_141648C.1
cctcgaggccggccgggaatctcgatctcccccgaaacaaagcaatcacccgagcaaagcagtgcggagcgacgatccagcggcatttcgcattcgacgaacgaagcgccgccatctgatccgacacgcagcgcaatggcggcgggactgaagaggccgtcgttcgggacgcgggcgtggcggctgctgcggctggcggtgctgtgggcgcggaagggcggcgcggcgcacagcctgcgcctgcgcctgctccgcacgctccgccgccacggccacggcctcgccggcctgggcggcgcgcgcggcgaccggctccgctgcggcgagcgcgagtactccatcgacgagacgccggcgttccggttccgcaccccgtccgcgcgcgtgctccgcctcatcccctgcatcgcgccggccgtgccggacacgccgggcctctacggcgacgaccgctacttcttcagcgccgccgccgccgcgtgggagacgggcgagggcgccgggtgctgctacagcgacgtcgaggatgaggaggagaacgacgaagagccgagctgctgcggcgatggcgagctgctgctggagcgcgtggtggcggaggcctgccgcgcgagcacggccggacggtcggtggcagcggacagcggcgaggacgccggggtggacgtcaaggcggacgagttcatcgccaggttctacgcgcagatgaagctgcagcgccagatctcgtggctacagtacaacgagatgatggagaggagcatcagctagatttatctttcttttcattcttgcttactactagtactaccagcgattgagcttgagctctgtacatttgctctaaaatttcttttgttgctcccaaaattattattactgcaatacatatacatgatacaatttttttttcaaaaaaaaaaaaataaatgagtccacgcggcccggccctgctcgtctgtttgtgcatttcaatgtagattaggctgccactagattgatcactgattgattttgggctgctggttttctggttgtatacaggtgtccactttacataatgcctgaatgatgtgttgtcctttaaaaaaaaaaaaaaaaaaaaaaaaaaaaaaaaaaatacacccacgctcacg

SEQ ID NO: 45661 - DNA, 313 bp, Zea mays
  Clone ID: MRT4577_141649C.1
ggtatgttaacatattaagcatttttgggtttcaaaccacactcttcaaacccaaaaaaaaccaaatttatttaaaaacaaaaaggggtcacaaaaaatccttcacaccttaaaactcaatggggggaacacaccctctccacctaaagctgctaactctcttattcaaactggtccaacttttggcaaacctgcaaggttaaatttttacaaaccacaaatttttattaaaaaaaccccggcttggcttttttccaaaaaacccaacctcaacccccaaaattcggcccactttaaaatataacaaccccaa

SEQ ID NO: 45662 - DNA, 423 bp, Zea mays
  Clone ID: MRT4577_14164C.1
acggtcaggaattcccgggccgacccacgcgtcagattcttttgtttaaaaaaatctgactagatatatagaaaatactatcaatattttcattgctgagcaattttattatggaagtatattccatgatcaatctagtgatacctaatatacgctataaatattagtacttctttgtatatatttagtcattttagaagaagagacttaattccttaaaatgagttgtaaacgaaatatcaagtttcatatggaaataatggccaccctttttttaaagggtatggccacctaaagtgctggcctggattacatttgccacgtccggattcattcagtttgtatggcatacagtcatagaacgcggctaaccatcttcttacattacactgcagaactttggaattgatgggaagctagtgg

SEQ ID NO: 45663 - DNA, 216 bp, Zea mays
  Clone ID: MRT4577_141650C.1
aattaagagaattgaattttgctaatatagtttcattagctcctgaagtattatggatactagtacacgagatataggtcaaagaaaaaattagtatattctgtctcacagtatattctaaaaattccaaaatttaagaaaaagggaaacctggtgattaattgaatatttagagggacctaaaatttgaagcctatgggctaaggacactattgc

SEQ ID NO: 45664 - DNA, 319 bp, Zea mays
  Clone ID: MRT4577_141651C.1
tcgaggacatcgacatgcggatccgcgtccgaggcggcgggaagacgtctcacatctacgccggccgccaggccgccgccaaggggctcgtctgctactaccagaagtacatctacgaggccgccaagaaggagatcaaggacatctgtacccgctacgatcgcaccctcctggtcgatgacccctagcgctgcgaaccaaataaagtttgctgacgtcgtgcccgcgccgagttccaaaagtcgtaccgctgagcgggtgcctgctccatttcaagttttcaaaaccaggtgggggttgctcggcttatttcctatcc

SEQ ID NO: 45665 - DNA, 410 bp, Zea mays
  Clone ID: MRT4577_141652C.1
gcggtttacttggccgcgcagcttatctcgctgtttccagaacacttgcttgacccatgcattcaccgtgatccatggatgcacgcagcatatgtgcagccggtcggacttcaccacgcccaagggtgcgctcgccctgcttactgttcccaagctcgtgcttggttccatggacggtgctccgctcagcttaagtctcatgacccgtcgacctggccgcggttcattgggatgcgcgcgcgcacatttctgtgctgccgcacctccatgagcgcgctgatgtgggcatgttccaagcgcgcctctgcttgcttgtttcttgttacaggcgccggatttcctgcgggctccctatcacacgggcgtatacttaccctagcaattggctggcgctgcatcacgcccagaaa

SEQ ID NO: 45666 - DNA, 602 bp, Zea mays
  Clone ID: MRT4577_141653C.1
gccggccgggctttcgcaaaagccactggcctcgcgcctgccgaactacggttggacagcgaacgagacgtgatcaggcacgttgtggcctctctcttcgacccgggaagccgcctgttcagccttggccgccgccgccaccgccgaggatgacagctccccgtggccccctcatctctgagcaacactacggaggagcaaacaccgccggagcgaacgctgaaacgtgattctacgctgtttccgctagagacagcccataacactccttgcgccctagatctaactgagggcgcggcgtgccagaaacctcctccgagccgatgagctccaacgcatcctcaaggagctccgcaagcgccgtcgccaccgtacaggacctcaatgaagatacgtctctcctcctttcaatataggttgcttgctgtgaatagcctatggaacgcgtctatgaaatgatatgggacttttttcgttgttgcatgtgatgctgtacatgacagtatcatctgtgtcttcgtatttgcatttgacgcgtatctgaatgtgaaaggctgctatagaaagagggaaaatgtctctcgaccatgatgagataatgc

SEQ ID NO: 45667 - DNA, 262 bp, Zea mays
  Clone ID: MRT4577_141654C.1
caaacaagtaagagcgcgagtttctttttttggttagaaaatccaaatggggaggacctcgtcgagtgcagattgacgaactaaagattgatttgtctaagcatttcctagaagatatacgcttgcaactattgaactcaaattttaagagtcagatacatggtattgcattgctacatagggcacttctttctagtgggaaagaagcgattgaacttcttgtcatactattaaagtggatcggcttacgctattcagtacc

SEQ ID NO: 45668 - DNA, 388 bp, Zea mays
  Clone ID: MRT4577_141655C.1
ggcgttgcttcctcatcatctggtacaacttcttcgtccaccggtgcatcctcatcaactggttcttccactggaactagcagctcgactggtgatgcctccagctcctcttccggcgttggtacaaacagcacttcctcttcaactggtcttactggtggctcatcttcatcctcttctactggttctccaatcggcggtaccaacagcagcagcagcagtagttccaccggttctggaggtgtcggtgttgatccaaacaatagtgcatccaagatgtcaacttcatttagctggataatttctttcttcacggcgctcgtcgcaatgaagctgactcgccagtaaattgatcccgagcaacaacaggtcgagagtcgtctgatct

SEQ ID NO: 45669 - DNA, 493 bp, Zea mays
  Clone ID: MRT4577_141656C.1
gtaccagaattaacattaatgatattcataatacaatgttacctttggttcgccagaaggtgaggatgcaaagacgacgcgagagaaagattacaatcccgcccccttagtacagtgttactgttcatctatttataggcatgggacgcagcccggataagattacattcataccctttacatttactcttagttataatacaagttatcaaggactaagtagtttttcccctttaggtcggtttcgtcttccatccaagccgaagctccttgaaccacagcttcggcgtccatccaagtcacctttaggttgttattcatatcacagacctttatcatgagagaactttcatcccaaagtcgaagcttcctgtaatagtctatatcatactgaaaacaaatgattagtcacatttttgaggaccttcggaagagggaggccctcaacacataacttggagaatattgatcccaaatttggtcaacaaatttt

SEQ ID NO: 45670 - DNA, 237 bp, Zea mays
  unsure (1)..(237): unsure at all n locations
  Clone ID: MRT4577_141657C.1
gcacagaccacaccagcaggcagnacgggacagcacccccagcgacccggggcggccgcgaaccgagcagacaacccaccacggagaggcacgcagagcaggacgaagcccgagaccaagaggacgaacacgagcagggccgatgagacgaccccaaccatacgcacagggcggcgccgacggcaaccacgagctcagaaacatgcggcagggggagcgggcaccgcgcaaggagcg

SEQ ID NO: 45671 - DNA, 361 bp, Zea mays
  Clone ID: MRT4577_141658C.1
catctatatgggtcacagggccatccacaacgagacttacgccatcgtgatgtccaagcctatctagaaggaactgaacacgtacagctccagaacgatcccccagatggagatcctcaggatcgccaaggaaaactccgaattcactactggcaggatcatgatgaaccttgacctaaacaaaggcggcagcgggcgctacctaaagacggtgaactatggacagttaaggagagacgaccctgactatcccatgaaggtcgtgaagcgactcaagtacggtaaaccatatgactaaggcagccatctttgcagtacgaagctcttctggatcttgagctctgaatgccgctatgatatg

SEQ ID NO: 45672 - DNA, 1516 bp, Zea mays
  unsure (1)..(1516): unsure at all n locations
  Clone ID: MRT4577_141659C.1
ggaccctcgaggccggccgggccgatcatcagacgttttccaaaatgaaaaaaaaacagcatcagatcaggtgacatggcatctcattatctcaacgctgctcacctcgaggttttagctgctgctgctgcgtgctgcccgtgccaagtccggagcaacagcaaccaaccaaccacctcctcccctctccgtctcccagtccggcctcgctcgccactcggagtctcggagtcaaccgccagcgcctcgatccggcgaagcctgcccagcccatggcctccggcgccgtaccaccgcagcgggtcgccctgctggcgctcgccgtcctctccgtcgtctcattcccgcacctgtccctccccgcctcgtcccatccgctcccgcaggaagctgctgctgctgctgctgcgggtgcggcggcgggaggcgaggcgtccgagcctcacggcaccgccgccgatggtgccgccgtggcgcggcgcgcgtgcacgtacacggtgcagatcaagacgagctgcgcgtccccgcggagctccgcggacgcggtgagcctcgcgttcggggacgcgtaccgcaacgaggtgtacgcggcgacggtgacgccgcggcgcgggttcgagcgctgcgccacggacacgttccgcgtcgccgggccctgcggctacggcgtctgctacctctacctgcgccggtcgggccgcgcggccgggtggacgcccgagtgggtcagggtgtacgagccggcgtccggcgcgccctccaccttctactacggcgacccgctccccgacggcgtctggtacggcttcgaccgctgcgtcaaggccggggccggcgcctctgccgagcatggtgccgcggcgcggacgctgtgacggacggacgcggacgccgccggtctctgggcgacagggcgaggtagcagagcgccactcgtggcgcgcggtcctgctgccgtgtcaagcgatgattgctggggcacggcgtctctttctgtgcaagtggagtattcatttcgggtggctgctagtagtaatagcttctctatttggtctatttgcgttacgtgtagtacgtgccacgcataataaaaagtagtacgtatgtctgaaaaagaaaatatgagtcctcaaaggattttctatgcaacgctagcaataaaaaccgatccaatctgtgagttgttttttaaaaaaaaaaaaaaaaaaaaaaaaaaaaaaaaaaaaaaaaaaaaaccgcctcccctttccgtttcccagtccggcctcgctcgccactcggagtctcggagtcaaccgccagcgcctcgatccggcgaagccagcccagcccatggcctccggcgccgtaccaccgcagcgggtcgccctgttggcgctcgccgccgccctttccgtcgtttaattcccgcacctgtccctcctcgcctngtcccatccgttcccgaaggaagctgctgctgctgctgcgggtgcggcggcggaaggcaaggcgtccgagcctcacggcaccgccg

SEQ ID NO: 45673 - DNA, 341 bp, Zea mays
  Clone ID: MRT4577_14165C.1
ataatagttctaaaaaattgcatcatcagggtttcattcatcatgagctcattgatagaaataatatggggaacgaatttattccaccaaatttataaaatcaacttatgatgcacaacatcatctaaaatagattgactcttcaaaccaaatgcccattagtttttctggcttcacgcgagaactctttcagtagagttctatggtattacatgtactgcgcgagccattggttacacatatcaagcactgtcaatggatttgcatgtaatgcctgatgggcaacatattgaacattagcgacactttccctttgagcgggtatttggaatgcacttttt

SEQ ID NO: 45674 - DNA, 263 bp, Zea mays
  Clone ID: MRT4577_141660C.1
cggacgctggtcgagcgaagtcatcctcgccaacatcctcggcttcatcttctccttcaacggagtccaatccgccggcgacaccgacatcaaccccatctccaccgtcgcaaaagcctctcagctgatctttggtggcgttgcgaaaggacagggtttaggccaagtcgacggtatgaggctcaacttggtcggtggtattgttgctggtggtgccgctgctcagagcacggatatgactggtgatctgcagacgggtcatt

SEQ ID NO: 45675 - DNA, 898 bp, Zea mays
  Clone ID: MRT4577_141661C.1
aattcggcacgaggcacgagtgggaagttttcttcttcgtgacctcccgctcgctgcgccagccaacccaccacccatccgtttctcgttctccggcccctgcctgactcccctcctcccccccttaacaatggcagtacaggcgcagtacccatccaatctcctcttccacgacagaggtgagccggacaggaagaaggcgatggacatgcccaagccgccgcagctcgccggagtctcgccggcggcggtctacttctccggcggtggagcgagtgggaataatcggaggaagcgagccagggaggccatggcgccgccgccggcggtcaaggaggattacgtcaatctgttcgcactccagcagcagcagcagcagcagtcgatgcccttcgccaacatggcgctcttccagaaccagaacagagtctcgtcgtcgccgtccccggccgcgacggcgctcgtgtccaccggcctccgcctggcattcgacgagcagcagcaacatctgctacaacagcaggagggcaagcagacgaatgccttgcgctattcgtcgccgccctcgctgttcgcctctgtctccgacgagctcgccgcgcaggcgaagcagcacgaagaggaggtcgaccggttcgtccgcgagcagggcgagcagctcaggcgggcggtggccgatcggctgcggcgccacaaccgggcgattctggtcaaggccgaccagtccgcggcgcgcaggctccgcgagaaggcggcggaggcggagcgcgaggcgcggcgcggcgccgagctggaggagcgtctggcgcgcctccgcggcgaggcggcggcgtggcaggccaaggcgctctccgagcaggccgccgcggtcgccctgcacgcgcagctgcagcaggcc

SEQ ID NO: 45676 - DNA, 478 bp, Zea mays
  Clone ID: MRT4577_141662C.1
ggcggaccagcgcggtctgcctgcgttggttattgtgggggaactggttccttccgcgtctcgctggctgattcactgtgttattcataatgctatggacctgactcatcagtagttacacgacgatactgctcatctaacgccaatattgcttaaggggtagtgggtgggtttgtcttcctggtgcctgctgattgtgtcccgcagcagttgctcttgttcctgcaggctggaatggatcttgtcctagacttcagtgaagttctcattaactgggggttctggcattctttctgtcgcctgtttggcttgcttaagctcttttgtcactctgctcctgagctcagattctttgcttcagaccgccagctcttcccctgaacccgtgtctgcggatctggaaatcggacccctcgctcctcgccactgctcactctcttcgactggcctgtactggcgcgattcatcggctgtcgac

SEQ ID NO: 45677 - DNA, 486 bp, Zea mays
  unsure (1)..(486): unsure at all n locations
  Clone ID: MRT4577_141663C.1
gaaancnccaaggannnncggcggcgaaccccttttccccgaagaacagggggagaggncncgncgncgancgccaaggacggcacgggagggancgggaacacgccgcgggcgcaccncaacaaggggaccgaagggggcgncggccgcgacgccgccaagcncgagnccaaggagcccggcnccagcgncaaggaaaggangggcnacagcaagancacggacgcagaggagaaagggcngaanaccccaggcgagagggcncngaaagaaccaaccagcggcaacacaggcaagggacggggccanaaggacgccgccaagggcaacaaaccnacacccacaaagcccgccnccaagagcaaggagaggaggaacaaaacgaagggcgaaagggggggaaacgggcccgaccgaaccacccccggggaaggaaagggagccggcaagaaaaggggaaagagaaaaaaggaaaagaaacccaaa

SEQ ID NO: 45678 - DNA, 366 bp, Zea mays
  Clone ID: MRT4577_141664C.1
atatgatcaaatgccatctcccaccggaacaagtacaataacaattcaattggaagaaatcttcccttgacaaaaaactgcgtatccaaaatcgaaagaaaagggaagaaccggtgaacgacttacaaatagcactcgataaaatcaaatcagcaaactaggaattcgggttgatagaagtaggacctagccatcgattaatggggtgggcggtagtagctgtaggcgctgtagaaggtttgcgtcatggtgagcagcagcaggaagacagcagcgacgacggagacgatcgcccatgggttgctgaagtaggtatgctgcaggctggccacccacgtgctccacttgtggtcgtagtacctgttg

SEQ ID NO: 45679 - DNA, 479 bp, Zea mays
  Clone ID: MRT4577_141665C.1
cccgaaaagaaaaatcccggttcacttaagggttgccaggggccgggaaaacattgaaccccccgccttttacgggggccaaaaaaaaacccccccaaaagtccccaccaaccccaaataaagtttaagggggccccccgcaccaactggcgataacttttgggagaaactgggccagccagcaactggggcacacttaaaactgacaacaaaccggttagtccacctccttaattttggggccagggcccccctttccgggaggggggtccttttccatgcccccagggccccccatttttttaccccccccctggtacattttggcaaaaaaggggttgcaaaggctttccaactccttaattttggcctaaaactcctccccctcggggagctggttggggtccaaccaactgatggccccgtcaaaggggtcctcaatcttttttttggaatcggccgggagtttggacccaatt

SEQ ID NO: 45680 - DNA, 417 bp, Zea mays
  Clone ID: MRT4577_141666C.1
aaagcttgaaccatcaaaacatttgattcacctaacacatttcttacaatattttaaacatcacacaatgcaggggatggagggacactattataaccatcataatatgtcctatttatatgagtgtcgacttagccaaccccatgagctcctataattggccgcacttccaattacatatgtctatcccatctaaagattcctcataattatcacacgctaacatatttgtgttatgcgcccattaacagtacattactcatccatccattataattgacagaacctatcatttttaattttaaaataatgtatttataatgccaatagtcattcactaaagatatactttgtataactgaactaaagacataatgctataccaagtcttaactatatttttcatcaaaagtgact

SEQ ID NO: 45681 - DNA, 502 bp, Zea mays
  Clone ID: MRT4577_141667C.1
gacataaaaaacctcacaaaaatgacttatttcacctgaaacgtgcatgccaaactataaattacaactttcttttgcacctcaacaaagattgaaacttaaacaaacaacaacccaatgcaacatgggcagacatcatctggccctacgaattcattatattctacaattgctttgcaatggattgttactccaccccttacatggatccatctgaaacaggcaatatatacacctgtactaaagttaaagagcattattatcagctgggcctatactatttggaacacataacatcattaatgctagagggattgtgtaagtatttatcacgctcgatcctacagataccaacattctcccgccttttgtaacaaactcatggatgggtgttataccattgggaccttactgatgtaccaaaatttacatgtcaaggtctgtgtctacacaccaattgcatggttatataagtcaataattggacctattatactacttt

SEQ ID NO: 45682 - DNA, 631 bp, Zea mays
  Clone ID: MRT4577_141668C.1
cccccccccccccccccccccccccccccaggaacttaatattctttaaattaacatcacaaccgaaatagttcttacaatgctgataactcaagacacatagttcatgcaattaaaattaacaatgacaatagttcgtacaatagaatgcctctagaaactaaattaagaacaaggctagcagtgagctatgatctaattcatgcgacgagccataatctcagcttgaatgctcaggtaatattgctgctgcatctcattcatggcactgagatcaatggtcattattctatcttcttctgcaatcctcttcaagaaattattgtttgcctcgttggcaaccttctccttctttagcgcaatcctctccttttctagttcaagcatctctttgtccagagcaaatgactttgcatgtctttcttctctcttcatctccttctctgcatcatcctcaatcttttttgcctacagaaacttcaatgcttctttgcaagcatcattgccaccctgacgtgccgcctcttttgccttcttcttacccaaaggtctttgtgatggttccatctctggaatctcaattgcattaggagcagcatcattaacctccttcattgatcggacgcgtggg

SEQ ID NO: 45683 - DNA, 287 bp, Zea mays
  Clone ID: MRT4577_14166C.1
cggctcgaggattagaccttctggagaagtaaacaatttgtccatcttaggagcaatttggaatgggagtttttatttttttctgtaacgcccatcctgcctgcagtagaccctttgggcttaagaggtcctacagattctaatagtttcctctttgtagatgtgttaacatatttaaaatacttaggacatggcctggtacgtgacagatggtgtttaacatcattgtcatatgaagaacactctctgtgggccaatggaggtgtgccttaaaattcttcatcttg

SEQ ID NO: 45684 - DNA, 825 bp, Zea mays
  Clone ID: MRT4577_141670C.1
agtacttgatctgactgaggcacccatttccccaagccacaaaagagacgagcatgacaagcgaatccgccaccgccaccgtgatccagatggacgacggcagggccccggttgttgcagcgccggcaccagcacaagcactgggagcggcgccgcgcaagacgaccaccggtctcccgttcctgctgcgctcgggcgccaaggggttccggtgctgcctggccgtggtggacttgctgctgaggttggccgccttgggcaccacgctggcggctgccatctccacgggcaccgccgacgagaggctgtccgtgttcaccaccaccttccagttccacgcgaggttcgacgacttcccggccttcacctccctcctggtggccaacgccgtcgccgcggggtacttggtgctgtcgctgcccttctccgtggtgggcatcgtccggcccagtaaggcggcgacgggcgtggggctgctgctgctgcttgtctgcgacgtggtggtcatggcgctgctcacggcgtccggcgccgctgccgcggccatcgtgtacgtggcgcactcaggcaaccggcgcgccaactgggtgcccatctgcatgcagttccacggcttctgccagcgcaccagcggctccgtcgtcgccaccttcctcgccgtgctcatcttcgtcgtgctcgtcctcatggccgcatgcgccatcagacgcaggcccagctaggaaccatccgtaatttccatcagagcatcgctctgtcctacactacactacactagacgtgttaggggttcattacattgcttcctgcttgttgctgaaccaa

SEQ ID NO: 45685 - DNA, 234 bp, Zea mays
  Clone ID: MRT4577_141671C.1
aaagaatcacagcacaaaacctacaacagcggttagttccaacaattaatcaagtagttgcagcgcaccttgctgcttaccttcaggagcaccaatttcctccattcactcaactagctggggtgaaccctgctgcttagtaccacgcacaagagctactaccattcaaccaacttgtagggagccctgctgccatcttattgcagcaacagttgctgggattccgtctacaag

SEQ ID NO: 45686 - DNA, 301 bp, Zea mays
  Clone ID: MRT4577_141672C.1
ggggcgaaaatgtcaacaagacattactcaacacgttgggggcaaaacaaaagggaaccccctgaagtcaggaatcccccctccctggcaaaagtaacagggcaccctcatttggtccaacgggcgtgaaaaaggggatggaaagtcaaaaaaacaaaacctggcccccaaaagaaagggatgggatcttggttttgtacaggggggcattaaaactataaccctgcccagcagactttttaagcgttaaaccaacaaataatttagcccaattttgacccaacacccgttgctttgtttt

SEQ ID NO: 45687 - DNA, 206 bp, Zea mays
  Clone ID: MRT4577_141673C.1
cggctcttatacgactactatgaggaaagctggcgcgctctgcaggctccggatcggaatcaatgccaggctagacgagctgaataggccttggccgatccagatctaaaagaagaccatgattcagctcgacctctacgtcgactatggaacttgactgcagacgtgcacgatacgtgggaccctccggctgcaccaaagacacc

SEQ ID NO: 45688 - DNA, 390 bp, Zea mays
  Clone ID: MRT4577_141674C.1
ggcaaaaaagggggggtttgaatcatttcctagaaaaaagccttttacagttttaggggcaaattgggattttttaccttttttaacaagaataaagcttttgctaccaaagactttaaaatttgaaacatggggctttttaccggttgggggttcataagatgtttttttggggattcggggtaaatacaaccggttgagggcgtaacagggggggttgaccgcctccgcccaaaaccgatcctaagttttggactcatcaagcaggggccttaccatggccaataggggtttatttttcctttccactacaccattttgttgggatgggtagggagaaaaaaactcatgcttggggccctcctcctcaagggagccttcaatttgggg

SEQ ID NO: 45689 - DNA, 3026 bp, Zea mays
  Clone ID: MRT4577_141675C.1
aggccggccgggccgggctccaccctcctatccccccacctcactccgcttgtgcggccgcgtggtggtgcctcccgcggcgctgcggctgctctccgatcccgagcgagcacatatcctcgccaccttatcacgaggccctcgcaccgcgccgacgcgatcagcgcgtcgagccaccggagtttccccttgcgggattgcatctcaagaatatggggagaaagaagaaccccattgtctttctggatgtatccgtaggtgacgagccagatgaaagaatgatctttgagttgtttgctgatgttgcaccccttacaactgagaacttcagagctttatgcacaggtgagctgggaattggacagaagactaagaagcccttatgttacaagggaacattgttccaccgcgtgatcaaggggtttatggcacaaggaggtgacattgcaaaagaaaatgggtctggtggtgaaaacatatatagtggaaaatttacagatgaaacttgtgttctacttcatgatgatcgtggcctcttgacaacagcagatactggattcaaacctagtggctcccagttctgcattactttcaagcctaattctcatcttgacaggaagcacacagtttttggcaagcttgttgttggaagtgatgttctgaagaggatcgagcaagtagatgtgcaatcccctgattcaactcctgttattccagttactatagtaaattgtggagagctcattgaacgcaaagatattggctctatgtcaatagaaattgataaaaagagggctgccaaatcaaagttgacaagggatataacttctgacgaggaaagtaatgaaggacaacacaagagacgtcgtaacaaatcttcaaaaaggagaaggaagaagaggagatattcttattcggaatcagatagctcttctgagtcagagactgaatcatctgattatgagagcgattctgatacttactctagtgactcatctgatgtcagcagctcaagtgatgacaggcgaaggcgcagaaagagacactcgaagaaaaataaacgcaagcattcaagaagaaagcgtgaccataggcgcgaaagaaggcgtaggaagcgtggtaggaaatcaaaacagaagtcaaaaaggatagtaaagggtgatagtgaagctgaaagtacgggcgatagcagttctgaagatgctagaagcaagagacaccgccgtgggcggaagttcaaggcatcatctcaagtttctgaggaaaatcttgctgcagtggctgctttgaaggatgccacctcacctcaacaaaagagtggaatacagaggagtccagcacaagatgtctcctccctgcaaaatggggaagtccatacaaatggtgttaatgactcaaaaattgaaagaaatgccgctgtcatgcctgttttaactggcaatcgaagcaaatctaggagccagagcatgagtgttaatcactcaatgagcaagagtatgagtatcagtccaagaagaagcccaatgaaaaggtcaagtaccagcccaaagaggtcacttagcaggagccctgttgacaataatcgcagtagaagccctatccgtactcccaaaagaagcgtgagcaggagtccagccaggcggcagagcatgagcaggagccctgctaggagcccacccagaaattcaagcagaagccttcacataagcaggagtcctgttaaagcccacagaagaagcattagcaggagctcagctaggtccatgcaacagagaagtccaagcaggagtctggagagaactcatgtacgaaaaagtatcagtccaagcccaccattggcgaagggaagaagcattacccgaacccctgtggcatctccattgcgaagcgttagtcggagcccagcaaggatttcaaggagcccacataggccttctaggagaagccctatgagaagtccacgatggaacatacgcagaagcctcagcaggagccctgcaagaatacctagaagaagtgtgagcagaagcccagtaagaggtggtcgacctcgcaggaacattagcagaagtcccagtccacatcgcagggtagtaacaccaccaaacaatggaagaagcccatccaggagtggttctcctgatgggtcaccaaaacgcataagacgtggacggggttttactcagaggtactcatacgcaagacaatatcgctcaccttctgctgatcgctcacatcgttatggtggaagaaatgaccgtgacagatacatgggttaccggggttcccgccatcgatcacctcctagacggtatagaagcccacccagaggaagagtgtcatcgccaaggtacaggaggaggagccgaagcgcctcacgcagccctgtctacagggaaagaggaaggggaggtggatacagcaaaagccctatacggagcagttcaccccctgccaggaaaccaaggtcacatggtgaccgtgcacggtcagtttcaagaagccacctttctgggtcagtatcaaggtctcctccagtgcatcatccctctccacctgattccccatcagtgaagcatgcaagtgatgagaaatctcagtccgcgtccccagctctgtcactgtctggtagccctaatcgtggaggcaagaaaggtttggtttcctacggggatggctcacctgattcagctgggaagtaggtttccaccggggcattgaaatgtatcttacaccgttagccattggctgttgatcaggtccatcaatactttttgttatatttctactgtaagaagcggtttggtccttgagctgcccagctgttacatatgttgtttgggatgatcggctatgtcctttggttatcacaagagtcgtaatttgagcttaggttttgctgttgctaaccatgtagcccagattcagtgtggggttttgatgttatataagcttcaacccaaagaatccttccaatgttttgcccccggatgcctaagtacgattccccatttattttttttgcc

SEQ ID NO: 45690 - DNA, 432 bp, Zea mays
  Clone ID: MRT4577_141676C.1
gccagatgaaagaatgatctttgagcatgagttacctttccttgcagttgtttgctgatgttgcaccccttacaactgagaacttcagagctttatgcacaggtgagctgggaattggacagaagactaagaagcccttatgttacaagggaacattgttccaccgcgtgatcaaggggtttatggcacaagatgcaagacagatgatatcgactgcttttcttatcatatagtatttaaggttgtatgcagtattgtctaagtttgatattctaataatgagtagcaaacttgtttgttttcttagtcataactgctgagcttgctttgtttttcagggaggtgacattgcaaaagaaaatgggtctggtggtgaaaacatatttaggggaaaatttacagatgaaacttggggtctacttcatgatgatc

SEQ ID NO: 45691 - DNA, 289 bp, Zea mays
  Clone ID: MRT4577_141677C.1
aaaaggggggggcccggcccccgggggaaaaaaaaaacggccgggcaggccacaacccccggaaccattctcgcctttttgggaaggggggcccacttcagcgggtacggacaaacggaccccattctttccacgggtggggttaaatttcttggcaaaaagccaagcgaccggaaggggcgttttccccaagaacccagttctctggagccccaccccccccttttaaaaccaagcttcaacccccaccctttcgggcccccggaacaaccccatccgggggggccca

SEQ ID NO: 45692 - DNA, 1012 bp, Zea mays
  unsure (1)..(1012): unsure at all n locations
  Clone ID: MRT4577_141678C.1
ctgttttgaattcggcacgaggtttcatctgacattgataagcaggagnnnnnnnnnnnnnnnnnnnnnnncaatgagcaagagtatgagcatcagcccaagaagaagcccaatgaaaaggtcaattaccaccacaaagaggtcagttagcaggagccctgttcaccataatcgcagtggaagtcctgtcggtgctccccnnnnnngcgtgagcaggagttcagccagaaggcagagcatcagcaggagccctgctaggagcctcagcaagagcccacccagagatgcaagaatacttagaagtgtgagcagaagtccagtaagaggtggtcgacctcgccggaacattagcagaagtcccagtccacttcgcagggcattaacaccaccaaacaatggaaggagccgatctaggagtgattctcctgatgggtcacccaaacgcataagacgtggacgtggttttactcaacgctattcatttgcaagacaatatcgctcaccttccgctgatcgcttgcatcgttatggcggaagaaatgaccgtgacagatacatgggttaccggggttttcgccaccgatcacctcctagacgttataggagcccctccagaggaagagtgtcatcgccaaggtacaggaggaggagccgaagcgcctcacgcagccctgtctannnnnnnnnnnnnnnnnnnnnnnnnnnnagcaaaagccctatacggagcagttcannnnntgccaggaaaccaaggtcacatggtgaccgtgcacggtcagtttcaagaagccacctttctgggtcagtatcaaggtctcctccagtgcatcatccctctccacctgattccccatcagtgaagcatgcaagtgatgagaaatctcagtccgcgtccccagctctgtcactgtctggtaaccctaatcgtggaggcaagaaagggttggtttcctacggggatggcttacctgattcaactgggaagtannnnnnnnnnnnnnnnnnnnnaagg

SEQ ID NO: 45693 - DNA, 307 bp, Zea mays
  Clone ID: MRT4577_141679C.1
gcggcgaaaaaccaattttaaacaattttatttaccaattgtaccaaataacaatggtaggttttgacagtactaataacgtttgccgattaagatggggggggttattccgtatttaaaaacaggaatttttgattcaagcggggatattattcctgaccagtctaactcttacaaaaataaatagatctacgggtcaagtgtgtaaacatatttttggaacaaaatatttcatatattgttgacggggacaaccggcaaaaaaatctttttaacatctggggggaagattcttgcctcctgatgg

SEQ ID NO: 45694 - DNA, 268 bp, Zea mays
  unsure (1)..(268): unsure at all n locations
  Clone ID: MRT4577_14167C.1
ggccagcacaaccacgnacncacgggcgcacaccgngggagcgaggacgcgcgggcggcggcagaggcaggancaccaagagcagcggcagcagcagcaaccaaaggcggacggggaggacaagcagcccncgagcgggngacaagggaacggggaggggcaagggaggngaagcaggagacgagagcgccaaggacgagaaanaaccaagcaggggggggggaggcccacgacacacaaggagngaaggcnggcaaggggcagaagg

SEQ ID NO: 45695 - DNA, 338 bp, Zea mays
  Clone ID: MRT4577_141680C.1
ggctccgaacctttgggctgatttatgtgcttgtgccctagtattgtgtgtaactggcctgtccccctttctccttcactgtttgttggtgttgcgtgtgttgtttgcttgtcctagcatgatgctgagtaaggggaggcaaaagcctgcccggtgcgtgttacgcccaagaagcctctcctagaagacacactcggatagaactaagccaaggtcctcgcataatgaaagaccttgtaaagcactgtcgacgagcattttagttccgaattcccgtcagacgatccgtccttaaaaaagctattcacgaccggcggcaaacgttaaaactactccaa

SEQ ID NO: 45696 - DNA, 193 bp, Zea mays
  unsure (1)..(193): unsure at all n locations
  Clone ID: MRT4577_141681C.1
gacccactcgtccgcctacgcgtccgatgtgactgtctngctggaatccctgagtaccagaggtttgatatggtgtgttatactgtgaacgtgggctagcctatgatctatgtctgcagtctgcaccatatgttgaactgctggactacaacagctcggatcaaaagccgaatgtacaaaattaaccaagaac

SEQ ID NO: 45697 - DNA, 2969 bp, Zea mays
  Clone ID: MRT4577_141682C.1
atggaagcggcgggcaacgaccggagggaggcggcgctaggcgccctctccgtgctccctgacgaggtgctctgcgccgtcgtcgacatcctctcgcccgctgacatcggacgcctcgcgtgcgtcagcaggcttggtctatgttcagaaaataaggagatttggcagaagcctcgtcagttcgatggctttaattctttgtatctataccggagatggtatagatgttttactactttgaatagtttttcgtttgacgatggacatgtggaaaggaaagatgactttttattggatcagtttcgttctcagtatgatggaaaatgcccagttttggttacgaagttggccgaaacctggcctgcgaggacaaaatggacactgcagcaactgacaaaggattttggggaagttccattcaggatatcacaaagaagccctcagaagataacaatgaaactaaaggattatgtttcttacatggaactccagcatgatgaagatcctctatacatatttgatgataagtttggagaatcagcaccaacattacttgaagattatagtgtccctcatttattccaagaagacttttttgatatcttggattatgaccaacgaccagcattcagatggcttattattggaccagagagatcaggtgcttcttggcatgttgatcctggactgacaagtgcatggaatactcttctttgtggccgaaaaagatgggcattgtaccctccaggaagagtgcctggtggtgtcacagtacatgtaaatgatgaagacggtgatgttgacattgaaactccgacatcattgcaatggtggcttgatatatatccacaccttcctgaacatgagaagccattggaatgcacacaattgccaggagagaccatttttgttcctagtgggtggtggcattgcgttctgaatctcgagacaacaattgcagttacacagaactttgtaaaccagtctaattttcagcatgtatgtttggatatggcacctggtcacagacacaaaggagtttgccgtgctggcttacttgctgttccaggaaaattcgttaaagataataaaaaccatcaatctgtcacaatgagtggatggaaccaccctgatatgagtcgtaaggaaaaaaggcttaaaggttctgaagcactaagaatctcaaatagcataaatcattgttctgcatttgagttctcaggtgttcaagagagtttggagaatcaagatttctcatatgatattgattttttgtcacaattcattgagaaagaaagggaccattattcttctctctggagtccaactaattcaattgggcagagagaagcaagagaatggctgcgaaggctttgggttctgaaacctgatctgagagaactaatatggaagggtgcatgccttgcaataaatgttgacaaatggtattcatgcttagaggagatatgtgcatgccatagtttaccaccacctacagaggatgagaagcttcctgttggcactggtagcaacccagtcttcattgtctcgggcaatgtgattaaaatatatgctgaaggaggattggtttattctgtccatggtttgggcacagagcttgagttctatgatctcctgcaaaaaagtggttcacctttgatcaatcacattcctgagataattgctagtggcttccttgagtataaggatgatatctacagcacggttccgtggaatggaaaaggaataccagaaattttggttaagtactactcattggaggtttcttgtgcgaacagctgctttcctcttgggctttggagcaagcaacgatttgggatgtgtagttcggctgatgtttcagacagaccaatttggccttacatggtaacaagaaagtgcaaaggagatatttttgctcgcatccgcgatatgctgtcgaagactgatattcttcatcttgcatcatccttgggagttcaaatgcgaaacatacatttattacccctgccacccgtggagcatgtacctgaatctgggaacaatgatgtgaaagaagtggtaggaacatgtgatgataccacggttctacctgaatggcagcaacttgtctctactctaaataggaggaagcagaatgtaaaaaagcacctagctaactggggggactctgttccacaagttctagtagaaaaggctgaagaatatctccctccgaatatgggcttcctcatcaagtttgttaaggatgatggtgagttgctgtacccatgcccctcttggatacattcagatataatggacgataacattcttatcgaggggatcataaaactgagttcttctggtgagagggaaagagtttatgactcagatcgggacaaaataaatgcaattcacatcattgatttcagtgatctgtccattggggatcctatatgtgacataattccgctgcacttggatattttccggggtgatagtgaccttctcaaggaatttctacggagctaccaacttccccttctgaggggggaatcaaccaccgatgtctacagatcagtgcgaaactcgaagttcagcagggcatcatatcgcgcgatgtgctactgtatactacacgaggacaacgtcttgggagctatattcagcctgtggaaggagatgagggctgcaacgtcctgggaggacgttgagaacctggtctggggagagctgaaccggtaccaggactctgcagttcgctcagcataactaaacaccagcaaaaaaaaactttctgaacatacgtgtatgttgttgttcctccgacgactgtaacttccaaataaaaaaaagtgtagggaaaataacgaaggctcgacacggcatgcccatattttcctaggcagcaggcaggtaattacctatggctggtgataatattgagatccctgaaatggttctatgaaatgaaccgcagaccgttg

SEQ ID NO: 45698 - DNA, 641 bp, Zea mays
  Clone ID: MRT4577_141683C.1
cccacgcgtccgcccacgcgtccgctcagcataactaaacaccagcaaaaaaaatgcaattcacatcattgatttcagtgatctgtccattggggatcctatatgtgacataattccgctgcacttggatattttccggggtgatagtgaccttctcaaggaatttctacggagctatcaacttccccttctgaggggggaaacgcgtaccgacacgcgtccacccacgcgtccccccacgcgtccgcggacgcgttagcgcgcgatgtgctactgtatattacacgaggacaacgtcttgggagctatattcagcctgtggaaggagatgagggctgcaacgtcctgggaggacgttgagaacctggtctggggagagctgaaccggtaccaggactctgcagttcgctcagcataactaaacaccagcaaaaaaaaaaaaaaaaactttctgaacatacgtgtatgttgttgttcctccgacgaatgtaacttccaaatataaaaaaaaagtgtagggaaaataacgaaggctcgacacggcatgcccgtattttcctatggctggtgataatattgagatccctgaaatggttctatgaaatgaaccgcagaccgttgaaatcgtttcagatcggcaa

SEQ ID NO: 45699 - DNA, 3215 bp, Zea mays
  Clone ID: MRT4577_141684C.1
tgaattgtgggaattgatcggactttcttctcaacgcctcaacccaacccaccgaccagcccgaccggggggcggggggcgatggaagcggcgggcaacgaccggagggaggcggcgctaggcgccctctccgtgctccctgacgaggtgctctgcgccgtcgtcgacatcctctcgcccgctgacatcggacgcctcgcgtgcgtcagcagtgtcatgtacatactttgtaatgaagaacctctctggatgagcaaatgtctttcaatcgggggtcctcttgaatacaaagtttcctggaagaagacggcactatgtaggcttggtctatgttcagaaaataaggagatttggcagaagcctcgtcagttcgatggctttaattctttgtatctataccggagatggtatagatgttttactactttgaatagtttttcgtttgacgatggacatgtggaaaggaaagatgactttttattggatcagtttcgttctcagtatgatggaaaatgcccagttttggttacgaagttggccgaaacctggcctgcgaggacaaaatggacactgcagcaactgacaaaggattttggggaagttccattcaggatatcacaaagaagccctcagaagataacaatgaaactaaaggattatgtttcttacatggaactccagcatgatgaagatcctctatacatatttgatgataagtttggagaatcagcaccaacattacttgaagattatagtgtccctcatttattccaagaagacttttttgatatcttggattatgaccaacgaccagcattcagatggcttattattggaccagagagatcaggtgcttcttggcatgttgatcctggactgacaagtgcatggaatactcttctttgtggccgaaaaagatgggcattgtaccctccaggaagagtgcctggtggtgtcacagtacatgtaaatgatgaagacggtgatgttgacattgaaactccgacatcattgcaatggtggcttgatatatatccacaccttcctgaacatgagaagccattggaatgcacacaattgccaggagagaccatttttgttcctagtgggtggtggcattgcgttctgaatctcgagacaacaattgcagttacacagaactttgtaaaccagtctaattttcagcatgtatgtttggatatggcacctggtcacagacacaaaggagtttgccgtgctggcttacttgctgttccaggaaaattcgttaaagataataaaaaccatcaatctgtcacaatgagtggatggaaccaccctgatatgagtcgtaaggaaaaaaggcttaaaggttctgaagcactaagaatctcaaatagcataaatcattgttctgcatttgagttctcaggtgttcaagagagtttggagaatcaagatttctcatatgatattgattttttgtcacaattcattgagaaagaaagggaccattattcttctctctggagtccaactaattcaattgggcagagagaagcaagagaatggctgcgaaggctttgggttctgaaacctgatctgagagaactaatatggaagggtgcatgccttgcaataaatgttgacaaatggtattcatgcttagaggagatatgtgcatgccatagtttaccaccacctacagaggatgagaagcttcctgttggcactggtagcaacccagtcttcattgtctcgggcaatgtgattaaaatatatgctgaaggaggattggtttattctgtccatggtttgggcacagagcttgagttctatgatctcctgcaaaaaagtggttcacctttgatcaatcacattcctgagataattgctagtggcttccttgagtataaggatgatatctacagcacggttccgtggaatggaaaaggaataccagaaattttggttaagtactactcattggaggtttcttgtgcgaacagctgctttcctcttgggctttggagcaagcaacgatttgggatgtgtagttcggctgatgtttcagacagaccaatttggccttacatggtaacaagaaagtgcaaaggagatatttttgctcgcatccgcgatatgctgtcgaagactgatattcttcatcttgcatcatccttgggagttcaaatgcgaaacatacatttattacccctgccacccgtggagcatgtacctgaatctgggaacaatgatgtgaaagaagtggtaggaacatgtgatgataccacggttctacctgaatggcagcaacttgtctctactctaaataggaggaagcagaatgtaaaaaagcacctagctaactggggggactctgttccacaagttctagtagaaaaggctgaagaatatctccctccgaatatgggcttcctcatcaagtttgttaaggatgatggtgagttgctgtacccatgcccctcttggatacattcagatataatggacgataacattcttatcgaggggatcataaaactgagttcttctggtgagagggaaagagtttatgactcagatcgggacaaaataaatgcaattcacatcattgatttcagtgatctgtccattggggatcctatatgtgacataattccgctgcacttggatattttccggggtgatagtgaccttctcaaggaatttctacggagctatcaacttccccttctgaggggggaatcaaccaccgatgtctacagatcagtgcgaaactcgaagttcagcagggcatcatatcgcgcgatgtgctactgtatattacacgaggacaacgtcttgggagctatattcagcctgtggaaggagatgagggctgcaacgtcctgggaggacgttgagaacctggtctggggagagctgaaccggtaccaggactctgcagttcgctcagcataactaaacaccagcaaaaaaaaaaaaaactttctgaacatacgtgtatgttgttgttcctccgacgaatgtaacttccaaatataaaaaaaaagtgtagggaaaataacgaaggctcgacacggcatgcccgtattttcctatggctggtgataatattgagatccctgaaatggttctatgaaatgaaccgcagaccgttgaaatcgtttcagatcggccagaacccatggatctacgagaagtaaacattgaaaagttttacatcaaacctt

SEQ ID NO: 45700 - DNA, 802 bp, Zea mays
  unsure (1)..(802): unsure at all n locations
  Clone ID: MRT4577_141685C.1
gccggccgggtccactgcctttgtttttgcctcatccgcttggactctcgccgccgcgctcgccttcctgccgccgcctgggccgactcctccgtccgcgcgaaacaccggccggccgaggcgcaactcagtaagccggcgcgatggatgaggcggcacttctcgccggagcaggggtggctgccgccgcggcgccccctgcggcggctgccggagccgccgtgatgggcgtcttcaagtacaacttcgcggcgcagttcctctcgaggattatccctttcgtatttaacatctggttcgtgcgccagctcggcgcggacgatggcgctgtgtcggcatttgcactgcagcttcctctatttatgaactgcatcttatttttaagccgggaggggtttcgacgtgcatgtttgcgtaatgattcccagagtgatgtgttgacttctgaagcgatactaatggtcgcttggatggtaattccagtgtccatcttaattacttctgttggcagcatacttgtgttgagtttaaagagagtgaagctatctgacccctatgcgaaagctgtattgatcatcggatttgcttgtattctggaattactggcggaaccattatacattatttcccagaaaaagaaatactataatataagagtgtacgttgaaccgacagctacactcttccgttgtttaacaactttcatcctcataaaggacatattaaagtgacaagctggttctagnttctctgccccagttgtctatgggggctgcattccctttggaaattggcatatttt

SEQ ID NO: 45701 - DNA, 506 bp, Zea mays
  Clone ID: MRT4577_141686C.1
caatcacgcacacaaagggggcaaccccctttacttttattttcatgacggggggggaaccaaacttttatggacccccacgacgagcgacccacgggggggggggggcttcccatccattcccatcggggcatacgtccccgcaaacaatttagttgggggcctccacgagcccaggacggaacatgggcgggggtttctgaccagggggcgagcagcaccggcagcccccatggtacccgcgggtgcagcaaccccacccgcagggcggggaggcggccccgccgccccccccgggacccgggtagccggcccccccccgccagccttggacctccaccctcttttcctttttggccgccttgggttgctcgctaccgaaggcgggaaggaaggaggcggccagcaagagcgttagcacaaggagggccttggacgccatgatgctagctatcggggagaacacagcctctttcttttctctgaacgggaactaactgcggctg

SEQ ID NO: 45702 - DNA, 369 bp, Zea mays
  Clone ID: MRT4577_141687C.1
aagattttggccctttggcatattttttgggcattgaatgtcagcacaccacgcatgggctcatcctgtctcagcacaaatatattcatgatcttctcactcggaccaacatgctgacatccaagccggttgctacgccaatgctaccagctgataaattgcaaatccagggtggcgcaccactctctgctgaagacgcaaccagatatcggagtgccattggggccctgcagtatcttcttctcactcggccagatattgctttctcggtcaaccaggtgtgccaattcatggttgcacctactgctgatcattggatggcagtcaagcggattttgagatatctacatggaactatcaacatgggtc

SEQ ID NO: 45703 - DNA, 292 bp, Zea mays
  Clone ID: MRT4577_141688C.1
tcgttttttttgtggagcggaacgcgatggggatgaagtatgacgaaatatgggttaacgagtctggtactcacaaaattgggaatctttttgaagtagaactctaggaagggttggtgatggcagatgatgatgctgagtcattgaatgaagatgcatcttgtgcataacacaatgggtttgacgaaaaatctaaaatgattgttgttgattaaatagaacctgtggagttgaatgtaaatctactaatggtagatgatgatcaaacagtgttaatccaggttgtggatct

SEQ ID NO: 45704 - DNA, 209 bp, Zea mays
  unsure (1)..(209): unsure at all n locations
  Clone ID: MRT4577_141689C.1
gtgcaacaattgtttgtctctgggtgatggccgctttttcttcaaaagatgctggttcanattcataaccaaaaatgggctgcgtgccaatgggagtaaggacgtggtttggggttgggaccaaaacagatcttcatggtctacttccttggtgttatcttgctgtgcattccgctgaaagaagattggttggaggatgggattcaaag

SEQ ID NO: 45705 - DNA, 339 bp, Zea mays
  Clone ID: MRT4577_14168C.1
ggggaaactttggtgaaatgaccatgaaaaaaaagcccaggacctgcctttcatggattttccccggggaataaaaagcggtggaaacccctgggacttaaaagtacgggccagggataaaataccaacgggccacccgggcatggggctacccggcctgtaaactttggagctttagccagggaaagtggattgaacgattccctttttcattgcccgggcaatgccctggggggcaccgatacccgatcccagggggcccggggcccgagggcaaagggtcccaactcgccacttaggggccgaaaccggggccgggcttggagcaagggacttggg

SEQ ID NO: 45706 - DNA, 210 bp, Zea mays
  Clone ID: MRT4577_141690C.1
ccgcggcagaactggggggacccacgcgtccgccggtaccatcataatggagctctatagcctccagatacaaacagacgatggctccggtgactttgagggctgagcacatctttgcttgcctctccattttgcacccaaggtgaggcaagcaagtgagggtagacagagaggctgaccacgagcgatagccatccgcacgggatacga

SEQ ID NO: 45707 - DNA, 1487 bp, Zea mays
  Clone ID: MRT4577_141691C.1
gggtacctcgagccggccgggacccgggattggacctatcgacggtggcagcccgcagcccatcggtttcgccgaccggcgcctcgttcgcatcgactccacctcctcctcctcgcacgctataaactagactagagcaatacccgtggtggatgttccaccgcctgctccgccgcgcgatgccgctcccgccgccgcagtccccgcttcctgctccccggatgccgggggtcaccggcgggcgcctcttcgcttcgctgccgtcgccgccgcccctccagtctcgaagagaggtgcatgtgtggtatcttttgcctgatgagttgaaggatgcctcccaactcaagatgtacacggagctcctttccccttctgaaaggaagactgctttgtctatgaacggggaaaagttgcagaaaggtgccgtgctgtcccgtgcactgctgcgcaccaccctctcgagatatacagattgcaaagttgatccaagatcatttgagtttaagaaaaacaagtttggcaaacctgaggtactgtggcgatctgatgacagcaggatggaatggcctttacatttcaatatttcacacacatcatctttgattgtctgtggcataaccatggatactcctattggcattgacgttgaagagaagacacgaaagacagccaagaatattttatctcttgctcgccgttatttcaccccatctgaaattgattatctagctaaaattccagatcctgatgctcagcaaaaggagttcgtaaaactatggactcttaaagaagcatatgtaaaagctcttggaagggggttttcaggcgcccctttcaacaaattctcgattatattggcagcaaatggcagaatccaaatttctgtggcaccaaaagtatcgaacggttctgactctatccatgactgtctgtccgagaattggcagtttgcacttgctgaactaaacagttctcattacatggcaatctgtatagaggatgactcaacaagttcagattctggaaacggtagactgccactaggattgaaagtatggaagaccactccgttcgtggaagatatacttgtttctggaacggaagctgtaaaacttgtcagttaagtatgtgagaggatatctgccattggtcaagtgatttcgccagatgacaatgtgatgcaacgaatgtatttggacgaagtatgcgctgtgcagggagactgaacggttttcttcgagcatactgcatgcattgatgaactgaccactgacactgtgtgctttagttaagatttggaaatgcaatgacatacactttggagtcctgatattcatattagcatatcacgacactgtttcgaaaggaataaacatttatctctctcttgtgtgtgtgtgtggggtaattttagacgtattttgtactgattggtccttgttatctgacggatcattggaagaaatattcatgcatcagcatgcttc

SEQ ID NO: 45708 - DNA, 428 bp, Zea mays
  Clone ID: MRT4577_141692C.1
gatcagtagagcagttcggggctttgggatttgcctgatcgacccctaccagtgtattaaatgaagattgacattcgtatgtacaatttaccggttcttcctcccgaattgagacccattgtttataggtctggggataaagtaaagtatcgtaaagttaagttaagtatcgtaaagtagttgacaaagcaagtaggaataggtcatgtcacagataggcaagtatagaagcaggagaagctgatagacatttgtgaatagcaaggccaagctgtatacatataagcattttaaggagttgtttgttggcatatggtttgttgctagttctagatcgcgaatgttgagaaacataaaaaaggtaggcatattgttcagttcacgtttaggtcagtatagaagtaaagcacgagataggtgtttacaag

SEQ ID NO: 45709 - DNA, 632 bp, Zea mays
  Clone ID: MRT4577_141693C.1
aaataaaacttaaaaacatgtctctcgtttacaatatcaaacgggtccatgatgtgtaatctacaaactctaggcgctgcagtagcaagcacaatataaataaaagcagctcaacaaagtcaaattccactttgagaagggattgacagcgatttcatgatcagcacgtatttaacaagtggcaaaatacaatcttttgctagtttaagctcgagtcttaagctaaaacaagggacacatttctacaaaacgttttaagacattcatatggagtttctgcaaatagaaaatccgtcagcagtgtcagctagggcctggaggtttcaattgttagtagcttcaagttaggacccattgctttccaatctagttctatgttatttccaattgcaaaagccatgccagcaactgcagcgatcaaaactgctgttgtacagttcaggacttgttgcagggaaaagcagccaaaagaaggctactgaaccagctagaaacgctaccaatgccgctccttttgttcgtggtgacgagaaaacaggtaaacccatcatattacagaagacgtgagcaataattggacataacagattccctgcaggtgttttttttaaaaaataagtcaatcgtcaatg

SEQ ID NO: 45710 - DNA, 127 bp, Zea mays
  Clone ID: MRT4577_141694C.1
gcgccgacggagtagctgcagggggggggggtcctgttgacagtgaaaggagcacaagacaacactcaggcactcagctgattgatgagctagcattgtatatacagtacaggtagaggcgtatagc

SEQ ID NO: 45711 - DNA, 371 bp, Zea mays
  unsure (1)..(371): unsure at all n locations
  Clone ID: MRT4577_141695C.1
gaaagtgagntttggttngagatgtttaagtaaatnngaaaaataaagnaggtgngatggggtgtgttagtnatanatggnanagnnngaganatnngtggattggntnanggnaaggggntgtgggagntagnnaagganaagtatgagnngntgtggatnaaaggnggtggggagtggaanntggagatgtannnggagtanattaggnanatgngnaagttnataagngnnatggagaagntggnnaagganagnagnaagggggnnnaggngnngnngnngtngagnatggnngnngaagaaagananannaagtgnttgagattngggaagagatgagatgnnggnganntgganntgggaaggaa

SEQ ID NO: 45712 - DNA, 280 bp, Zea mays
  Clone ID: MRT4577_141696C.1
taagtatgtcgagactccaaagcatgtgtgtgagatcctgatgctgtagagcattgagaagtttccgctgccaggtgtcccaaaggaccactgctacagcgcgatcttgcgccactgggcgaacaggttctaggatggacatgacggcgatccaggagatactagtgaacagacattacagagatgatgatctagacccaaacgtggtcgtcgctcgaggaatggacacagcagtgcatggatatgttggatgataggtgaacgtggggacgtcactttt

SEQ ID NO: 45713 - DNA, 171 bp, Zea mays
  Clone ID: MRT4577_141697C.1
tcgggctcgtgaggtacgccgccggagggagtcccgcgtgttttaccccgatgatggcgacggagattgagaacagctgcatcggcggcggccacggcggagtcaaggacgaccactccctgaagaaggccttcagagcctacggcgaagtcctcctagtgcaatatcatc

SEQ ID NO: 45714 - DNA, 224 bp, Zea mays
  Clone ID: MRT4577_141698C.1
ggacgtcagcctagcaattagctcatcgcctccagattggagaactcgacaccatgaacgtgctgatcgttgcccttgctctcctggcgctcgctgcgagtgccgcctccagtaccagtggcggctgtgagctgcacagacacccacgtttcatctagcgcctccgttctatatgctgcctccgttctatctgctgcggtacagctaccgcagtcatggcgata

SEQ ID NO: 45715 - DNA, 466 bp, Zea mays
  Clone ID: MRT4577_141699C.1
tttgggtagacggattgtccgcccacgcgtccgcgaccaccgcaggaagatggaggccatcggggccggcgccgtggggaggctggccacgaggaactcggtcaaggacctgctgctgggcattggaaagggtcgaagcggctgcgaaccgctgcacctcttcccgtctgccgttctgacggtgaaccgcgggccgtcgccggacttcaagacggcgcacgggatccaccaatggtggcggcccgacctgtcactggagtgcaccgcgcattactacacgtgaaccttttaccctgacttcatgaagctccgtcctcgaatatctcacttcactccgggaattggattgaaagcttgaaccgacaaaaggagaagcgtaacttttcaaacatcggtacccttcgtccgttgaagacttagttgcattgatgattttgatataaccttttttaaaaagatttttttc

SEQ ID NO: 45716 - DNA, 741 bp, Zea mays
  Clone ID: MRT4577_14169C.1
cggacgcgtggctttgattgcactcccctgcaagcacttataccatcctgaatgcataaaccagtggctgcaaataaataaggtatgatggaccttcttaagcttcattgaatggctagaaacttcatttcattaactacttggtccttaaatactattctgattctgtgaagtatcccagactgtcacacatgcatgtacctgatgggagaatgttttcatcacaactagtctgtttatactatgtttagtaacttctagtcaaaataaaaagcttaagatttttctgtgggctgctaggcaggcatggtttgtcaactgatgttcttattctagttatgcagttgtgtttagttcatcatttttctcttaaaaaactagttgcatataaaacatcgaatgctaatggtatggaggtccgcaataacagggcatcagtctctacattttaagtaagaagattctgttatttgcttgacatagtccctagatttgtaatcgcggtcaagatatcttaggctgttacgttctatcagactgacattgaaccttatagttgtaatggtgcctacgattttctgtcatggtctagtgatgttttggttagcttatgttctgtcatgttgacatgcggaatcatgtaattttcttgtcgcggtaataaaatttgggcacaccatgtggtgggagaaaaggaagattgaaagagcaaatcaataaaccttggaagcaggtatgctg

SEQ ID NO: 45717 - DNA, 221 bp, Zea mays
  Clone ID: MRT4577_1416C.1
cgtccgggagatatagatcgcgagggggcttttttttagcgatgtcgttggactcccactatctgttggtagtgaccttaccgggttaaaccccatatgcagatacatagtgtgtaaggcccgcacccaaacacgtaaggatggcatgctgttgctagctactggcttacacacctcaatgggtaccttctgtagatgtccccagcctgtaacatgtgcca

SEQ ID NO: 45718 - DNA, 420 bp, Zea mays
  unsure (1)..(420): unsure at all n locations
  Clone ID: MRT4577_141700C.1
tcagtccgagttttattagtacagaggaccgttatagatagtttgttagccactatagatgtctagcttagggaatccttcacataggcgttaggcctagaagcgagatattcaagagtggtagcgagatgccagggcacctcggcccaatgaagcttggcactcgctgtccgaacctgaggtcacgccatccgataataccgagagaccttgctgcgcaatatgacgccggccgaaaggcaancctgcacactctatctgatgataggaactcagaggcgtcagaataattacatatgctgtgtaaccggttagcatctgtgccgttaaacaatagtcatgtgtcaccatgcgatatgttgtttagttagctcgcttggagtgtatgaatgaactgaagcttcataaccataatcattg

SEQ ID NO: 45719 - DNA, 379 bp, Zea mays
  Clone ID: MRT4577_141701C.1
gaggaggggcctgcaggctgcagcagctggaggtaccctcttctcctcctgctcctctagtgtattctgcgtgccacgccctgcaatccctcgccaacattttgagccacgcgcgacgctgcctcttggcttggatccgcccgtgaaattcatccctgcgtcggctcacccacgcagcgccggcggcctccctcttgcgtacggagtagtaaaataagaattccggtcgcacctccgatccggccgtctttccatgagcggccggtttaaataggccggggacaaagatcgggcgcaggtgctggctggcacgcatcaggtttggctttcttttggtgctatctatctccttgttccctcggattgtccttgtcgttgt

SEQ ID NO: 45720 - DNA, 1022 bp, Zea mays
  unsure (1)..(1022): unsure at all n locations
  Clone ID: MRT4577_141702C.1
ccctcccctcataggccctagcccatagccccgtcgtcgcaatcgcagtcgccacccgccgccgttcctccggcaagccgtccgtctccgccgcccgccccatccaggagaagcctgccaccagaacattcaactggccttcgttggaaatccgtccgttccccacaactgaactgacaggccacccatggcgctgctccgcgccgccgtatccgagctccgccgccggggccgcggggctcttacccctctcccggcgctgtcatctctcctctcctcgctgtctccccggagcccagtctccacaattacatctattaaaagttggccgtatacaatttcttttatttgcagggtaaggtaaatgtgaacacacagttaccagagctctgtacattgacagatcatgatgttcatcgtttcttacttagtggaatttctccatgaatcactgacaaacaattttctcagggggatgttccactgcaaggcgacttctctgctgagcacatgatttttggaggtattctatcactctaatgcttatgattttggcatatcccatacttgggggttcttattgacagaagatatcatgaatctaacacaatgtttccaagtcgagtcgagttgtgcagctactggctggtacactagttgtgactaggacagactagtcgtgactagtcgaatataagtcgatgaatatagttttatcatctgattgtcccacctattatcaacaatagaaattacttcatccattaatcgctctttatgttccgaagcttccttgatgctcttttttgcatggtccatggcagcccacatttcagccattgctggtctctaccatttcagcctaacaagatctctaccatttgtcttggtcctcatcaagtcttaaattcttccatgtccatagataaaactagttatcttctttgctgtagcaatgcagccactaaactcttttatcttnccaataacctacatcatgagatccttgtggatagcacacg

SEQ ID NO: 45721 - DNA, 340 bp, Zea mays
  Clone ID: MRT4577_141703C.1
ataaaaaacaaaaaaaaaaaaaaaaaaaaaaaaaaaaaaaaaaaaaaaaaaaaaaaattagaacataaaacacaaatacgggcttaagggcgaaattctccttatatccttaacactggtgggatcattcatccttgcggtgtcgggggccccttgggggggggggtgttttgtatttttccttgaggggggttgcctttcggccttgggactcggggaccccctctcgctttattaacttttgccttctccccccccttttccccttttgttcaaatgccttttagggcagaggctttcgcctttcccctttttcccctttcggccttcccatttttcg

SEQ ID NO: 45722 - DNA, 433 bp, Zea mays
  Clone ID: MRT4577_141704C.1
acaaaaaagcgatttgtcatggggcttgaaacgggggccttccattgtttcccgcagcgggattttaccgcccatgggctagaaactagaacggtgccgtccaacccccccaaaaaacagccccggtaaagacaacccagactaacttgaccaagaacacaacacgaccgccaccgccaccacgtaattcgccaccggggggggggcgacctaacccccaaaaccctaaagggggcggccctggcccttgaaagcgtaaacaacctccatgggggtcacagtcttgcggggggcgttctccgtgtaggtgaccgcgtcccggattaccttctcaaggaaaaacttgaacaccccccgggtctcctcgtaaataaacccggaaatgcccttgacccccccccttcttgccaacctggggatcccccgcttgggg

SEQ ID NO: 45723 - DNA, 177 bp, Zea mays
  Clone ID: MRT4577_141705C.1
cgcacccccggcagccgagacacccagtccccgtcgagcccatcggcaggtcttcatcggccccttcgccgaagcagagcgcaaccaggcgtacatgtgtacacccaagcccttaactgagcccgcccctgagcctggttttcctgctggtttgtgtggatttggctgcggagcatt

SEQ ID NO: 45724 - DNA, 255 bp, Zea mays
  Clone ID: MRT4577_141706C.1
atgcaggcggcatgcaaccgtgccaagtgggcgcacctctccgacttccagcgcgcccggcgtggaggcccaggcccacgcgtcatgcgaccagcgcgccggatgctacgtgcgagcaactgcaccgccactcacgccactgccacgcctcctcgactgcggaaccagtaccgtgactcgaggcaaccctacgcacgacccagcggcgccagcctggcgcgatggtcaatgcgaccaaaaatgggccggcagtaa

SEQ ID NO: 45725 - DNA, 469 bp, Zea mays
  unsure (1)..(469): unsure at all n locations
  Clone ID: MRT4577_141707C.1
ttttntttttttttatttttttttttttttttttttttttttttttttttttttttttttttttttttttttttaaaatcaaaagtttgttctgtttaaacaggggacaccctggcaaatgaaccccaccaagaggacccccccccaaaattaaaaaccagccggaagagcagggcccccttccccagaaccgggtggaaacctaaactaccctaaggagcaaaaccgggcccaacagaaccgcttggcacaagggcgggaaaaccccaacaaaaaccggggccccaggggcaaccccccaagggcggcccaaaaccccccccccaaccgggtaaaccgaaagaggcccaaaaaatagcgccggagctgccagatcccaaacaggaacccccccaaaaacccccggggtaaccccgggcaaggaaacccaggccggagggaaaaagaggccgggcggacgagccttttg

SEQ ID NO: 45726 - DNA, 437 bp, Zea mays
  unsure (1)..(437): unsure at all n locations
  Clone ID: MRT4577_141708C.1
cgcagccccgcgatagcaccacaccgccaccgaagccacctcgtcgtcggcgaccagtgtcacctcgttttatcggctgcatctccgccttcccccctctcccccaccccttcccggctctccattctcaccagaccccccgcttccancaatacctccccatcccaactgctcacccttcccccgactacgccggcgcccgcgcctccctcctacactacacctctacattcttcctccacaccaccacgctccatttcaccccgttgcaatactttttccctgcccctcctcacctgncgagtttcccatccctctttcccctccgctctcctatactcccaacttcactccccccccctcttaacccaaccacctggccgcacccactatgctgctccctcctttgtcccgcccaccccccccatccaaccttt

SEQ ID NO: 45727 - DNA, 198 bp, Zea mays
  Clone ID: MRT4577_141709C.1
accacctgtggtggcttctctcccggctcccctactgcccctttacttcgtcctcatatccgtcgatttcccgtccctgcgccttcgtgttatgatctctgctcctctgcgggtgcggctggcggcgctagcagctgtccttggggggtcgctcctgctcggggcgttctcggtcgagtgcaatcccaatcccaagcc

SEQ ID NO: 45728 - DNA, 717 bp, Zea mays
  Clone ID: MRT4577_14170C.1
tgagcccgctgcgcgtgcccgtgcccgcggacgtggccgagctctgcgacagcccccagttcttctcggccacgtcgtcgcggcccgggagctcgaggcggggcccgttcacgccgacggccaagagcgagtgctcgcgcagcctcttcggcggctactccgactacccgaactacatggccaacacggagtcgttccgcgccaaggcgcggtcgcagagcgcgcccaagcagaggccgcagtacgagaggtccagctccctacgcagggcgtcggcggcgcaaaggtcggcggcggcggcggcctcctccctgcacgccaagttcaccaacaaggcgtacccgggctctggcaggctggatcggcttggcttgccggccaggtactgatcctgatcctgatcctgcctaattcgcgccagggatgatgtgctgccgctgtgtctcgagcgaggagcgacgacgaagaagagtgcaatcgactagtggtagttaggttccgtgccttggttgtgctattaccatcaacagtttttctgtttcttgctttgtgtagctagccatgtctaaagttgctggtagctgtaatgatgctataatgcgtgcttaactgctgacgaaccttttcctctacatttccgtggtatatatatatgtgccgtccaatcatgcatgggaaaaaaaaaaaaaaaaaaaaaaactcgaggggggaacccgg

SEQ ID NO: 45729 - DNA, 441 bp, Zea mays
  Clone ID: MRT4577_141710C.1
accccactacaaaaaaatttttatggtttatccaagggggacaaaagttcacaacggttactggttaacccctacaactactaagcgaacatacctaatttgggaatggagccaaaacaacctcacaacaagcttaaaaaagacccactcaatcaatggcaaaaccccacccctcacatctacccctttttattggggctaccccccccgaacgttcgaatcgagggacctaatccataccaacatactaaatgagggggggccaggcctggcaagcaaacaaggttactagcctggagttaaaacaaacttgccgtaaattttgacccaggccttcatttctacaaacctgctctcaagcctaggctcaaccgggggggaaggccggacaggccaacaaagcaactcccttatcctgccctgcctcccccctgggtagaa

SEQ ID NO: 45730 - DNA, 855 bp, Zea mays
  Clone ID: MRT4577_141712C.1
cattgggtacctcgaggccggccgggactctcggcaacggatatctcggctctcgcatcgatgaagaacgtagcaaaatgcgatacctggtgtgaattgcagaatcccgcgaaccatcgagtttttgaacgcaagttgcgcccgaagccttctggcggagggcacgtctgcctgggcgtcacgcgacacgccgaagtagcagagggatccgttggcctcccgtacccagcccccttctaccccttcgtcgacggctgggattgcggcggcgcccttgtcttcgccggcgacgagcatcgccagggacttccgattggggggggcgattgcggagatgggctgatcagaactgcgacaaggtccggttttctcctccaaattgtggtctctggaggtggatttgctttttccgtagccgcagatggacgacgacgatggcagcctgggcattcggaattggggcttctacgacaccatgaagggcaacctaggcctgcagctcatgtcgtccatgccacctgaccgggacacgaagccactgctcccgagagctggtttcttgcagcagcatgggcatcacaatgcatcgcaccagctccatgcacagcagtcgcaacattatcgtgattccacttgcggtggaggagcctctggtggcatgcccaccgagcagcactctatccacatggacttctcacgcaatgaagcttggctgcacccatcgcaccaccaccaacatccccatgaccagaaggtccttcattctcgccctaccgtaccagctgggcatggtgggcatccaggccatggtagccatcctgtgcatggtgggcatatcgtgcatcaccatcctac

SEQ ID NO: 45731 - DNA, 827 bp, Zea mays
  Clone ID: MRT4577_141713C.1
aagctcctcattccttcttattttccatcaaagttgagcccaaaagaagcatgtgctcgctgcattgctctaatcaagaggtcaccaacagctggagcaagattttgtgaatttgctctgtctgaagggtcatccccaaggtccattgttgagctagtcaaatattcaattactctcgcattatcacaaacaggacttaactcagatcaaattgatggcctaattattgcttcagtcaatcttattaaaagcttatccaatgagcgctctagtttggctgctttgcgagaatttttggcaaatgggaagctaaggttggtccttcaagttgctgtttctgagcgtgcccgggctgcccttcttggcatagttccagttgttttacctgatgaactatctgtgcttcatgaggaatgcatggatatagttgtgaatgcagctaggatttcaaagcaagaagaatatcaggaaacggtgctggaagcacataagttgatagttttgggtggctggtctgatgaactgtttgaagcattgaccaatactctgcaatctaaagcctctgattttgctgagatttatggagttgaacctcctccatgtcccgttgcatcttcaaggaggaagaaaggcaagtcacttaagaaaatacctgtacgtgacaatgttgttggaaaggggtcatccaaatcaaaaatcagtaatgaagagcttgctgttgcagcgggggcagcatggcaggtcaatgaaatagtaaaaactaaagacttgagagatgcttttcttcaatcctcttattcagagattgtgttttcccgacagcaacg

SEQ ID NO: 45732 - DNA, 217 bp, Zea mays
  Clone ID: MRT4577_141714C.1
acgaaatcctctctgtagaggtcaagttcaacgaggatattcgcagactctcttgcccaatcaacaccaccttcgatgctcttagaaccgaagtgcttgcaaagtatggtctcgataccaacaccagactctgcttgaaatatgaggacgaagaaggagacctcatcactctcggttctgaagctgatctgaaggaagctctccagatcgttccagc

SEQ ID NO: 45733 - DNA, 415 bp, Zea mays
  Clone ID: MRT4577_141715C.1
tctattgtctcaatgacaacatgctcagaaacaactttaccatgcggtgctgaccttggtatctaggctaatgatgctcctactaacgctgcctttgattgatcactaattctaactatcaattatccatattattcatatcatataatcatgatttcaagtgagcaacatctgttatacatcatctatacatacattacactttaaaattaccatgatcttgaataaactcacttaacaatccaaccttatagacttaatgtgcccaaaatgttcaaatctctactatagtcaagttcacaaccattattgaacatatacgttacaaagtaccgtctttcaccccattgcttcttatgctacacaacatgtatcccataattggaaggctcttgacagatgactttataccata

SEQ ID NO: 45734 - DNA, 335 bp, Zea mays
  Clone ID: MRT4577_141716C.1
catcaattgctgccattcaaccaacttgctgtgtcatactgaacagtgttctaccaacaacccatcatcggtggatccctctttcagatggctcatgagctatatgccaatgatgatagcgcttcagatgatgtctcgaggcgtcaccagatatataaaagttcatttgtagcttcttcattccatcaattatagcttgagtatgtgaaaacccatctcttcaaccatattggcttcaacaagcaatcgcagcaagcaacatacctttatcgaccttggggggtcagctttaagggagccatatttttggtgcagtgattggtacaaatcatttt

SEQ ID NO: 45735 - DNA, 193 bp, Zea mays
  Clone ID: MRT4577_141717C.1
gacctttgggtctgtttatgtgcttgaaaacaaaacaacatccgtaattagaacctcaaaaataacaaaggttactatcgcagggactaagtccatgcgaattcgtacgtgaagaagctgtcggcggacgagtttgttcatgccaagctgatcgtttggtagaacataatggtggaatcgtgaaaatttcgcg

SEQ ID NO: 45736 - DNA, 366 bp, Zea mays
  unsure (1)..(366): unsure at all n locations
  Clone ID: MRT4577_141719C.1
ataaaaaaaaaaaaaaaaaaaaaaaaaaaaaaaaaaaaaaaaaaaaaaaaaaaaaaaaaaaaaaaaaaaaaaaaaaaaaaaaaaattaaaaaaaaaaaaaaaaaaaaaaaaaaaaaagttttgtcctttggccggaacccccttaggggggatttttgcaaatttccttccccttgggggccgtttgaccttgcttttagggggcccatttccccttttggggggtcgttttacatttccttggccgggtttttacaacgtggggattggaaaaaccttgggtttccccaatttattcgctttggagcacttccccttttnnnnnnnnnnnnnnnnnnnnnnnnnnnnnnnnnnnnnnnnnnnnnn

SEQ ID NO: 45737 - DNA, 633 bp, Zea mays
  Clone ID: MRT4577_14171C.1
gagcaaaataagtgaccatgtgagatttatggagtaccttgatgtagagcgattcatggaccccagctgtgccgacaaaggtagcaccctctttcgtctagctgctgttgtagtgcacattggcatgggatccttgaagtccggacactacattgcgtacgttagagcaagaaagcttggatgtcagcaagaggaggcctcatggttttgtgcagacgacagtcagatcagacgagtcactattgaacaagttctcaacagtcaggcctatattcttttctatgagaggatggaagaccaggacgtttctggcatgacacgtcagaactgaagaatgcagtgatagaacaagcagatgagtgagataagcagaccttctctctcgaccgcaaggatctagtctagtcagtgttcatagtaagacaggctcttgaccaagctcatttttgtcgctgggcttgaaacttactctgtaactttgtaccaaatcggaggttctttctgatcttgtcaactcagctgatctggtctttccgttgcttcgcatttgaggatgaaactgtgaatagaatagtggtgagatcggtgatacgggctttgtaaagtttctgtcggatgatattgttacatgat

SEQ ID NO: 45738 - DNA, 261 bp, Zea mays
  unsure (1)..(261): unsure at all n locations
  Clone ID: MRT4577_141720C.1
aacacaccaagcttttttttctaacaacaaccnaacaacaagggctggcaaaatattaaaactacttgccctactacacatatatgagagctcaacaaacacattaattaaatccacatcactcactatcaactaaatccattattccacaccaccatcaaccagatattataaaaagcaactaacacctatctttacaagccaaaatgcaacaacataaacacaattacaagcatctaacaacaaccaatttcctcaatt

SEQ ID NO: 45739 - DNA, 373 bp, Zea mays
  Clone ID: MRT4577_141721C.1
gaccgactacatgaatcgaacgtacagttgtctcctgtcaatgaccgactatctatgccaacgctttctgcttactgtaagatgcggcaatgcttaccatgcaaccatttgtctgcattgctccgtggttcttattggttgcatcagctattagcacgtatcaagatagatgctgtctgccagcaaaaaccccatcgttttacattaaacgatgtcaaccggcctgcaccgctgtgctcatacgtagatcacccttctacttccatcaatccagatcgctattacatagccgtgccttcgttgcagtcaaaagaacaggggctgcctgtctaaacaactacagcaactagcgctagcaaaccttgacaactac

SEQ ID NO: 45740 - DNA, 431 bp, Zea mays
  unsure (1)..(431): unsure at all n locations
  Clone ID: MRT4577_141722C.1
cgcgataancctctcctctcctctccctccatcggtggggtttagaaaaatgcagggggacgaacaccaccaaatgctgacctcccaaagctgtgggcgcgatccaaacagaaaggaaatgatcaagcgacaacccggcatggatcggttcctgcaaatactggccggcgacctggccgtgctactgctagtggcaccacaggccatggcgtgacgaccacatactagaagtcggcgtcaactggggatcgcagctatcgcaaccgcttgtaccatgctccgtggtgaagatgctcaaggcgaaccgcatcgccagggtcaagacgttcgacgccgacttctgggccgtctgagcgctccgcgactccagcattgacgtcatgctcagcttccacgacgacatgctttagaccattaacatcagctacggc

SEQ ID NO: 45741 - DNA, 235 bp, Zea mays
  Clone ID: MRT4577_141723C.1
ttctcacggacctaacacagttcaaccacaaggccggggagcaacctttatgattcaagctctctctcgacgcaacaccacaacaaacagcacaagctcccacaacccgactcactgtcgctgaaactcaatgccttctttaaaaccaaaaacaacgaactaccacaactaaacccacccttgttccaatcaaattctaaaccaccccaaccccctcaatctttccttcaatata

SEQ ID NO: 45742 - DNA, 377 bp, Zea mays
  Clone ID: MRT4577_141724C.1
gccataccatagaactgaggctctgcatatatatgtgcattcttttttcaggagtcgagcatacaatacacagggggtgactaaatataaacatatcttctgattctctagacaatacatttgatgctgcctacaaacgacagcaacctgtcagcgaagctcgccgaccatcgaattgatgcacaatgacacaacatggacaacatgctgtaaccaccgcaatttctacaattgaaatgttccagtctgtctatacacttgtggaagattaaatgatacaccatcctgcatatcttattgctgtcatcataacgattatactgaacgtatcaaaggctaggcttaacgctcctcacaacctttatatgatgacggcg

SEQ ID NO: 45743 - DNA, 690 bp, Zea mays
  Clone ID: MRT4577_141725C.1
gtacttcctcgaggggccggccggaaaaaaaaaaaaaaaaaaaaaaaaaaaaaaaaaaaaaaaaaaaaaaaaaaaaaaaaaaagtcttcagcacgcacaccaatcgcccacaagcgctcgcaggagaggtcgaaaccctagcttttgcggcggcggcgagagaagatgatctacgacgtgaactcccccctcttccgttccttcctcagccagaagggcggcgccgacaagaggaaaatggaggagcataaaccaaaggagcagaggcccaaggctaacgagaacaagcctgtgatgaacgaatgaatatctccagaagctttgttcaatgtgcaaccaagtccgatgtccgtttgctctggtcagcttaaaaccaacgcttccaataatcctatattggggacttagtttccccttatagtgttatttgctcggcttgaacatggcaacggaaatgaaacttgaactaccaaaaaaaaaaaaaaaaatttgagactcccaggtgacaacttttcagctctcctgctgtcagaattattcatgttttcatgcttgcttgcttcacattcttgcaatagcaagcagtatctactaggactgcatcgtccaaaaaaaaaaaaaaaaaaaaaaaaaaaaaaaaaaaaaaaaaaaaaaaaaaaaaaaaaactcgagaaggggcgccggtaccca

SEQ ID NO: 45744 - DNA, 338 bp, Zea mays
  unsure (1)..(338): unsure at all n locations
  Clone ID: MRT4577_141726C.1
gggnaaaaatttttttaaattggaataaagggggggaggggggaaatttgttgggcctttaagggataattttaaaaaccccccaaaaaaaaggggggggggggggtttttttttgtttggggttaaagggggggttttaaccattggaaaagttaaaacgggggttttaaccttgaaccccttagggaaaggtttgaggggggggtacaccggggggttttttttttttcggggggggatggggcttttgaggggcctttttcaaggaattgggccaaattcagatccggggcccaaaaaaattccgtttgtttaaagggaggggggcgcataaaag

SEQ ID NO: 45745 - DNA, 522 bp, Zea mays
  Clone ID: MRT4577_141727C.1
ctattcggcaatcagaggccgtggttaatctagggaccgccattgggtcatcatgcacacaggcaaaccgccaacactttctatcggctattactgcgggtggctttttacctctgtttcgtcttggttgtccttagataatgccctcccgtgtatagctcggtggtgggtagggcaaggaggtattaacgcgagcgggggctgaacaaacgcgggggcgcggccaccagacgaggggggccacgggaagcccgaccgcctgcataaaggagcggatgacaggagggacgggaaaacggaaggcccgccgaaccatgacccggccgagggactccccctgggacgggatcaccgggatcacccggctaccctggtatctcggcaacagtggtttgtgggtaacaaacgcccacacgtaatgaacccccgagcaaaagtccccacggacctaaagaatccggcaagcctagaaaacgggccctctgacggtgcccaaatccagccggtagccaaatctaaccg

SEQ ID NO: 45746 - DNA, 335 bp, Zea mays
  Clone ID: MRT4577_141728C.1
ggggttgggtttttattattacaaaaaaattttattcaaggcacaagcttattggcggaattcgtacaggaactgagtgcgtgcaccttccatagccaagtaccaagaccctggccaaccaggcaaccacaaacatacataaggcacgcaggcaacccccaaccggcctggattcccgcccccgggcggcttaatttgccctggggaggaaactctccctgcgctccgggacccccccggggcaggggttgatgtcctcttaaaccctgggggcgcgcaccacaaaaccggggccgccggggggaccatgggggtgggggggggtggcccccccc

SEQ ID NO: 45747 - DNA, 376 bp, Zea mays
  Clone ID: MRT4577_141729C.1
atacaaatcgggaagttttatctaggaagcatagctccacagtaagaactgaacaaaatccagttttacacgaaaacacgagagcaggacctttttttactctatatgtaaaacttctcaaattgggcccacaagctcaaacaaaattcctcccatcgaagttgctggataattctaagaaacagtacaacacctcagtgacctcttcacctttttttattcttcctcctctttagactctttagaccccaaatgttcttgatttctccttccatgtatatatgagaatgacacaaattgtgagcagttcttaactaagctttcaattcttgcagggtcagtaaactcatacttggcatcatctctcaaataaaga

SEQ ID NO: 45748 - DNA, 597 bp, Zea mays
  Clone ID: MRT4577_14172C.1
gattctccttacgattctcggcatcactgaacctcacttcctctcctatctgtgcataatgctccgatcctatcagaagatctgcatcgccgccaatgggtcccacggtaatggtcttccttgtgcagaaccaccaggactgatgtcttcgagattgtgctgcatcgcccgactgcggctggcccaaagcccaacatcgctttcccggctcgcccactacgagttctgactcgcagtgcaagttgaccatcggaggcgagctcgctacccgcgcgctccagagcgaaaggaaaaccatcaggaggtcactatatgcagaaactgcgatgctagacaggtgaccgtaggaatcagcaagtgcttactacacaggatgcgcgtctgcacttctagcctatgacatcactcagaatcagacatttggagacatactaaggtggctccgtgagctacgagagcacgaggactcgaacatagtgattatgatggccgaaataaagttggaactgaatcgagtgaggatgtctccagaggaataaggacaatggctagctcataaggtatgactatacatcctcgagacatccgacctctaag

SEQ ID NO: 45749 - DNA, 418 bp, Zea mays
  Clone ID: MRT4577_141730C.1
aaaaaaaggggggccttttaggcccccccgggaaaaaccccaacgaccccccaaattttttttttccgggccaccatcaagggggaaaaaaaaaaggggccaggggcatatgaaaaactagcttaacaaccggggggggggttttggaataaccgggacccacaacttttttgctaagggggggaagggaccccttgggagcttggccaaagggcccatttttggacaaggggtttcctttcaatttttccggggggggaaaaaaagaaaaggggggcccctaaaaaaaaaggatcatttcccccaaaaaaaaaacccccccgggtattttgaaaaagccgagaaagctttaaccgggcctccaaaccccgaagggggggacccagaaggttgccccaaaaaagaaaaggggcaaaaa

SEQ ID NO: 45750 - DNA, 287 bp, Zea mays
  Clone ID: MRT4577_141732C.1
gagaacaagagggcagagaagcccagagagggcagggaacaagacacgggcaccaccaggaccacgaggagccccgacacccgccccttttagcaatggatgatggcagagaggaacgccgcgacggacaaacgctccgcgtgggcgtaaactaaagcccggcgctccacgcccctgaacctcccggggaggaagaacactaggagggccccgaagcaaacaacaaaggcgccctgaagaggagagcacgacaagacaggagcagggaccgcccaccgccggggggc

SEQ ID NO: 45751 - DNA, 169 bp, Zea mays
  Clone ID: MRT4577_141733C.1
tgaaatcgataacatgatagcagatgccatgatcaacgtaagtcataacggccttgggggccgggaagacgggaagagttctgataactatctttatgctgaggatggaacgcactttgaccgtggttacatctgtccacactccgtaacagacactgacaaaatgact

SEQ ID NO: 45752 - DNA, 757 bp, Zea mays
  Clone ID: MRT4577_141734C.1
ccggccgtcccgagacgaatgtcgtttctgacacacatcagacaggggggctgagaaatgcgaagacacgctcgctctccccgccgctcttctctactaccggctagggagaagagaagagccgacatctttcaacgctaccgcggccggctctgggagaccgttcgacatgacacccatttcctcctgccctgatggcaaaacacattcatcttcgacttccgaacacgcccgcacatcttctcctccaagtcctggaacaaagacctgcctatgacccaactcagactccgttgcctctcccgtcccgatgaccagcacctgcccagcatattcgactctctcggagtctggtactatgatgaggagcccccctccatcgcaaaacaagggctactgggacgtggatcgacattctactggcgaataactcgtcaatcaccgtccacacaaatcctgactcgtacgcgacagtctcgtgcagcgagaactcctgcaccacaaaatactactaggacgatcctcttccaactccttgtccgatggaattcaggaacccacgtggagttgtacaagaatcacgctgctcaactccgagttcttccacatgaacatgcaccgctgcaaggacatgctggatcaaggacgtgaccgtgacgccggccgagggaaaccgcaacaccgatggcatccacatggacgactcatccgtgatcgcgatcaccaacatcgacatttggcgtcattgacgactgca

SEQ ID NO: 45753 - DNA, 270 bp, Zea mays
  Clone ID: MRT4577_141735C.1
gcctgcagttccgggccggaactcccgggggagaaactgcgagagccggctgaagttgacgtcgctcctgggcaggccatcacgtcaagcaaccggtcacagatctatctgacaaaatggtgaagatctgctgcatcggtgctggctatgtcggtggcccaaccatggccgggattgccctgaagtgcccagacatttgaggtgcggcgttcgtttggacatttgcaagccccggatggaggcctggaacagggacacgctggcaatcta

SEQ ID NO: 45754 - DNA, 219 bp, Zea mays
  Clone ID: MRT4577_141736C.1
gtccaataatttgtctgttgagcttagtggttcttctgtatgtgattccaattttgcccttaagggaaaaaaatacaatcttttgattataactggcccaacaaagccccaaataaccatcgggccttctcccaggggagctaaacacacgaacgctagcttccgaacaaaaagctaaagcgcagagacaccgcctttcaatgaaggacccgttttttt

SEQ ID NO: 45755 - DNA, 162 bp, Zea mays
  Clone ID: MRT4577_141737C.1
gtagtacattgtctggacacaactatgttatctggaagatgcctcacctggcagagatgatgtaggtttccagagtccgtatttatcaccatgtggggggcgatgttctaatcccgattgctggggaccttattcttgaaagcatgaaaacactttatttcc

SEQ ID NO: 45756 - DNA, 297 bp, Zea mays
  Clone ID: MRT4577_141738C.1
tccgaattttgtttttacatgccattcgcgtgtgactcattattaacaataaaacaagcttcctcttattatctacattattacaaactctcatacctacttctaccccgttctctacatgcctctgtaacaagcacaattggattcagtgcgggctactgactctgcatggcgttcgtcatcatggcccgcctcacgcctttgcctgatactacctgcccaaacccccgttctaaaggaaaattatacacactcactcccgctactagcggatccgatctctgcaccaatcttaac

SEQ ID NO: 45757 - DNA, 317 bp, Zea mays
  Clone ID: MRT4577_141739C.1
aactcgcacagttctgctgacatcaacacttgcagacttagattcgttatttacggtaagtaaaaaaggccatcaacctgttctaagccacactaggcgataggcatcggtgtaaaaagagcatgcaaatggagagataaaaggcgctcttcaatgtttcggcgattttgagcaccgtgcttgcatactgaagttaacgaatggcgaggccatatcccttcttacaactgttggaccaaaattggacatagctggccacgatttatttgttacacacttgaaataaacattgctcgtattcaacatgggcctcaaat

SEQ ID NO: 45758 - DNA, 1014 bp, Zea mays
  Clone ID: MRT4577_14173C.1
gacggcacatatatatataccacggaaaatgtagaggaaaaggttcgtcagcagttaagcacgcattatagcatcattacagctaccagcaactttagacatggctagctacacaaagcaagaaacagaaaaaactgttgatggtaatagcacaaccaaggcacgggggaacctaactaccactagtcgattgcacttcttcttcgtcgtcctcctcgctcgaaacacaggggcagcacatcatcctgacgcgaattaggcaggctcagtatcagtacctggccggcaagccaagccgatccagcctgccagagcccgggtaccccttgttggtgaacttggcgtgcaaggaggaggccgccggaggcgctgccgcggggccaggccatcggcgggtacatcttcgtcttaacttgctggttgatgacgatgatgaacacccaaccaccaccaccagcagcagcatactgattgtttgatgggtggaatggaatggaattgaattgatgcagggctgccgtccaggtacagggactctgtgcgtgctatccgcccgggactgcccctcttcctctacaactactccacgcaccagctccacggcatcttcgaggtacagtacagcacagtagccactgttcgtggttgtggttccctttccttgcttcttcttcgttcgctgtactcacggggacccggttccgatcctccgatcgccaggccgcgagcttcggcgggaccaacatcgacccgacggcgtgggaggacaagaagtgccccggcgagtcgcgcttccctgcgcaggtaccctactgtactgtctgcttcgatccacagtctagtactctagtctagcagccatggcggcggcggcggcctcgccgaccaccaccgccattactacggctacggcggtagccgcttccaataacagtaacgcagtaactaggcgcaaaacggcaaaataatacaggccttccgatttcctgcgaaggaagcggagttaaagcggcc

SEQ ID NO: 45759 - DNA, 310 bp, Zea mays
  Clone ID: MRT4577_141740C.1
taaaaagaacagctcagtggaagaaaaaaacatattgatcttttctaaaccacctaatgtcactatatacatataatcattctataaatggaaaaatgaatcacacattgactgtcgatatatctccttaagacctacaataattgggggaacataaattaccaggccatcccaattaacccaatttttccttaattaaggtctttggccacattcaagccccgtgaatataacactagtggtgaggcacaaatatttggcagtccataaatcaaataatgccttggaatcaatcacaggtataaatatt

SEQ ID NO: 45760 - DNA, 713 bp, Zea mays
  Clone ID: MRT4577_141741C.1
ggaaaaaaaaaaaaaaaaaaaaaaaaaaaaaaaaaaaaaaaaaaaaaaaaaaaaaaaaaaaaaaaaaaaaaaaaaaaaaaaaaaaaaaaaaaaaaaaaaaaaaaaaaaaaaaaaaaaaattttcccaaaaaaaccaaaaaaaccgggggatttggggggacctttttaattggaaagggaaaacccccgttcccggggcaaagaaagaaaaaggggggggggaaataaaaagggtccccccaagggggaccggggcccccgtaacctaaccaccgggctttttcggggccctaacccgggggtttttttaccccttcccggcccgggcccggttcaaaaatttgggaaaaatccacccaaggggccgggccatctttgcccaccccgtcttttatttgggcctaaaaacaattttcctaatggccatgggaatccactttacccgggcttattacccccccggaccagaatccaatatccgggttattgggttcccccccccccgaaacccaaaaaaaaaccggttttttttttttgggccctttgcgctttctttttttttttgcccccctcctggattttctcgcccttttgcccaaaaccttttattttgccctgccccccgccttgaaacaacacaaacttggggaaacctggtttcgggccccaagttcgcgaccaaattaaatccgcgcccattcaatatttttttt

SEQ ID NO: 45761 - DNA, 596 bp, Zea mays
  Clone ID: MRT4577_141742C.1
cctcgaggccggccgggaaaacagatccacactcctatggatccgctgcgagaagccacccattatctaccgagatgatggccgaccgaatcccatgactgcttatctgcccaagatgggacagatcatgacccctcgacccatgaagggaatgttgactgacccgcacacaatcctcaactggccattcctcaggaacgaccaatctaagttagagacatgctaccaaatagctcttgcaatcaaaaaggaaggtgaggatcttgatgctgctgccatacaggctgatccattatcgataggcagatctaagaggacgatctgccactacgacaatccagagcatgcattctacctggactgggatgcccactctttcatgatcaccaactgaggtacccaatacaccacccaaatccacacccacatgagctactccaacttcgaccacatcatccactccatcatcaacatgaatgccatatgcgaacacgatacaaaactcccggcctgaccataatctactgtccatcctccgaagcagtagtctaaaacagagatgacaatgcacctgatgtcaaccacatccactctcc

SEQ ID NO: 45762 - DNA, 1102 bp, Zea mays
  Clone ID: MRT4577_141743C.1
cccactccaaattcctctctcctcgcgctctccctcgccgccacccgccatgctcgcaactccatgagaacgccctggctgctctccccacgcttgcccacgccgcatcctctccctccccggcgcccctacgtcgcggttcgcggtggctcccgctgccgcgctcgccacacggagtagcgagggtgctacttaccaccttaccagcgttggagaccgaggtggcggctttgccggacaagggtgatcctccgcgggcgtcgccgccgcaaagcagatggacgcagagaggatgaatgccctggaacagatgttcaagcgactggccctcgccgacgacactggtccaaaccggcgaagacaggtcatgccctccaataatttctactcgatgttgctccacattattctgatatggagcatgattagcagctttgtgagtaagcattgacatgcttcggtcataactgtgcctctatttgatggcattcttcgagcctcgatccccaaacttacttcatttggagccatcatgtcttcgctctgaattggcctattagaatgtggcgagtctcctcccactcccagtgaaactcttactgacaaagataaaagagctgaacatcctcttcaatctcctccaaaaaagagctacagtcacaccaccaaagcaactcggccagcgcgcgggccggggtcgcatgggcgacgccggcgacaagtgtgcgctgcggctggccgccaccgcgaggaagtggctggaggacgtccgcgtcgaccgcgaaggccgcgtccaccccgccgtagccagcggggggcaggcgctcacctggctcgcgactgccggcgcccgcgtctcgctggccgagcccggccgcgtcgtctgctcgctccgcgtgggcgccccgctcaccgacgcggaggggaggtggcacgccggggccatcgcggtggcggcggacaacgtgtgcgcggcggcggtcttcacggctctgggcgcggacgtgctcaccgtccagtacagcctgtcctacttctcgcccgcccatctcgacgaggaggtggagatggaggggcgagtggtgggccggaaggcggcgct

SEQ ID NO: 45763 - DNA, 385 bp, Zea mays
  Clone ID: MRT4577_141744C.1
cccacgcgtccgctcggagcagagcagtggttgctgctggtacgttttcgtagatagagatagatatactactaggagtctaggagtagtatataaaagctgctgctacgtgtttgtttaattgtctgttggtggacaaggcaggtgaagagggacgataggaccatgcataccatagatggaggatggcatcttttgcaatcagctttgggattactatgcgatgtgttagccttttatagctagccattgtccaatcgacaactgctccggctacacaagagcgattccaagcggcgtgccaggactaggagggagggattccgtttctcgtgaggaaagcttgctacctacctgtcgcgcactcgcgcaagagccccattcg

SEQ ID NO: 45764 - DNA, 630 bp, Zea mays
  Clone ID: MRT4577_141745C.1
acgcctgcgtgtaccgggctcctattacacggtcgaccttttctttctttccttctaacaacaaaaaagctctttttggaccctatcttgtcagccatcttattgagggctcctccgctgcctgggtctttgtgcaaacactgctgcggttagcatatcacgctggtgctcacaaactactattggtagccttattacggcatccctgttaccagcaatgtgctcggtatacgaaaacacaagttttttaccctacaaggtccaacgggtcacagcagctagcttgcttgactggtatcaccctgttgttcttcaacaataatcagacctattacagctgccacctttggtgcatgtatagactcacaacattagggcacaactacttcgacaactggtgctagctaaccttgctgcctactatcagcaacagtcaatgcctctggtgcatttgttggcacaaaacatgatggcacaacaactacaacaacgtttgctagcaaaccttgctgactactctcagccacgacagtttgctgccattcaagcaactagctgcattgaactctgctgcttatttgcagcagcatcactactaccattcatgcagctagctgctgcctacccccg

SEQ ID NO: 45765 - DNA, 313 bp, Zea mays
  Clone ID: MRT4577_141746C.1
attcaaccaactatctacattgaactctacttctaatttacaacaccaacaactacaattcagccacctaccaaaccctaccctcaccaatctcaatcatccaaccaactatccccatttaactatcctgcttattaacaaaaacaacaactactaccattcatccaactagctgctctaagcccatctacctttttgatacaccctcaactgttgcacttctaccaacactcttcgcctaacgctgccaccctacttacaacttcaacaattgctttcattcaaccaactttcttttacaaacccaacattt

SEQ ID NO: 45766 - DNA, 329 bp, Zea mays
  Clone ID: MRT4577_141747C.1
attcggctcgagcggaaaccgagccacacattgttttgatcggcacagcaagcacacccgtcgagcctgattactgacgcaaccttagcagctgccaccaccgacggtgaattaactgacggagtcgttgcgaatcagcaaaggtgcactgcgatggctgacatgcataggtgattcgcaaacgaaggataactacttacgccgtcgaagctgctataaacggcactgctgccgctggctcctgcagacaataactaaggctgacctgctgactctagacaagacagcggtcgtacagaaggaagtcttccaatgactgccgaacctga

SEQ ID NO: 45767 - DNA, 1584 bp, Zea mays
  Clone ID: MRT4577_141748C.1
atggcgccttcaagcccccccatggtggatgcgcgatgcaactcggaggtcttgcaatgtgtcggcgtgttcgttcaaggacgagagggggaacagcggattcatccccgccaggcttcaggtcaggaatcatatgctctttggacggtgcttatagctcgaggattttttgtggggcgaactatgctcctgatgggacaggggcctgcatcaacactatggttttatttcaagacaaagtatcaaggtagagaagagaagctgaagatggtaatgatggtaatgatggagcttggcatgatgttcgatctcctctacaccaaagccaacgtgctccagagaaggattggtgtcctattcctgtgtgcttcccaggccttgatggtcgttgccctggttctcttcatgatacgacgtgaggaaggcgcccacaataacaaggttaatgtcgcgattacctacacattattcagtggcgccatttttgtggagacctgctgtgttgctgcggcgattgcgtcgccttggacaagggcacacttgaaggagagcagctgccttcatggtctcagtgactccttgtttgaggctgttcatctgtgcaaatccaccgctaataacatggcacagtttaacttattggatcactgcatctctgtcaactccaaaccaagagttttctcaaaggccctcagtgctattggtctggataagcaatggtacgtccaccacatggataagcaatgctactggtggattatcaaccgtgttttggaacatttggccacattgcccgacgaattctcaggtctagcaactgtacactttacaattaatgcacccactgaacatccagtatggttcaaccagctgagtacatccttcgagcaagtcctctacggcttacacctatacactgacctacatctaagcaggcacttcaacaactgcagcacgggtagcgtcgtacaaccacctccacctgagattatgcgacttaaggaagaatgcgagacactatcaaactacatgatgtacctgatggtggtgcatccttccatgttgccagtcaacacggttgcggcaggagatcttgttcaacaacttattggctgggttactaaccaccctggacatggggcgacgacgaccaagctagcaattctgcgagggtactcaaggaccttttacattctggtcatagacgaaccaggccaacacagatcattttattatttgcatcacttacttacgcagatcaaggagatgtgggtgaggcttctcatgtatgctgctggcaaatgcagcggagaggtgcacgcacgccaacttggtgaaggacgtgagctcatcacctttgtctggctactcatgctgcatcatggacttggagacatggcagctgagttcaagcttttaagatctaatgatccaaatgtagccgagcggggggcgtggattgtttcacctccaggaaattatcaagagccgacttgtgccttcaaccacgtgacctttgtagtccattgtaaaagaaatgtctctatgctatttactcatacattacaacagttttttttgtaa

SEQ ID NO: 45768 - DNA, 553 bp, Zea mays
  Clone ID: MRT4577_141749C.1
tgctagtgtaatgtagtgtagtggtggccagtggcacaacctaataagcgcatgaactaattgcttgcgtgtgtagttaagtaccgatcggtaattttatattgcgagtaaataaatggacctgtggtggccaagcaaaaaaaaaaaaaaaaaaaaaaaaaaaaaggcttgtacaagcttttttttttttttttttttttttttttttttttttttttttttatttttttttttttttttttttttttttttttttttttttttttttttttctctttctttttttttttctcttttttttttaccccccgccccccacttttttatattaatttcaaccttttttgtccggttttttttgtttccccttttctacccaatttttcacaaaagcgggcgctggagctttcttgggaggaactttttctctagaaaattactaaaaaaatttggggggggataaatggggggtttccctggggggcccttggggggccccaaccccttttaaatgggggcccccccttggcccgttttcttgagggaaaccttc

SEQ ID NO: 45769 - DNA, 245 bp, Zea mays
  Clone ID: MRT4577_14174C.1
tcatctgtatagcaagtaacattgtaacagtgagatgccatttgaaattataaaaccagttcggtgctagacatttccttttttctttatgggttttttgaggcttcgttggcgagctctaaggttttattgatttgaaaagcagcattaatttcttttttctaacagtcatttgcgaaataaagttccctgatgtcttggttggcaggtgaacaatcggaagccttaccataggtgtgaacttt

SEQ ID NO: 45770 - DNA, 810 bp, Zea mays
  unsure (1)..(810): unsure at all n locations
  Clone ID: MRT4577_141750C.1
ccggccgggggtatgtgaaaacccaattcttcaaccctacaggatccaacaggcaatcgcagctggcatcttacctttatcacccttgttcctccaactcagcctcggggtcgccggcggcgagccaggggttgaaggcgaggagatcgcgccgctcgccaaggagaacgtggccgcgccctgaagagttcggcctgcagggcccctgatctcgcgcgtggtgcaaagatgttgggacatcttcttatatatgctgtttcgtttatgtgatatggacaagtatgtgtagatgcttgcttgtgctagtgtaatgtagtgtagtggtggccagtggcacaacctaataagcgcatgaactaattgcttgcgtgtgtagttaagtaccgatcggtaattttatattgcgagtaaataaatggacctgtagtggtggagtaaaaaaaaaaaaaaaaaaaaaaaaaaaaaaaaaaaaaaaaaaaaaaaaaaaaaaaaaaaaaaaaaaaaaaaaaaaaaaaaaaaaaaaaaaaaaaaaaaaaaaaaaaaaaaaaaaaaaaaaaaaaaagggggggaagaacttaaccataaacacctataagggggaatattggcaaatttcaaaaaaggagggggagatcaaaaaacctaatttaagggcacaaatggatcaaaaaaaaaaatagataaaaatatatacgccccttaaaatcggttcgagaataaaattaaagtaaaaaacccttcantaaaaaagaaccttaaaaagatcctaatggaaaaaaaatgtgattaaaagaaaaaaatcagagtaag

SEQ ID NO: 45771 - DNA, 385 bp, Zea mays
  Clone ID: MRT4577_141751C.1
ggggggccccgcgcacacgtgggcatattaactcctgtggcctatcgaagaccggactaccaaacccctttctcgccggaggatgagggtgggggcggtgaaaagagatcacgagggctcatccgggaccgaaggaggagaacttttttttgagcataggtccgggggggtcccggggctgacacaagggggtgccaacccctaccgatacgcaggaggtccagggcccgggacgcggaggccgcagtgacctgctgcagatgccggcggatcggcccctaagtcccaacggggctcgcggagccggaactcaactggaggggcgctgtcccgcggcaccaggctacgccgaagcagtcgctgagccgccgggccgggggcgcgc

SEQ ID NO: 45772 - DNA, 427 bp, Zea mays
  unsure (1)..(427): unsure at all n locations
  Clone ID: MRT4577_141752C.1
ctcgaggccggccgggaacaaatgacaagaaggggaagccacgcgatctggtattgtccgagtgcgtagagcgcgatcgagagcatccacgatcccggaggcaggatagacataccgtgcgtacgctggggtggataatggcggaagacggcggcgcggatgaaggcgtacgcgtactcgttgacgcccttcctgcagaatgtaatgccggcgctgtggaaggacatcaccaccaagattcaccacaaggtcaccgagaactggatgtccggcacgctcctcctcacccccgtctccggtacctaccaatacgctcatgtggtacaaggagcagtagaaggtttcccacagatattaaatgagctgacattgacagacagnactcggagctttcgtgatgggtttcatattcctcccatgatgattt

SEQ ID NO: 45773 - DNA, 156 bp, Zea mays
  Clone ID: MRT4577_141753C.1
gggtggtgcaatttgcttaaaaggacattttttcccaagggagggctgtttttatttgattacaggggacataggggatatatagggtacagggggaggaaaataatgtacatgactcggtgacaaggacacaaggaccctgaaatacctatgctc

SEQ ID NO: 45774 - DNA, 816 bp, Zea mays
  Clone ID: MRT4577_141754C.1
cctcgaggccggccgggatcagagtccctcttacactctcttctctaatacacacgtctgtacacctacattcaacccacgcacgtaccatcaccaccaccatgccccgcaacggagacggatcctcagacaacggacccattgagggccagaacattgtccacggcaactctggagacgccaccatggaccacactaagaaggtagctcccatgcctgaagtcgaaaagggcgatggcatcgaaggcatgagcgcttcgggcggaggcgagatgcccaagaagggcatcacaggccagggcaaagcggctacagactcgaacaagcccccgccagtcgaccaggtcaccaagtaaaaaaggcaccaaaagaatccctgttagttacatacagcgaagaatgcaagcccccttcaccgcaacaaagaggcaagcatcatcatgtaacaacatcggttcggcggtagtggtagtaaagttacgttggggatgagtggcccacggccagaaagatcggctatacggtgcgaagcgggtttagctcacatggggctctctcttatcccagtctagcagggttttggctagtaagtagtcaagcgagggaggggaggggaccacgggagacctttcaacactggggagtcccgagtaaaatcggtgcttttaacagtcttgtgttggcattccatttcacctacattggggggtatgcgaatgggactctttgtggcatgaattgtttacatgtatacctacaaaagagaagctggtacttttcctttgatgcattcaacccaatcaatctcacatggtt

SEQ ID NO: 45775 - DNA, 319 bp, Zea mays
  Clone ID: MRT4577_141755C.1
ccccccaaaaacccatccccccaaggacaaaaaatatgggggggcgggccagcttttttttaccctatataaccggataaacccgccccttatggcaaaccggccacaaggaggggggttgtggaatgtaaaaacccttttgtttcacccccgactcaatccccccttaaaccccacggggcatccccccctaaaaaaagggggggagggaaaaattgggttgccgtgcccaggggagatcctcgaaaacccccaattggccccggtttttggggatccccttttagccttttttacgggggggtaaactaacctgaag

SEQ ID NO: 45776 - DNA, 213 bp, Zea mays
  Clone ID: MRT4577_141756C.1
gttaatatatgaacacgccgcctacgaacatggcatgtatatagaacattttgcttgatgtcctatctgtggaaggccgcatacatgatgagaatcgccttctagaccccaacaaaaggattacaactacgataattcaaaagcctcagtggacatatatcgttagcggggcatgctttctcatgcacaatatatcaactaaattcgcttgct

SEQ ID NO: 45777 - DNA, 468 bp, Zea mays
  Clone ID: MRT4577_141757C.1
ggggcctcccgggaatcccggcccggggccggccggggccccaagggcccggagcgggaaggggaaaaaagcctgccggagggagggggaaaaagggccacagggggaaacggggaaaagcccaaaatcccaaaaaacaaaccacccggagccaaaagagggaaaaaacggagaagcaaaggagggaaaaaaatgaaagtaaaaaaaaaggaaaaactggccggcaaaaaacaggaaaaaaaagggaaacccccgaagaaaggaaccggaaaaaaaaggggaaaaggcgggtggaggaccggcccccaagaggggcaacaggggaaccccctaaaacggcaaaacctgaaaaacctggaccgggcggcccccgcagagccgcacaaagggggcaaaacccggtcgccccggggggcaaaaacacgggaaaaacgcgctgaacggggggtaatagcaggagacaacaaa

SEQ ID NO: 45778 - DNA, 832 bp, Zea mays
  Clone ID: MRT4577_141758C.1
cggacgcgtgggcaataatgtaacaagcatcagcccggcccagccagcttccattcccaaggaaaccctccgctcctcccacgtctcccatggccgccgccggctcagccgcagcgccgctccgccggctgttcctccgcctccgtgacccgccgccgctgccctttaacacgctcctatcccgcctcgcgccacatctgcagcaaggccccaccctagccccagcaccagccccggctcttgcactcccgacctcgacgccggcccaaacgccatccgggattctccgcgacgcgctcttctccttccacccgggcctccaggcacacccgtgcctagatccgattgggggtgcccccgcaagggacgaggccggcccaggggcggcggaggtgtgggcggacagcgtgaagaagaagcgcaagcgtaagatgaacaagcacaagctccgcaagctccggaagcgacttcgccgccagacatgagggctctctcctctccggttagacaccttgtcattgagttgcgtccagtgatttcatctctccttcggttgatccgtagagcaagacagaaaggagatacgggtgaatgacaagagggctgtgtaatgaataactggttttgatcacattttctgtagcccgctcactgtgttagaagattttggttggtttcgacaaggatcatgttccacaacgagacaaacgtttgttaagccccttgttagttactgtatgcaaatggaaatgttgcgttgctcaataaaaaaaaaaaaaatctttgcctcaaaaaaaaaaaaaaaaaaggcccctagggccgcgggcggtct

SEQ ID NO: 45779 - DNA, 501 bp, Zea mays
  unsure (1)..(501): unsure at all n locations
  Clone ID: MRT4577_141759C.1
gctcaagaaaagctgaccgaggggggccactcgaacatttgggggcggagtgcgtccactcagggtcggggggcaaaacaaaaaggcacaaattattcactgccttttcgcctgtatgcttccctcctcttctttctactatcaataatgttacaagctggacagcgggcgctgccttcatccgaagcattatcatctccagtaagattagaacctgtacagaagctaccctacctacccttttacaaacaactcacagggggtcaaatgatcaattaaatcgagggaccctacacgatgtcccgccgctaccgctgccgttgccgcccctctctctgacgacaaaccaaacacttcttacctcttcgatcggnctcgtgctccgcttggaaggggaccgacgaagcaangttgaactcatacctctgtcacagatcacagtactaaagcaaactatgtcaatggctacctcatagctgcaaggccagaacagggtgcttt

SEQ ID NO: 45780 - DNA, 1034 bp, Zea mays
  Clone ID: MRT4577_14175C.1
aactctgcctgtatctgcctttccaataggcagacaacgaaaatgtttccacagcaaactgcataacatatgtactggaaaagaatcagcaattcgtagaacccacttatgccttggtcatgtatatatgatcaggcaacttccgtcctcttggacatccaacaacggtggagcacagttagctcacttggttgaacaaacgccctggcggcgtgttacttcgcttcgttttgttccagttgcatcacctgactcctagtcctaggtcgttttactttgcttcattttgcttcagttgcatcacttgactcctcaagctggactccctcatctgcaggttttgtgcttggtataggagattaccgcactcctctatcaaggttctctcagtagcgataacctgggccagattagaggccacatcgccggtttgttcaacctttggcagaaaattctcgatgcaaggtgaaagcggttcaagcagttgtgctgctgactttaggacttctgtaacttccccacagtttacatttacactcccaatgattggtagccttagcgaggtgttagacagcgctgttgttgctcctctaagacagcttgcatgacacccctcaatctcaccccactgaatcaaatatggcacctgctcatttactactgatctcaatatatgctcccttttcatcctctctacctctgctctcttctcggcgacagataccctgaggctggcaatcctctcctcgactccgtacaaggatttctctgcagccgccgcctgggccttgcctgctgcctcagcccgggcgttgaggaacctgtactggaggtacgaattgtccatcagccgcagcaggtgcacgtcttcctgcttccccgcaaccttcctgccccccaggatcgccgccttcttcagatcagctaccttcggcccttgcggctgtggtggcctccctgccgccgtcaacttcccagccatcgccgttgagattgacagtgccgagttgagcgagcggtagcacagtgggttg

SEQ ID NO: 45781 - DNA, 261 bp, Zea mays
  Clone ID: MRT4577_141760C.1
aaaagggattctcacctttattaacacttccttcgtgacactgtatactactacgggaagcaaaacatccaaacaaccaaccaccctgaccagggatggatggagcgcaaccaagccaacgatctggaagaatagaggttatatttatgcacggcacctatagccccttcctagagagagggagagagatttggtctacgatacgagtggagagactggagactgataggtgtaatgaaagaagtttcttgtcgaaactcc

SEQ ID NO: 45782 - DNA, 396 bp, Zea mays
  Clone ID: MRT4577_141761C.1
ggaaaggggacccgaatttctaaaaggtaagggcaaaacccctggaaaaaaaaaaccgcccctctttagtggggaaaaaagcgaaacaatacccggggggggacccaaaaaaaaagggcatgggtactacaataattgggaacccaccgaagcaatggcaaaacccccaaaacaaaatttaaaggcccggggggaaaaaaaaaaaaaggggggggggggaaggaaaaaaactggccccctcaaaataaccgcctccttttttttttttgaaaaaaaaaaaataaaaatttaaacccttgggaggggggggggggaccaaggaaaaggccaaccccaaaccccctttttgggcaggtcccgtttagggaaaaaggaccccccctcctgaaacagagg

SEQ ID NO: 45783 - DNA, 192 bp, Zea mays
  Clone ID: MRT4577_141762C.1
aatcaagacactacgaacgtgagcacagaattcaacacaagggcgacatcgacaacagaccgacacaacgcgccaaagtataacgcacaacttaccaccggggagaaacctgaccaccaaaggcataagcaccgacctacatcaacgaccgcgacccaaatcccccaccgtcgtagactggctctacagcga

SEQ ID NO: 45784 - DNA, 744 bp, Zea mays
  Clone ID: MRT4577_141763C.1
aacgaacaaagaaaactctcgggcagcgcgaggcgtcacgaatcgaatcgagctcgagccggaggagagcgtcggaggcggcgggcatggaggatctcagcgtcgaggagctcgcctccaatctctccacctacaaggaccagctccgcgaggttaggaagttcatcaaggagaaaaaagatgacgctggaatttctgaatatgttgatatggaaaaggagcttcaagaggttattacattaaccgaagagcttttggcaactgcaaatccaagtgagagtgcgcagaatgatgtaggtctatcaccgccaaattattctgctggagtgcactcagaggcactggatgacctctcacaatcccatgaaaagtttgcagttggtaccaaagtgcaagctgtgtatagtgaagatggggagtggtacaatgcgacaattgaaggtctgacaccaatcggctattttgtaagttatgaaggctggggaaacaaggaagaggtggaccctgctaatgtcagggcacttgacgtggaagctgctgatgctttaggacaagctgaaaaagaagctgaagcgacaaaaatggcattaaagagaaaagttgaacaagcagcaacatctgactatcagattcgtagcttacccaccaaacttaagattgatccaaatgatcctgaagatgtgaaagctgcaaagcgtaagaagatccatgctttcaagtcaaaagcccgctttgagcaactag

SEQ ID NO: 45785 - DNA, 365 bp, Zea mays
  Clone ID: MRT4577_141764C.1
aaaaaaataaaacagactcttggggcgccccgggaaacccggaaaattccctcccgggaccccaagcttccccattttgcgcctaacgagggcctttagaaaccgggggtatcacggggactgggggtaaacgggggaaaatttaaaatggcacacaatacaccctacggaagcacccagggcaaaaacggggaagcccggggggggacctaaaggaaattaattgcattaagcggactgccccgattgcccacggtaaaaccggggaacccagggggccaatggaattttcaaatcggggaaaaaggggggcaagggtttttgcgccatgggggccctgggggtgaccctctgtaccgggaaaa

SEQ ID NO: 45786 - DNA, 300 bp, Zea mays
  Clone ID: MRT4577_141765C.1
cgtccggatctagagcgcgagcgggcgccttttttatggggtcgtcctgtacctccacaaagggcagggggacgacagacaggacgcctcgaatatgctccgaaaccaggtcaacaccgacgtgacgacatggagccctcaggggcgggtgcactatgtggagtacggcatggctgccgtgaagcagggctcagcctgagtcgggcttcggtccagcacccacgccgttctctccggcgtcaacaagcccgcctactagctcttctcctaccagcggaaggttgtttcgcgaagatgacc

SEQ ID NO: 45787 - DNA, 331 bp, Zea mays
  Clone ID: MRT4577_141766C.1
tcattgagaccactagcacataaagcacatatgtccaacaatggcagcaaaatattttgcttcttatgctccttgtctttctgcagtgctgctccgaaccattttcacatgctcacaagctctatagcttctttttcccccatacctctaccagcgggtcttcagtatgtgaaaacccaattttaaccctacagatcaacaggcatccagcagcattaccttatacccttgttcctcaacaccgtagccctattacagcagtacctttggtgcatttgtgcacaaaacataaggcacacactcaacaacttggctagaacctgctgctact

SEQ ID NO: 45788 - DNA, 389 bp, Zea mays
  Clone ID: MRT4577_141767C.1
attcggctcgagcgcaatggcacagggttagggcccttattaggaacacctgcgcgactggggtgaaaacttctggctgaaagcaggggctgaagcctatcgacgacatgatgatggagaggaaggggcacaaggagcacccatacgttgttaggacgaactaatacatgcacgtcctaacatggttctgaggctgactgactgtactgcgcgtgcactaggaaccatattaagagagcctagactaaagcttgggacaattgagctataacacggagctagagactcatcatgccagccatgcctaatggggtacgctgcccttcatgaatcccaaatcaacatgcgtggttaatgcaaccaaggcaaaggctgctatcgccatagga

SEQ ID NO: 45789 - DNA, 164 bp, Zea mays
  Clone ID: MRT4577_141768C.1
cccacgcgtccgcccacgcgtccgggcagaggctatgaagactataactcaagctgctggtcctaatgaagagtgagtattattgactatgagcactttaacagatgatggttcaattgctctgaacaatgctgcagtcgtgaagcatcattaactgaaggcgg

SEQ ID NO: 45790 - DNA, 139 bp, Zea mays
  Clone ID: MRT4577_141769C.1
cactccaacccgaaaagatccaacgaggtgactccgcgccccggtcatgggtgacacccaatactccttctctcttaccactttcactcctctctgtaaacgttctgcaggttttgcgtatgctcttttttgtctactc

SEQ ID NO: 45791 - DNA, 506 bp, Zea mays
  Clone ID: MRT4577_14176C.1
aaaagccctggaaccgaataaaggaccgagtttaactatccgtctaaaattaattaagcgcccccggggggggcccagggaaataagctaaagcattaaaagccttttccacctgccctgcccaaaactggtggcgaaacacgtaaaagaaaatcgctgggctttccaatccggaggttctgccccggaaaaaagcatgaaaaagcatttttttgccaccccttaaagcttttggaaaaaaaaggcccaaaaacttcaccaccaaaaaaggcggcctttgtggcttaaaaaaaaactttgagggagggtttccaaattccaaaaaccttttaaaaacttttaacattaacttgcaacggcatgtccattggcagggagtaaccagagagtaaaggaccgccccaaacaccatttttgagaacaaaacccatgggacgagaaacatagggaccacctcctataccaaaaaaaaccttttaacaattcgaagttaacaactaaggggg

SEQ ID NO: 45792 - DNA, 282 bp, Zea mays
  Clone ID: MRT4577_141770C.1
attctattggttggctaatcattattttgttcgctcaatacttactttttttttactttccttgagaaaaccaagccaaccataaaaaaacaaaaaccccccccaccacctaccaattcaaagcccggtccgaaactcacaccacggccagacgatcaaggcccccacgtttgagcacttcaacatctcactgagccccatgggctttccccccccaaaaacgcccactcccactcgttcgtgggcaaagacccctcctccagccgattatcgggacactgg

SEQ ID NO: 45793 - DNA, 355 bp, Zea mays
  Clone ID: MRT4577_141771C.1
actgcacatgcaccaaggtaacagatggcaatttaaggtatggttgttggagataactctgattactcatttctggtagccagaggcttttgattatatagaggtgcagaaccttggcaggcgtacaccttttgggctgcccaaggtctttaaagactgtgattaactaacacagttatctaggaaatgcttaggaagtagggcttattaactacattttttccccaaagacctgctttaattaggttagtatctctatgtcccaagtcctgttccttatctcttccagcttgggtttgcccaaagctttagcaatatactatcgggctgatcttcagggggaatgaactctgtc

SEQ ID NO: 45794 - DNA, 432 bp, Zea mays
  unsure (1)..(432): unsure at all n locations
  Clone ID: MRT4577_141772C.1
cgctcgagcgacggggcgggacctcgctcggccgctgaggtttccgccgcgatctcgactcagcatccgcagctctctcatgctgacattcggaatcaggtcgacgcctgctgctcctgccgacactggcggctcgtttcgcattcgggcagtggcaacaagaatgccttcaaggcacttattgctgcagagtactgtggggtcaaggttgagctgaccaagaattttgagatgggtgtctcaaacaaaaaccctgaattcatcaagatgaacccccttggaaaggttcctgttcttgagactccagatggtgatgatatagagagaaatggtagaggacggtatgttgttcgtttaaagggagaatgattgataaggggaggatatataaaagaaaaagaatgtggtgatttttgganggaaatagttttt

SEQ ID NO: 45795 - DNA, 389 bp, Zea mays
  Clone ID: MRT4577_141773C.1
ttttttttttttttatactcttttattttattttattgtatttttatatttattatttttgggggaacagcagggaaagaatttaattcaaaaccattccagcgttgcacaacataaataaataagctaaaagcccgatcactgttaaagttagggaaccttaaacctttactaaactgattaggaaaaaatattctgaaaacttatcttttaactgaagaacaaaaatttcctcaaaaaaggggcccaaaggggaaaagcttaccctaaagtataaaacatacattactatattaaaaatttacaatataggaaagagcccccaacttctgtctcgatgctcccagataacttttaaaaaaaagtttgaaagtcccatgataacacac

SEQ ID NO: 45796 - DNA, 640 bp, Zea mays
  unsure (1)..(640): unsure at all n locations
  Clone ID: MRT4577_141774C.1
gnaaaactagtgcatgcacgcttctccacttccacctcacagctagccacacagccatggcggcggcggcggcctctgccacccaagcagcactcgcgctcgcccacgacctggaggacgcctccgaaaggaaggcacacttcgtgctggtcccactgatggcgcagggccacaccatcccgatgaccgacatggcgtgcctgctggccaggcacggcgcgcgggtcagcttcgtcaccacgccgctgaacgcttccaggatcgcggggctcatcgaccacgcggcggcggcgggcctcgccatccggttcgtcaggctccgcttccccgccgccgagttcggcctgcccgaggggtgcgagaacgccgacatgctccagtctagagacctgttcaagaacttcatggacgcctgcgcggcgctgcgggagccactcgctgcgtacctcagagagcaagagcaacctccgagctgcatcgtatcggacatgggccactggtggacaggtgacatcgcgagggagtttggtgtgcccaggctgacgtttaatggcttctgcggcttcgcgtcccttgccaggtacatcatggtccgcgacaacttgctggaacacgtcgaagatgagaatgagctcgtcag

SEQ ID NO: 45797 - DNA, 506 bp, Zea mays
  Clone ID: MRT4577_141775C.1
ggacaaaggagtcctacaatttttattgaaaaaaacaaatacttcgaacgcacagggcccacaaacaagccttaaaatttattcagggaaccaaaacaggaagccatttggctggttttaggactatacacttaaccgggggggaaaatatctacttaaacacagctacatgggggcaaaaaaaacaggggcatataatcttctcgctatgaaaaacagtatatacaggtgtattctaaagcccacgggggaaaagtcaaaactcgaaacccccgttcaattgaacggaaaaaaaaggccttgccatgttgtcaaggggggtctccaaggggattactagtcccaaactgccgacctggccattccatttggatcgcccaaaaaaaaaaactgtaaatgctgagggatgtcttgagcaaaaaaaaccacacattacgctgacttcctccttaaaaaaaggacaaactcggggcatattccagaaacaattcctccgaaaggggggc

SEQ ID NO: 45798 - DNA, 619 bp, Zea mays
  Clone ID: MRT4577_141776C.1
tatagaagcactatgacgtcgtatgcacgcgttcgttcctttggagcgtccgcactggacgtctttttttttttttttggacggcaacttgtctgtggttaaccaccccctctaaaatatccaacgaccgcccaatggggggtatctggttcatcacgtgcactgttgagttgatacgttgttaccccatggcgaattagacaataaacataggtttgcgcactgtttatttaacatggggtgccaaccgctaccatacctgagcatccgatcaacacaagggttaggttaatcctaggataaggcccgcggtcccaaggggatggcggctacttaccatggaagcccagtggtgctattaaggtgttacaacaagtcctctacttgaggctggccgtcaacaatcccaccattgtggtctttattggcaccacccgagtaaacccttacgtggtggctgccaactcggaatggaggccgtggacatgcttgtctgtctccacgggagccaccttcacctcaagaacatttgcgagcatgtcccgaggttgtgcccacctcccctgatggggaggtggccagtagcttccttacaagggaggtggagaccagccgcctt

SEQ ID NO: 45799 - DNA, 157 bp, Zea mays
  Clone ID: MRT4577_141777C.1
cgaggttatggtaggttagaggaatcagaagatttgtcaacccaagctgatgggggaaattcggaggtggttctagttagtgtggacggacatgtgctcactgcacctatttcttcaacagaggagggtatggaggatgtgcagttatgcgaccctc

SEQ ID NO: 45800 - DNA, 648 bp, Zea mays
  unsure (1)..(648): unsure at all n locations
  Clone ID: MRT4577_141778C.1
gggtcaaagaacgcaagcctgtggtctactaaagacgggggcatcgccatcgagggcaaacggaggccacaggattagcagcttctccgaactcccctctcgtgctgctgcgtctcctcctcatcgtcctctccagtgtccagctcggccatggcgttcaccgtctccttctcccccgccaacgttcagatgctccaggctaggagtggccacggccacgccacctttggaagctgttccgccgtgccaagagccgggccaaggcagcgagcagggcgccgtccgggaggaccatcgaggagtgcgaggccgacgccgtcgctgggaagttccctgctcccccgccgctggttaggccgaaggcccctgaaggaacgccggagatcaggccccttgacatggcaaagcgcccccgtcgcaaccgcaaatcacctgctcttagggctgcattccaggagacgagcatctcgcctgctaactttgtgcttccattgtttatccatgaaggagaagaagatgctcctatcggagctatgccagggtgctataggcttgggtggaggcacgggctgcttgacgaggtttacaaggcccgcgatgttggtgttaatagttttgttctctttcctaaagntcccgatgcattga

SEQ ID NO: 45801 - DNA, 1165 bp, Zea mays
  unsure (1)..(1165): unsure at all n locations
  Clone ID: MRT4577_141779C.1
aaagattcagtgctctgattcttcttgggttgtctttctccggcagatctctaacgaggagatgttctctcttcttttcttttcttcttttttttgaaagcttccctgtaacctgaaatcggctttacttaaatttcgagccaacttaatcttcttctttgccaattcttttttaaagaagaaagttgagagatgcctgtagttttttttttgggtgtgtttgtgactccagagtctgaaatcacaaatcagagctgtatagggagcaggtgatgactgagtgactgacaaacgtggggaagatggagacaaagaaacgcaagcctgtggtctactaaagacgggggcatcgccatcgagggcaaacggaggccacaggattagcagcttctccgtgctgctgcgtctcctcctcatcgtcctctccagtgtccagctcggccatggcgttcaccgtctccttctcccccgccaacgttcagatgctccaggctaggagtggccacggccacgccacctttggaagctgttccgccgtgccaagagccgggccaaggctgcgctccacggccgtccgggtcagcagcgagcaggaggcggcggcggccgtcagggcgccgtccgggaggaccatcgaggagtgcgaggccgacgccgtcgctgggaagttccctgctcccccgccgctggttaggccgaaggcccctgaaggaacgccggagatcaggccccttgacatggcaaagcgcccccgtcgcaaccgcaaatcacctgctcttagggctgcattccaggagacgagcatctcgcctgctaactttgtgctcccattgtttatccatgaaggagaagaagatgctcctatcggagctatgccagggtgctataggcttgggtggaggcacgggctgcttgacgaggtttacaaggcccgcgatgttggtgttaatagtttcgttctctttcctaaagttcccgatgcattgaagtctccaacaggagatgaagcgtacaacgataatggtctggttccacgtacaatccgcttgctcagggacaagttccctgatattgntatctacacagacgtcgcgttagacccttattcatctgatggtcatgatggtattgtgagggaagatgctgtattatgaatgatgaaaca

SEQ ID NO: 45802 - DNA, 427 bp, Zea mays
  Clone ID: MRT4577_14177C.1
aaagaaaaagctacccgaaccaaccctgacaactatataggggggtaccctcgtatccattggccctatactctagtagaaaggggcaggggcaacccaaatctttggggggatatttacatggcgcagctcgacctataactgttcctgtgcgcaagaaataaccgatcaaaccccaagttttcatccaaaaaaaaaaaaaaacaaactggttcaatttgggtttacatcaaaaatgaaaaaaaaaaaaactgttttaatttgtacaccgtctactgatctaactaggcatgcatgggcgccggggcaggccggaacaaaaggtactgcaacgcaaggggtttcttttttctgcaaccaaaaaccatcccaaacattattccacacccagccacccatgtttgcattgcaagcaatgaggcgcaac

SEQ ID NO: 45803 - DNA, 395 bp, Zea mays
  Clone ID: MRT4577_141780C.1
tagctttttgtatttgcctgttgattcttatatttatgtttattaagtgggggaatgggtagcttctaagaagggagggaacaacatccatttgatgtgaatcattcatggcacagtatgcaatattggcatatgtggtactatacatacacacttactgtactcacaacatatataatagaatggttgattaatttattaattataaattataaatgtcgtcctttctatatgatccaaacttacttactctttcattctatttttttacttttttattattgttcccttatttctattcacttcccttttttttattatttttttatctttaattatccttttctttttttattatttattttttttattttaatttttcttttacctttttt

SEQ ID NO: 45804 - DNA, 2106 bp, Zea mays
  Clone ID: MRT4577_141781C.1
atgtcggcacgaggctgttggggtggtgaagcagcatacagcagctcacgcctatggtggacaaccaaagattcagtgctctgattcttcttgggagcaggtggcgactgagtgactgacaacgtggggaagatggagacaaagaaacgcaagcctgtggtctactaaagacgggggcatcgccatggagggcaaacggacgccacaggattagcagcttctccgtgctgctgcgtctcctcctcatcgtcctctccagtgtccagctcggccatggcgttcaccgtctccttctcccccgccaacgttcagatgctccaggctaggagtggccacggccacgccacctttggaagctgttccgccgtgccaagagccgggccaaggctgcgctccacggccgtccgggtcagcagcgagcaggaggcggcggcggccgtcagggcgccggccgggaaacggaggccacaggattagcagcttctccgaactcccctctcgtgctgctgcgtctcctcctcatcgtcctctccagtgtccagctcggccatggcgttcaccgtctccttctcccccgccaacgttcagatgctccaggctaggagtggccacggccacgccacctttggaagctgttccgccgtgccaagagccgggccaaggctgcgctccacggccgtccgggtcagcagcgagcaggaggcggcggcggccgtcagggcgccgtccgggaggaccatcgaggagtgcgaggccgacgccgtcgctgggaagttccctgctcccccgccgctggttaggccgaaggcccctgaaggaacgccggagatcaggccccttgacatggcaaagcgcccccgtcgcaaccgcaaatcacctgctcttagggctgcattccaggagacgagcatctcgcctgctaactttgtgctcccattgtttatccatgaaggagaagaagatgctcctatcggagctatgccagggtgctataggcttgggtggaggcacgggctgcttgacgaggtttacaaggcccgcgatgttggtgttaatagtttcgttctctttcctaaagttcccgatgcattgaagtctccaacaggagatgaagcgtacaacgataatggtctggttccacgtacaatccgcttgctcaaggacaagttccctgatattgttatctacacagacgtcgcgttagacccttattcatctgatggtcatgatggtattgtgagggaagatggtgtaattatgaatgatgaaacagtttatcagttgtgcaaacaggctgtttcacaggctcgtgccggtgctgatgttgtcagccctagtgacatgatggatggccggattggagcacttcgctctgctctggacgccgagggcttccatgatgtctccattatgtcctacaccgcaaagtatgccagttcattttatggccctttccgagaagctttagattcaaatccaagatttggagataagaagacgtaccagatgaacccagctaactacagagaagccctcatagaaaccgcagcggacgaggcagaaggagccgacattctgctagtgaaaccgggattgccgtacttggacattatccgactgcttcgggatcattcagccctaccgattgctgcttaccaggtctcgggcgagtactcgatgatcaaagccggcggggccctgggcatggtggacgagcagaaggtgatgatggagtcgctcatgtgcctgcggcgagccggcgccgacgtcatcctgacctacttcgcccgtcacgccgccgcggtgctgtgcggcatggggcccaagtaggaggcgaggcccgcccgccattcctgccctgcactgtcattgtggagttgagcgatgagttggcttatcgtatgttttgggggcctggcactggcagaggattgtccgaggccttggatctcttccaataatctgcgccgggagataataagttttggagttatcgcatttcccggtactaatcttctgcgtgttgctagtactgaaaaaggtttggattttgaagcgattttagacagctggattagtacctcaacgaacgaaggatttcagggg

SEQ ID NO: 45805 - DNA, 704 bp, Zea mays
  unsure (1)..(704): unsure at all n locations
  Clone ID: MRT4577_141782C.1
gnaaccagcatctggnaccagnngcccacctcccgncagnagnaaagcaacgccacagccagccgcctgctagccctggcccggcgccgatgagtgcgtgtcggggcagcccatgctcctctcccacgtcttcaagtccgagaggatcatgctctccgtggaagcttggctggccatcaccagctccaagctaccgcatggtgcgctccacacacagcgtcgcggccaaggcgtggtacttgtacttcgaggtcaaggtcctgcagctcggatccaccggccacacccgtctcgggtgggcaacatggcggacctcgaccttgcctgcccatcggctgtggtggcgcctatggatatgggtaccacgacatcgatatggtgccaaggtgcacatgtctcttcaaggggcaagtatggcgatgatgtgtacggaaaaggagatgtgctagggttgtacataactctgtacctcatggggagaggtttgagcttcaagtgtctgaacgacaagggcaagccttttcttgtaaagggcaggatgcacgggctcatattctaggtcagcactggctcatgttctaggatcatgttgcaacttgtaaccccttaatctagagaacctctgatcggataacctttgctagtaagggtacgtgcgtcctatatatggtcgtgtaaaatatggtttgcattattattatata

SEQ ID NO: 45806 - DNA, 268 bp, Zea mays
  Clone ID: MRT4577_141783C.1
gcatagcctcacctctttcctccagagtggctctctgcggccctgtgttcctgctacagagtgttcttttctggagtcaggatgttctcggtcaccctcctggttctgccctgtcccattccaccccaccccagggggaacagtagcttcaccttgttattcccattgctctcctggctcactcttacggtcggtctccagtgactgaagcattccccacccttggaatttctcatcttctgcctcccttcctactccttttggtttt

SEQ ID NO: 45807 - DNA, 796 bp, Zea mays
  Clone ID: MRT4577_141784C.1
cctcgaggccggccgggatcttgtcttgatcctctggtccgtgtccatggagtcggccatgctctccgctaccaccgcgccactcctgcaggagggcgagcctgtccgagttctccggcgtcacgagctcctagtcgctggccatgcgccggaatgccacctccgacgacttcatgtcccgtcgtctccttcacgacccacgacggtcggcacgagtggcgggtcgcggtgttcgccgacggtaggcgaagctgaacgtggacatcaacgggttcggccgcatcggacgcaagttcctgcggtgctggcacgggtgcggcgacgcctcgcccctcgacgtcatcgccatcaacgacaccggcgtagtcaagcaggggtcccacctgctcaagtacgactccacgctcggcatcttccacgccgacgacaagtgcgtcagggaccacgccatctgcgtctacggctaggacatcaaaggcgtgtccgaccgcaaccccagcaagctgccgcgaggcgagctcggtatcgacctcggcatcgatggtaccggcgtcttcgtcgaccgagagggcgcgaggaagcacatccaggtggtggccaacaaggtgctcatcactgcgcccggcaagggcgacatccccacctacgtcgtcggcgtcaatgccgatcagtacaacccctgacgagcccatcatcagttacagcctctgcaccagcaactgcctcgcgacattcgtcaaggtgctcgagcaaaagttcggcatcatcaacggctacatgagcaccacccgctcct

SEQ ID NO: 45808 - DNA, 425 bp, Zea mays
  Clone ID: MRT4577_141785C.1
cttcacggcagcaacagccatcagggagccatgcccctcccatggcggctcctctcctctaggcgccgcctctcccaaccagcgcatgttcatcttcctccccaccctccttccctggtgcaggcgcagggagcagttccctggccgagctccattccagcagggacgcccaggtcccgacggcccctgcggcgagctccttcctccaagctggacgccagccgagctccccttccggtcgccgctcctccctgcgaacctccccaacagggagcctttccccctgcgcgcaggatctcccaggcccgatctcggcgtgctccatgtccatggcgctgcagcagcttgggtttcacacatggacgcccctctgcagctcacccctctctgtccatggccgaaatcccctggagaagcttcccacg

SEQ ID NO: 45809 - DNA, 996 bp, Zea mays
  Clone ID: MRT4577_141786C.1
acctattccgccggcgggactcctgtccgggaaacgccgatctagaatggcggccaacttctggacgtcgtcgcacagatatatggcggttggcccagcaggtcaaagttagacaaagagtcatagctactgcaatcacgtacttcaggtgtgtgtacacaagaaagagcatgacagagtatgatcctcgtttggtagcaccagcttgtttgtatttggcatcaaaggtagaggaaagcacagtgcaagcaaggcttcttgtattttacataaagaagatgtgtggttcggatgacaagtaccgatttgaaatcaaagatatccttgaaatggaaatgaagctcctggaagcacttgactattatttggttgtttaccatccataccgtcctcttctacagttattgcaggatgctggcataacagatctgacacaatttgcctggggcctcgtcaatgatacttacaagatggatctcattctcatatatcctccttatatgattgcattggcctgcatatacattgcaagcgttcttaaagataaggacacaacctcatggtttgaagaactccgtgttgacatgaacattgttaagaatatctcaatggaaatcttggacttctacgacacctacaagattgatcctcaaaggggcctccaggaggagaagataattaatgagatgtctatggtgatattagactcctaagacacctacaagattgatcctcaaaggggcatccctgaggataagataagccccgtgatgaacaagttgccggcaaaggcttaactcagatttggcgagcttaggagttgtaaactagtagtaaactacatcatacttccaccatgtgtgtactcagcctgcactgtcgcttgtgacgtgttgatgaactacttgatagattcgatgcaaaaaccccatggaattgtttgtgtatgctgctgggtttattcaagttagtagcatctgcatctattaactattt

SEQ ID NO: 45810 - DNA, 194 bp, Zea mays
  Clone ID: MRT4577_141788C.1
gttgtaaagaattactcgcaggcacagattcagtggctcttgcaggttcgatagcaggactcaagggtggttggtctggacctcgggcacagcgcaacgttatctgattgcttggtggctggcgtaggctggaaactggtatccgtagaactcatgggtgtagatagtcaaaacaaacgtcggatccgaatcga

SEQ ID NO: 45811 - DNA, 519 bp, Zea mays
  Clone ID: MRT4577_141789C.1
aaaactctaacatggtgcacattaactaaaactggatcaagttagggtacatgctcccatacatgccacaagcacagattttattgacttaacaatagcttgggtatctatacgtactacaaatatgcaggtcaaaatggacaggttgacaggactagctcagacattagaaacacattgcatccgggcacggcaggggggcgtcctcaggtgcactgaattctacccctgggtgaagagcactttctccaaggtgttcatcaattctaagatgctcgctcggttctggaagacgctgtgctctgagggggctacactcttaatatgacccgcacacaaaccaactgccaagatacatcattgaaagacgactgcacgcctcaacactcatatgattaggtcatgacatcgcacaccgaacgctttgacatcttcacaagctcaatactctcattcacaaatccgatttgcttaaccttcagcataatggcatagcatgacttctccttaatagcctta

SEQ ID NO: 45812 - DNA, 914 bp, Zea mays
  unsure (1)..(914): unsure at all n locations
  Clone ID: MRT4577_14178C.1
ctgacctaagcaccttgccatcatggtccgcccccatgggcagtcagaatggagtatgagatctacaaagcggcaaattccatacatggctattgtaaggtgggagagctgaaacctgagaagtcgatccctgattcaattctcagacaagcaaaagggcttgcaatcatcactgaggtaaaggttggagtgatgcttacatacaaaatcggtactggattggttgttgctcggagaggtgatggttcttggtcccctccttcagccatctctacttgtggtcttggatatggagttcaggctggaggtgagttggctgactacatcattgttcttaggaacaaagatgccatcaaaacttttagtggaaatgcacatatgtcaattggggctggtgttagtgcttctgctggtcattttggacgagtggcagaggctgatttccgtgctggtgatggtggttatgctgcctgttacacatacagttgtagcaaaggtgcctttgtgggctgtgcgctcaatggaagtgtggtgtccactcgagactcggtaaatgcccggttttacggtggtccgattaaggcctcagaaatccttcttgggtcgctgccaaaaccgcctgctgccgcaactctatacaaggctttatctgtattatttgataagatcgagaagtgaatctcctgatccttctctttagtttgcgacacgcagggtagcatggtgaattgaattatttatgggtcattggttcgctctatttaccttatcctagttggtgatgatgcaagtgtacacctgacgatccactgttttccatcaaactgaggtatttggaaccacaaaccactctgtaaattttgtagacaattctcgttagaaatgaaaaggaaaccattttttccaaaaanaaa

SEQ ID NO: 45813 - DNA, 114 bp, Zea mays
  Clone ID: MRT4577_141790C.1
gaatttcccgggtgcgacgccatcgcgttccgatgcgtattccatcatcttacatagaactcgctttgtggtacccatccgcactagtggccctcgagtgggccgtgtgttgtt

SEQ ID NO: 45814 - DNA, 327 bp, Zea mays
  Clone ID: MRT4577_141791C.1
aagacttcttgcaaacacaacggccggaactactttattggtttccctcccattaaaaaaaggggcgcataataaatatcccatggaactttggtggaaacatctccaatggccaaacctattctggtccaggtgcaagaaatcccatggcaaaaaaaaaacgtgatgggctacttggcaagtgaatccggtgccggggaccccatatgctaggagatggttcctgctttactcactaggggaaggcgaatccacgaccgaaaccaaatttagggttggctataagtttgggaccccgttgaactcctccccagcccgtttcttttg

SEQ ID NO: 45815 - DNA, 367 bp, Zea mays
  unsure (1)..(367): unsure at all n locations
  Clone ID: MRT4577_141792C.1
gctggagcaggtgtgtaaccccatcatcagcggactgtaccagggtgccggtggtcgcggttctgngggcttcggggctcagggtcccaatggagggtctgggtcaggccccaccattgaggaggtagattaggggcctttccaagattgctgtttgagtgttggagcttcaagactttgcatttcctagtatttctgtttgtcagttctcaatttcctgtgtttgcaatgttgaaattttttggtgaagtactgaacttgctttttttccggtttctacatgcagagatgaatttatactgccatcttacgactatttcttcttttaatacacttaactcaggccattttttaagttggttacttc

SEQ ID NO: 45816 - DNA, 817 bp, Zea mays
  Clone ID: MRT4577_141793C.1
cgacccgaccctctacagtaagtcagtgttacagcatgatcggaaactttgacaacgccttcttccgtggtgttctggacgctccctctgtcggctcggccaagatccccgacattgtctttatgctgttccagggtatgtttgcggccttgaccccagcactggctatcggtgctgctgctgagcgtggtcgcatcctccccacgctggtctttatctttctctggaccacctttgtgtacgactttatcgcctgctggacctggtcggccaatggctggagctttgttatgggcggcctcgactttgccggtggcacccctgttcatatttcctcgggcggtgctgccttggcctacgctcttgtcctcggcagacgctctggcgaccacaaggatttccgccctcactccatgagcaacgtcgtcatcggcacttgcttcatctggttcggctggtttggattcaacggtggatctgctctttccgccaacttgcgcgccgccatggcctgcgtcgtcactaatctcgcggcctcggtcggtggcatcacatgggtccttctcgactaccgccacgatcgcaagctgtcagtccttggattctgctcgggtgctgttgctggattggtctctatcacccctggctccggctacgtttctcctgcatcaagtgttgccattggattcttgggcgcctgtgcttgcaacatggcagttcgcctgaagcactacttgaagtacgaccatgcccttgaagtccttggcgttcacggtgtgggtggaatcgtcggaaactcctgaacggtgtctttgcc

SEQ ID NO: 45817 - DNA, 239 bp, Zea mays
  Clone ID: MRT4577_141794C.1
attcggctcgagggatgacccaagggttgtcttcgtcacggaattgagagaagagactggtgtcacataactggaggtcgaagttgcagctacggtgtggatgacatatgatttcccaccggacgccagagccaatcggaaggcccagggggggaccgacaggacaggccaagctgaacaatggtgactactgaaactcactgaagatgacaattagactaacctcaatgatgatggag

SEQ ID NO: 45818 - DNA, 4524 bp, Zea mays
  Clone ID: MRT4577_141795C.1
atgtctgacaacaggcgccgatgcaacaggcgtgctcagcaagagcagcatgaccagcaggaggaacaacagaggcagcctcccccaccacccccgatgtcagtggagcagatgttcttgatgcagactcaggcagtgcaggccattgggcagactctggcagccatgcagcaggctcaacagcaaccccaaccccaattgcaagtgcagatgccccagatgccacgagataagcgtggtgagttcatgagagggcaccctcctaccttcgcccattctgctgaccccatggatgcagaagactggctgcgcgcagtggaaagggagctgcgcaccgcccaatgtgacgacagggagaaggttctgtatggcccccgtcagctgaggggagtagcccagtcctggtgggagtcctacctcgccacacatgctgaccccgaagccatcacctgggaagaattcagtgagagtttctgcaggtaccacgtgccagagggactgatgatcgtgaagaaggaggagtttctggctctgaagcagggacccctgtctgttagtgagtacagagacaagtttctgcagctgtctcgctatgcacctgaagacgtcaacactgatgctaaaaggcagtacaggttcatgagaggtttggtggatcccctgcattaccagctgatgaatcacaccttccccaccttccagcacctgatcgatagggcagttatgactgagaagaagcgtaaggatatggaagatcggaagcgcaagatgagtggaccccagtccggaggcatcagccgtccacgtttctcaggcagttcatctcagcaaggcaggcctggtcacccacagggatatcagaatcagaatcagcgtccgcatcagcagcagtttcagaggcagtacccgcagcagcagcagcagtatcgtcagcacagccagcagggaggtaatcagtatcagaagcagaacaaccaggcacctcgccttcctgccccagcagcaaatcagagcaaccaagcagccccagcacaaggaggaggcagagggtgttttcactgtggagaacaaggccactgggcgatgcagtgcccaaagaagatggcgcagcagcagaccaaccccaatgctccaacaaggcaaggtgtactgcagccggcagcaggcaatcgtagccaagcgtacaaccgtggaaaggtgaaccacttggaggccgaagcaatccaggatgcaccagatgtggcagtaggtatgttctcagtcgaatctcatcccgcgaaagtgctatttgatactggtgcaactcattcatttgtcactgcaacatgggtagaattgcataacatctcagtagaggcaatgatgccgcccatgaggattaattcggttggtggcaaggtgcaaacagataaaatatgttcaaacataatggtggaaataagggagataggattccccagtgacttaatagtaatagacacccccgggatagatgttattctagggatgaattggttaatgaagtatgaagcaaatgttagttgtgacaagaggactgtaacattgaagtccccgtcaggagaagaggtagtggccgagctaaggatgcctaaatcagaagagggagtctgccatcagatttcagttgatagtaaggagcccaacccgctcgaggccatcaaggttgtgtccgactttccggatgtgtttcccgaggagctaacgggcatgccacccgagagaaaggttgaatttgccatagagcttatccctggtaccgcccccatttccaaaagagcctatcgagtgtctggaccagaattggtggaactcaagaagcagatagatgagatgttggagaagggttacatcaggccaagtacctcgccttgggccgctccagtgttgtttgtagagaagaaagatggtaccaaaaggatgtgcatagactacagggccttgaatgaagtcactgtcaaaaacaagtaccccctgccaaggatagaagatttgttcgaccagctcagaggtgccagcgtattctcgaaaatagatctgagatcaggttaccatcaactcagaatccgaccctcggacataccgaagacagcattcatcaccaagtacgggttatatgagttcacagttatgtcctttggtttgacaaatgcgccagccttctttatgtacctgatgaacagtgtgttcatggactatctagacaaatttgtggtagtgttcatcgatgacattctcatatactctcaaagtgaggaagatcatgtggagcatttgaagatggtattgcaaagacttcgagagcatcagttgtatgccaagctgggcaaatatgggttagcagtggatccaaagaaagtggcagatatcctgaactggaaagcaccgaaggatgttcgtgggatcaagagcttcattggaatggccggatactataggcgtttcattgaaggcttctcaaagattgctagaccaatgacagcgttgctagcgaagaaagttgagtttaaatggactcaaaagtgtcaggaagcatttgaagaactgaagaatagattgactacagctcctgtgttagtcctgcctgatgttcacaagtcattctcagtgtattgcgacgcttcgtacactggattgggatgtgtgctaatgcaagaaggaagagtggtagcatactcatctcgacagctgaagatccatgagaaaaattatcccacacatgacctggagttggcagcagtggttcatgctttaaagacctggagacattacctgtatgggcagaagtgcgacatctacacagatcataaaagtctgaagtacatattcacccagtcagagttaaacatgaggcagcgaagatggttggaattgatcaaggactatgagttggagatacattaccatccaggcaaagccaatgttgttgcagatgctctgagcaggaagagtcaagtcaatatgttggcctcgtacccgatgtcgtatgagttagccaaagagttcgacagactgagcctcggtttcctgaacagtacgcaaggagtaacagtggaattagagcccaccctagagcgggagatcaaagaagggcagaaggacgatgaaagcatcaacaagatccggcagctgatcttagaaggaagaggcaaagactttcgagatgatgaagagggggtaatatggttcaaggaccgattgtgtgttcccgacctcaaacctattcgggaactgatcctcaaggaagctcatgagacagcctactccatacaccctggaagtgagaagatgtatcagaatttaaaaaggaggttttggtggtatggaatgaaaagagagatcacagaatatgtcgccatctgtgatagctgtcagagaaccaaagcggagcatcagaggcctgccggattgttgcagccattgcggattcctcagtggaagtgggatgagatcgggatggattttatagttggcctacctcgtacccgggccggttatgattccatctgggtagttgtggaccgcttaacaaaggtggcccatttcatacctgtgaagacaacatacaccggagcaacgttagctgagttatatatgtcacggatagtctgccttcatggtgtgccgaagaagatagtgtcagatcgaggaacgcagttcacctctcatttttggcagcagctacaagaagctttgggcacacatttgaacttcagctcagcttatcacccgcagacagacggtcagactgaaagaactaaccagatcctagaagatatgttgagagcctgtgcgttgcaagacaagtcaggatgggacaaaaggttaccttatgcagaattctcctacaacaatagttaccaggccagcttgaagatgtcgccgtttcaggcactctatgggcggagatgtaggactccgctgcattgggaccagcctggggagagacaggtgtttagccccgacatcttgcttgaagccgaagagaatatcaaaatggttcgggagaacctgaagatagcccagtcaagacagcgaagctatgcggaccaaaggagaagagaactgagtttcgaagtgggggattacgtctatctgaaggtgtcacctatcaggggagtcagaaggttcggagttaaaggcaagttagcacctcggtacgttggaccatatcagattcaagcaaagcgtggagaagtggcctaccagctcaacctaccagagagcttgtcagcagtgcacaatgtgttccacgtatcgcaattgaagaagtgtctgcgagtaccagaagaacagttgccagtggagggtttggaggtccatgaggatctgacatacatagagaagccaacgcagattctggagtttgcagacagagtcacccggaggaacaccgtcagaatgtgcaaagtcagatggggtcaccactctgaggaagaagcaacctgggaacgagaagatgatctgaaagccaaataccctgaactctttgctgaccaaccttga

SEQ ID NO: 45819 - DNA, 332 bp, Zea mays
  Clone ID: MRT4577_141796C.1
gcacgcgtccgatcatcatctccgatgcatcaacaatcgccgatagcgatcgagagatacgtcaagatgagtaaagtggcatcatcgtcagccgttctcttcgtgctagccctgacgctaatgtgtgccgcgctgatagcagaggcagagcagaagacattcgcagccgccgccgccgaggagaagtaggtgcatgacaacttctgctcgacgctgtacgatggcacgaatgggatggacctgatggtgtgcaaggagtcctgcgacctctcacagcgctccaagttgatgttgtaccgtaggatccaatgcaatggcaagtgcaccgagca

SEQ ID NO: 45820 - DNA, 6056 bp, Zea mays
  Clone ID: MRT4577_141797C.1
caagaccacattaggcatcgctggagttcgatgtcgcccgccaggcggagtcgattcaggatttggagacgttggtggttgggattccccttcctttgttatgagtggagatagatacccagatggtcgctaccttcgagcgctaggaggccgtggaggccacggcggcaacgcgcgtcagcgcgctcgaagcctcgaatcgaccattgcggccttcgagtcatggtgttcgcacgtcgaggcgacgaaggaagacgtcaaggcttccgtcgaccgcctacgtggggttctcgcccgattctccacgctcagtattcatgtggctcctcctcccttcgaccgcgatgcgggcatcctcggtccttttccaccggccacggagtgccctcctgctaccgtctttccggttgatggacctgatgggaaccgcatggacttcaaatgtcgagagtatggctttgggcatgtttttgctcaaacccatctcacgcctaacgatggctcgtcttagacacactgcacgtaagtcggtgattcctttcctgccgtctcgacttgcggagcgtcctctgcaccgcaccgtgtccggacagtcgagtcacctggagaggctgcaccaccgcctgcgtgaggagcaggaacgccggcgccagcacggagagcagcagggctcttcctcctcaccccagcaggaggtggagaccgtgaggccccgttcctctgttgcccagctggaggcgccccttgttccaccgcgggacgtcccggctgttggaggagctactgaaggagccactggaggagatcccgacgacgacgactcagaccacagcacggagtcctctgagccgcaggaggcggaaggatgggtcgcccgacccatcacccgtgacgccgctcgcggttgtcacttccacgacgcactcgacaccttgctgcgccaggctttcgaccggcacacctggtcgatcgagtatcgttgtgtagtctaccagcacagtcgcgggaggtacccggaccgctgggaggctacctgcctagttcgccgtccggaggatgacctccggggtgcggaggccgtttcggagcactattccatctccgagagggacactgcagaggcggctatgcaggatgcagcacgacgtgcactctctcagtactgttctttgttcgatggcgtggccgacggtcttaaccttcggtactacccccgccgccctactggcagcacagagagtgtggttgtttcacctgttggtgaggctaaccctaggttgagcagcacagtcaacctagtcgcagtgcttaacactgagctggatcactctctggacgagctaagcagggctcgaacggagattgcggagttgcgtgctgagttggcagagcgccatcaccaggagggtggttctcccgctcctgttgggactcagcacccataccgctccccgccacgtggtcaccacacttatggttcccctatgtctgacaacaggcgccgatgcaacaggcgtgctcagctagagcagcatgaccagcaggaggaaaatcagaggcagcctcccccgccacccccgatgtcagtggagcagatgttcttgatgcagacccaggcagtgcaggccattgggcagactctggcagccatgcagcaggctcaacagcaaccccaaccccaattgcaagtgcagatgccccagatgccacgagataggcgtggtgagttcatgagagggcatcctcctaccttcgcccattctgctgaccccatggatgcagaagactggttgcgcgcagtggagagggaactgcgcaccgcccaatgtgatgacagggagaaggttctgtatggtccccgccagctgaggggagcagcccagtcctggtgggagtcctacctcgccacccatgctaaccccgaagccatcacctgggaggaattcagcgagagtttccgtcggtaccatgtgccagagggactgatgatcgtaaagaaggaggagtttctggccctgaagcagggacccctgtctgttagtgagtacagagacaagtttctgcagctgtctcgttacgcacccgaggatgtcaacactgatgccaagaggcagtacaggttcatgagaggtttggtggatcccctgcattaccagctgatgaaccacaccttccccaccttccagcacttgatcgatagggcagttatgactgagaagaagcgtaaggatatggaagatcggaagcgcaagatgagtggaccccagtccggaggcatcagccgtccgcgtttctcaggcagttcatctcagcaaggcagacctggtcacccgcagggatatcagaatcagaatcagcgtccgcatcagcagcagtttcagaggcagtatccacagcagcagcagtatcgtcagcacagccagcagggaggtaatcagtatcagaagcagaacaaccaggcacctcgccttcctgccccagcagcgaatcagagcaaccaagcagccccagcacaaggaggaggcagaggatgtttccactgtggagaacaaggccactgggcgatgcagtgcccaaagaagatggctcagcagcagaccaaccccaatgctccaacaaggcaaggtgtactgcagccggcagcaggcaatcgtaaccaagcatacaaccgcggaaaggtgaaccacttggaggccgaagcaatccaggatgcatcagatgtggcagtaggtatgttttcaatcgaatctcatcccgcgaaagtgttatttgatactggtgcaactcattcttttgtcactgcaacatgggtagaattgcatagcatctcagtagaggcaatgatgccacccatgaggattaattcggttggtggcaaggtgcaaacagataaaatatgctcaaatataatggtggaaataagggggataggattccccagtgacttaatagtaataggcacccctgggatagacattattttagggatgaattggttaatgaagtatgaggcaaatgttagttgtgacaagaggaccataacattgaaatccccgtcaggagaagaggtagtggccgagctaaggatgcctaagtcagaagagggagcctgtcatcagatttcagttgatagtaaggagcctaacccgctcgaggctatcaaggtcgtgtcagactttccggatgtgtttcccgaggagctaacgggcatgccacccgagagaaaggttgaatttgccatagagcttatccctggtaccgcccccatttcaaaaagagcctatcgagtgtctggaccagaattggtggaactcaagaagcagatagatgagatgttagagaagggttacatcaggccaagcacctcgccttgggccgctccagtgttgtttgtagagaagaaagatggtaccaaaaggatgtgcatagactacagagccttgaatgaagtcactgtcaagaacaagtaccccctgccaaggatagaagatttgttcgaccagctcagaggtgccagcgaattctcgaagatagatctgagatcaggttaccatcaactcagaatccgaccctcggatataccgaagacggcattcatcaccaagtacgggttatatgagttcacggttatgtcctttggtttgacaaatgcgccagccttctttatgtacctgatgaacagcgtgttcatggattatctggacaagtttgtggtagtgttcatcgatgacattctcatatactctcaaagtgaggaagatcatgtggagcatttgaagatggtattgcaaaggcttcgagagcatcagttgtacgccaagctgggcaaatgcgagttctggattcatgaagtcttgtttctgggtcacatcataaaccaagagggattggcagtggatccaaagaaagtagcagatatcctgaactggaaagcaccgaaggatgttcgtgggatcaagagcttcattggaatggctggatattataggcgtttcattgaaggtttctcgaagattgctagaccaatgacagcgttgctagcgaagaaagttgagtttaagtggacccaaaagtgtcaggaagcatttgaagaactgaagaatagattgactacagctcctgtgctagtcctgcctgatgttcacaagtcattctcagtgtattgcgacgcttcgtacaccggattgggatgtgtactgatgcaagaagggagagttgtagcatactcatctcgacagctgaagatccatgagaagaattaccccacacatgacctggaactggcagcagtggttcatgctttgaagacctggagacattacctgtatgggcagaagtgcgacatctacacagatcataagagtctgaagtacatattcacccagtcagaactaaacatgaggcagcgaagatggttggaactgatcaaagactatgagttggagatacattaccatccgggcaaagccaatgttgttgcagatgctttgagcaggaaaagtcaagtcaatatgttggcctcgcacccaatgccgtatgagttagccaaggagtttgacagactgagcctcggtttcctgaacagtacgcaaggagtgacggtggaattagagcccaccctagagcgggagatcaaagaaggacagaaggatgatgaaaacatcaacaagatccggcagctgatcctagaaggaagaggcaaagactttcgagaggatgaagaaagagtaatctggttcaaggaccgattgtgtgttcccgacctcaaacctattcgggaattaatccttaaggaagctcatgagacagcctactccatacacccagggagtgagaagatgtaccaggatttaaaaaggaggttttggtggtatggtatgaaaagggagatcgcagaatatgtcgccatctgtgatagctgtcagagaaccaaagcagagcatcagaggcctgccggactgttgcagcctttgcggattcctcagtggaagtgggatgaaatcgggatggatttcatagttggcctacctcgtacccgggccggctacgattccatctgggtggttgtggaccgcttaacaaaggtggcccacttcatacctgtgaagacaacatacaccggagcaacgttagctgagttatacatgtcacgaatagtctgccttcatggtgtgccgaagaagatagtgtcagatcgaggaacgcagttcacatctcatttttggcagcagctacaagaagctttgggcacccatttgaacttcagctcagcttatcacccgcagacagacggccagactgaaagaactaaccagatcctagaagatatgttgagagcctgtgcgttgcaagacaagtcaggatgggataaaaggttaccttatgcagaattctcctacaacaatagttaccaggccagcttgaagatgtcaccgtttcaggcactctatgggcggagttgtaggacttcgctgcactgggaccagcctggagagagacaggtgtttggccccgacatcttgcttgaagccgaagagaatatcagaatggttcgggagaacctgaagacagcccagtcaaggcagcgaagctatgcggacagaaggagaagggaactgagttttgaagtgggagactacgtctatctgaaggtgtcacctatcaggggagtcagaaggttcggagtcaaaggcaagctagcaccccggtacgtcggaccatatcagattcaagccaagcgtggagaagtggcctaccagctcgacctaccagagagtttgtcagcagtgcacaatgtgtttcatgtgtcacaattgaaaaagtgtctgcgagtaccagaagaacagttaccagtggaaggtttggaagtccaggaagatctgacatacatagagaagccaacgcagattctggagtgtgcagacagagtcacccggaggaataccatcagaatgtgcaaagtcagatggggtcaccactctgaggaagaagcaacctgggaacgagaagatgatctaaaagccaaataccctgaactctttgctgaccaaccttga

SEQ ID NO: 45821 - DNA, 4314 bp, Zea mays
  Clone ID: MRT4577_141798C.1
atgccccagatgccacgggataagcctggtgagttcatgagagggcaccctcctaccttcgcccattctgctgaccccatggatgcagaagactggctacgcgcagtggaaagggaactgcgcaccgcccaatgtgacgacagggagaaggttctgtatggtccccgtcagttaaggggagcagcccagtcctggtgggagtcctacctcgccacacatgctgaccccgaagccatcacctgggaagaattcagcgagagtttccgcaggtaccatgtgccggagggactgatgatcgtgaagaaggaggagtttctggctctgaagcagggacccctgtctgttagtgaatacagagacaagtttctgcagctatctcgttatgcacctgaggatgtcaacactgatgctaaaaggcagtacaggttcatgaggggtttggtggatcccctgcattaccagctgatgaaccacaccttccccaccttccagcacctgatcgatagggcagttatgactgagaagaagcgtaaggatatggaagatcggaagcgcaagatgagtggaccccagaccggaggcatcagccgtccacgtttcataggcagttcatctcagcaaggcaggcctggtcatccacagggatatcagaatcagaatcagcgtccgcatcagcagcagtttcagaggcagtacccacagcagcagcagcagtatcgtcagcacagccagcagggaagcaatcagtatcagaagcagaacaaccaggcacctcgccttcctgccccagcagcaaatcagagcaaccaagcagccccagcacaaggaggaggcagaggatgtttccactgtggagaacaaggccactgggcgatgcagtgcccaaagaagatggcgcagcagcagaccaaccccaatgctccaacaaggcaaggtgtactgcagccggcagcaatcaatcgtagccaagcgtacaaccgtggaaaggtgaaccacttggaggccgaagcaatccaggatgcaccagatgtggcagtaggtatgttctcaatcgaatctcatcccgcaaaagtgctatttgatactggtgcaactcattcatttgtcactgcaacatgggtagaattgcataacatctcagtagaggcaatgatgccgcccatgaggattaattcggttggtggcaaggtgcaaacagataaaatatgttcaaatataatgggggaaataagggggataggattccccagtgacttaatagtaatagacacccctgggatagatgttattctagggatgaattggttaatgaagtatgaagcaaatgttagttgtgacaagaggaccgtaacattgaagtccccgtcaggagaagaggtagtggccgagctaaggatgcctaaatcagcggagggagtctgtcaccagatttcagttgatagtaaggagcccaacccgctcgaggctatcaaggttgtgtcggactttccggatgtgtttcccgaggagctaacgggcatgccacccgagagaaaagtcgaatttgccatagagcttatccctggtaccgcccccatttccaaaagagcctatcgagtgtctggaccagaattggtggaactcaagaagcagatagatgagatgttagagaagggttacatcaggccaagcacctcgccttgggccgctccagtgttgtttgtagagaagaaagatggtaccaaaaggatgtgcatagactacagagccttgaatgaagtcactgtcaagagcaagtaccccctgccaaggatagaagatttgttcgaccagctcagaggtgccagcgtattctcgaagatagatctgaggtcaggctaccatcaactcagaatccgaccctcggatataccgaagacagcattcatcaccaagtacgggttatatgagttcacagttatgtcctttggtttgacaaatgcgccagccttctttatgtacctgatgaacagtgtgttcatggattatctggacaagtttgtggtagtgttcatcgatgacattctcatatactctcaaagtgaggaagatcatgtagagcatttgaagatggtattgcaaagacttcgagagcatcagttgtatgccaagctgggcaaatgcgagttctggattcatgaagtcttatttctgggtcacatcataaatcaagatgggttggcagtggatccaaagaagagcttcattggaatggccggatactataggcgtttcattgaaggcttctcaaagattgctagaccaatgacagcgttgctagcgaagaaagttgagtttaagtggacccaaaagtgtcaggaagcatttgaagaactgaagaatagattgactacagctcatgtgttagtcctgcctgatgttcacaagtcattctcagtgtattgcgacgcttcgtacaccggattgggatgtgtgctaatgcaagaaggaagagtggtagcatactcatctcgacagctgaaggtccatgagaaaaattatcccacacatgacctggagttggcagcagtggttcatgctttaaagacctggaggcattacctgtatgggcagaagtgcgacatctacacagatcataaaagtctgaagtacatattcacccagtcagagttaaacatgaggcagcgaaggtggttggagctgatcaaagactacgagctggagatacattaccatccaggcaaagccaatgttgttgcagatgctctgagcaggaagagtcaagtcaatatgttggcctcgtacccgatgccgtatgagttagccaaggagttcgacagactgagcctcggtttcctgaacagtacgcaaggagtaacagtggaattagagcccaccctagagcgggagatcaaagaagggcagaaggacgatgaaagcatcaacaagatccggcaactgatcttagaaggaagaggcaaagactttcgagaggatgaagagggagtaatatggttcaaggaccgattgtgtgtccccgacctcaaacctattcgggagctaatcctcaaggaagctcatgagacagcctactccatacaccctggaagtgaaaagatgtatcaggatttaaaaaggagattttggtggtatggcatgaaaagagaaatcgtagaatatgtcgccatctgtgatagctgtcagagaaccaaagcagagcatcagaggcctgccggattgttgcagccattgcggattcctcagtggaagtgggatgagatcgggatggattttatagttggcctacctcgtacccgggccggctatgattccatctgggtggttgtggaccgcttaacaaaggtggcccatttcatacccgtgaagacaacatacaccggagcaacgttagctgagttatacatgtcacggatagtctgccttcatggtgtgccgaagaagatagtgtcagatcgaggaacgcagttcacctctcatttttggcagcagctacaagaagctttgggcacccatttgaacttcagctcggcttatcacccgcagacagacggacagactgaaagaactaatcagatcctagaagatatgttgagagcctgtgcgttgcaagacaagttaggatgggacaaaaggttaccttatgcagaattctcctacaacaatagttatcaggccagcttgaagatgtcgtcgtttcaggcactctatggacggagttgtaggactccgctgcattgggaccagcctggagagagacaggtgtttggccccgacatcttgcttgaagccgaagagaatatcaaaatggttcgggagaatctgaagatagcccagtcaagacagcgaagctatgcggaccgaaggagaagagaactgagttttgaagtgggagactacgtctatctgaaggtgtcacctatcaggggagtcagaaggttcggagttaaaggcaagttagcaccccggtatgttggaccatatcagattcaagcaaagcgtggagaagtggcctaccagctcaacctaccagaaagtttgtcggcagtgcacaatgtgttccatgtgtcccaactgaagaaatgtctgcgagtaccagaagaacagttgccagtggagggtttggaagtccaggaggatctgacatacatagagaagccaacgcagattctggagtttgcagacagagtcacccggaggaacaccatcagaatgtgcaaagtcagatggggtcaccactcggaggaagaagcaacctgggaacgagaagatgatctgaaggccaaataccctgaactctttgctgaccaaccttga

SEQ ID NO: 45822 - DNA, 5505 bp, Zea mays
  Clone ID: MRT4577_141799C.1
atggctcgtcttagacacactgcacgtaagtcggtgattcctttcctgccgtctcgacttgcggagcgtcctctgcaccgcaccgtgtccggtcagtcgagtcacctggagaggctgcaccaccgcctgcgtgaggagcaggaacaccggcgccagcacagagagcagcagggctcttcctccccaccccagcgagaggtggagtctgtgaggccccgttcctctgtggcccagctggaggcgccccctgctccaccgcgggacgccccggctgttggaggagctactggaggagaccccgacgacgacgactcagaccacagcacggagtcctctgagccacaggaggcggaaggatgggtcgcccgacccatcacccgtgacgccgctcgcggttgtcacttccacgacgcactcgacaccttgctgcgccaggctttcgaccggcacacctggtcgatcgagtatcgttgtgtagtctaccagcacagtcgcgggaggtacccggaccgctgggaggctaccttcctagttcgccgtccggaggatgacctccggggtgcggaggtcgtttcggagcactattccatctccgagagggacactgcagaggcggctatgcaggatgcagcacggcgtgcactctcccagtactgttctttgttcggtggcgtggccgacggtcttaaccttcggtactacccccgccgccctactggcagcaccgagagtgtggttgtctcacctgttggtgagggtaaccctaggttgagcagcacagtcaacctagtcgcagtgcttaacactgagctggaccactctctggacgagctaagcagggctcgaacggagattgcggagttgcgtgctgagttggcagagcgccatcaccaggagggtggttctcccgctcctgttgggactcagcacccataccgctcaccgccacgtggtcatcacacttatggttcccctgtctgcgccgatgcaacaggcgtgctcagcaagagcagcatgaccagcaggaggaacaacagaggcagcctcccccaccaccccccgatgtcagtggagcagatgttcttgatgcagacccaggcagtgcaggccattgggcagactctggcagccatgcagcaggctcaacagcaaccccaaccccaattgcaagtgcagatgccccagatgccacgagataagcgtggtgagttcatgagagggcaccctcctaccttcgcccattctgccgaccccatggatgcagaagactggctgcgcgcagtggaaagggagctgcgcaccgcccaatgtgacgacagggagaaggttctgtatggcccccgtcagctgaggggagcagcccagtcctggtgggagtcctacctcgccacccatgctgaccctgaagccatcacgtgggaggaattcagcgagagtttccgcagataccatgtgccagagggactgatgatcgtgaagaaggaggagtttctggctctgaagcagggacccctatctgttagtgagtacagagacaagtttctgcagctgtctcgttacgcacctgaggatgtcaacactgatgccaagaggcagtataggttcatgagaggtttggtggatcccctgcattaccagctgatgaatcacaccttccccaccttccagcacctgattgatagggcagttatgactgagaagaagcgtaaggatatggaagatcggaagcgcaagatgagtggaccccagtccggaggcaccagccgtccacgtttctcaggcagttcgcctcagcaaggcaggcctggtcacccacagggatatcagaatcagaatcagcgtccgcatcagcagcagtttcagaggcagtacccacagcagcagcagcagtatcgtcagcacagccagcagggaggtaatcagtatcagaagcaaaacaaccaggcacatcgccttcctgccccagcagcaaatcagagcaaccaagcaaccccagcacaaggaggaggcagaggatgtttccactgtggagaacaaggccactgggcgatgcagtgcccaaagaagatggcgcagcagcagaccaaccccaatgctccaacaaggcaaggtgtactgcagccggcagcaggcaatcgtaaccaagcgtacaaccgtggaaaggtgaaccacttggaggccgaagcaatccaggatgcaccagatgtggcagtaggtatgttctcagtcgaatctcatcccgcaaaagtgctatttgatactggtgcaactcattcatttgtcactgcaacctgggtagaattgcataatatttcagtagaggcaatgatgccgcccatgaggattaattcggttggtggcaaggtgcaaacagataaaatatgttcaaatataatggtggaaataagggggataggattccccagtgacttaatagtaatagacacccctgggatagatgttattctagggatgaactggttaatgaagtatgaagcaaatgttagttgtgacaagaggaccgtaacattgaagtccccgtcaggagaaggggtagtggccgagctaaggatgcctaagtcagaagagggagtctgtcaccagatttcagttgatagtaaagagcccaacccgctcaaggctatcaaggttgtgtcggactttccggatgtgtttcccgaggagctaacgggcatgccacccgagagaaaggttgaatttgccatagagcttatccctggtaccgcccccatttccaaaagagcctatcgagtgtctggacccgaattggtggaactcaagaagcagatagatgagatgttagagaagggttacatcaggccaagtacctcgccttgggccgctccagtgttgtttgtagagaagaaagatggtaccaaaaggatgtgcatagactacagagccttgaatgaagtcactgtcaagaacaagtaccccctgtcaaggatagaagatttgttcgaccagctcagaggtgccagcgtattctcgaagatagatctgagatcaggttaccatcagctcagaatccgaccctcagatataccgaagacggcattcatcaccaagtatgggttatatgagttcacagttttgtcctttggtttgacaaatgcaccagccttatttatgtacctgatgaacagtgtgttcatggactatctagacaagtttgtggtagtgttcatcgatgacattctcatatactctcaaagtgaggaagatcatgtagagcatttgaagatggtattgcaaaggcttcgagagcatcaattgtatgccaagctgggcaaatgcgagttctggattcatgaagtcttatttctgggtcacatcataaatcaagatgggttagcagtggatccaaagaaagtagcagatatcctgaactggaaagcaccgaaggatgttcgtgggatcaagagcttcattggaatggctggatactataggcgtttcattgaaggcttctcaaagattgctagaccaatgacagcgttgctagcgaagaaagttgagtttaagtggactcaaaagtgtcaggaagcatttgaagaactgaagaatagattgactacaactcctgtgttagtcctgcctgacgttcacaagtcattctcagtgtattgcgacgcttcgtacaccggattgggatgtgtgctaatgcaagaaggaagagttgtagcatactcatctcgacagctaaagatccatgagaaaaattatcccacccatgacctggagttggcagcagtggttcatgccttaaagacctggagacattacctgtatgggcagaagtgtgatatctacatagatcataaaagtctgaagtacatattcacccaatcagagttaaacatgaggcagcgaagatggttggaattgatcaaagactatgagttggagatacattaccatccaggcaaagccaatgtcgttgcagatgctctgagcaggaagagtcaattagccaaagagttcgacagactgagcctcggtttcctgaacagtacgcaaggagtaacagtggaattagagcccaccctagagcgggagatcaaagaagggcagaaggatgatgaaaacatcaacaagatccggcagctgatcttagaaggaagaggcaaagactttcgagaggacgaagagggagtaatatggttcaaggaccgattgtgtgttcccgacattaaacctattcgggagctgatcctcaaggaagctcatgagacagcctactccatacaccctggaagtgagaagatgtatcaggatttaaaaaggaggttttggtggtatggcatgaaaagagaaatcgcagaatatgtcgccatctgtgatagctgtcagagaaccaaagcagagcatcaaaggcccgccggattgttgcagcctttgcggattcctcagtggaagtgggatgagatcgggatggattttatagttggcctacctcgtacccgggccggttatgattccatctgggtggttgtggaccgtttaacaaaggtggcccattttatacctgtgaagacaacatacaccggagcaacgttagctgagttatacatgtcacggatagtctgctttcatggtgtgccgaagaagatagtgtcagatcgaggaacgcagttcacctctcatttttggcagcagctacaagaagctttgggcacgcatctgaacttcagctcagcttatcacccgcagacagacggtcagactgaaagaactaatcagatcctagaagacatgttgagagcctgtgcgttgcaagacaagtcaggatgggacaaaaggttaccgtatgcagaattctcctacaacaacagttaccaggccagcttgaagatgtcaccgtttcaggcactctatggacggagttgtaggactccgctgcattgggaccagcctggagagagacaggtgtttggccccgacattttgcttgaagccgaagagaatatcaaaatggttcgggagaacctgaagacagcccagtcaagacagcgaagctatgcggaccgaaggagaagagaactgagttttgaagtgggagactacgtctatctgaaggtatcacctatcaggggagtcagaaggttcggagttaaaggcaagttagcaccccggtacgttggaccatatcagatccaagccaagcgtggagaagtggcctaccagctcaacctaccagagagcttgtcagcagtgcacaacgtgttccacgtgtcgcaattgaagaagtgtctgcgagtaccagaagaacaattgccagtggagggtttggaggtccaggaggatctgacctacaaagagaagccaacgcagattctggagtttgcagacagagtcacccggaggaacaccatcaggatgtgcaaagtcagatggggccaccactctgaggaagaagcaacctgggaacgagaggatgatctgaaggccaaataccctggactctttgctgaccaaccttga

SEQ ID NO: 45823 - DNA, 960 bp, Zea mays
  Clone ID: MRT4577_14179C.1
gaagctctgagaagttgaaggttatcatgaagaacattctgttaattgggaatacattgaatcaaggcacaccaagaggccaggctgttggttttcgcttggacagcctcctaaaacttatagagacccgtgccactagtggtagaatgacattaatgcattttctatgtaagtcccttgcagagaagtcaccagaagtaatggattttcatgaggatcttgtccacttggaagcttcttcaaagttgcaactgaaagcattggcggaggagcagctggcagtggtaaaggggctggagaaagttgaacaggagctaactgcttcagaaagtgatggtccagtttctgatgttttccgtaagactttaaaggagttcattgattgttccagtgctgatgtacgctccctgtcagcattctattctgaagtaggtaaaagcgcagatggacttgctgtttattttggagaagaccctgcaaaatttccttttgagcaagttgctacaacccttctgacctttgtggggttgttccggaaagctcatgacgagaacctcaagcaaattgaggctgaaaagaagaaagcccagaaagaagctgaaaaggaggcaaaccaggacaaaactcctgtaaaatcaaaaaatgggaatgcagataaatcgccaagatcaccatcaaccttctaatgatgtacggcagaacttcacatggtcatcatttcttcctcaacgaatgcccgcctttgctggcctgggcacaatttcgcaagcatgaacagtatacaaatccataaattccttgtggacaaatgcttacaagacaagatggttttggttcaacatctatgcatgtatctcatgacactgtacaaagctcacaccccacacaaaaaactaggttcttctgtacaaaatccatactagatccccccccttctgtctatactagcaacaagagtag

SEQ ID NO: 45824 - DNA, 128 bp, Zea mays
  unsure (1)..(128): unsure at all n locations
  Clone ID: MRT4577_1417C.1
tgtagcctacacaattctacaccaatggnaaacaaattctatnnggccccatacctgacgagcatnncggcaacccttaccgtcgataggaatacaatctacnnttgtctgatnnaatcagttaaatt

SEQ ID NO: 45825 - DNA, 4563 bp, Zea mays
  Clone ID: MRT4577_141800C.1
atgtctgacaacaggcgtgctcagcaagagcagcatgaccagcaggaggaacatcagaggcagcctcccccaccacccccgatgtcagtggagcagatgttcttgatgcagactcaggcagtgcaggccattgggcagactctggcagccatgcagcaggctcaacagcaaccccaaccccaattgcaagtgcagatgccccagatgccacgggataagcgtggtgagttcatgagagggcaccctcctaccttcgcccattctgccgaccccatggatgcagaagactggctacgcgcagtggagagggaactgtgcaccgcccaatgtgacgacagggagaaggttctgtatggtccccgccagctaaggggagcagcccagtcctggtgggagtcctacctcgccacccatgctgaccccgaagccatcacctgggaagaattcagcgagaatttccgcaggtaccatgttccagagggactgatgattgtgaagaaggaggagtttctggatctgaagcagggacccctatctgttagtgaatacagagacaagtttctgcagctatctcgttatgcacctgaagacgtcaacactgatgctaaaaggcagtacaggttcatgaggggtttggtggatcccctgcattaccagctgatgaatcacaccttccccaccttccagcacctgatcgatagggcagttatgactgagaagaagcgtaaggatatggaagatcggaaacgcaagatgagtggaccccagtccggaagcatcagccgcccccgtttctcaggcagttcatctcagcaaggcaggcctggacacccacagggatatcagaatcagaatcggcgtccgcatcagcagcagtttcagaggcagtacccacagcagcagcagcagcagtatcgtcagaacagccagcaaggaggtaaccagtatcagaagcagaacaaccaggcacctcgccttcctgcccccgcaacaaatcagagcaaccaagcagccccagcacaaggaggaggcagaggatgtttccactgtggagatcaaggccactgggcgatgcagtgcccaaagaagatggcgcagcaacagaccaaccccaatgctccaacaaggcaaggtgtactgcagccggcagcaggcaatcgtggccaagcgtacaaccgtgggaaggtgaaccacttggaggccgaagcaattcaggatgcaccggatgtggcagtaggtatgttctcagtcgaatctcatcccgcaaaagagctatttgatactggtgcaactcattcatttgtcactgcaatatgggtagaaatgcataacatctcagtagaggcaatgatgccgcccatgaggattaattcggttggtggtaaagtgcaagcagatagaatatgctcaaatataagggtggaaataagggggatagggttccccagtgatctaatagtaatagacacccttgaggtagatgtcatcctagggatgaattggttaatgaaatatgaagcgaatgttagctgtgacaagaggaccgtaacattgaagtccccgtcaggagaggaggtagtggccgagctaaggatgcctaaatcagcggagggagtctgtcaccagatttcagttgatagtaaggagcccaacccgctcgaggctatcaaggttgtgtcggactttccagacgtgtttcccgaggagctaacgggcatgccacccgagagaaaagtcgaatttgccatagagcttatccctggtaccgtccccatttccaaaagagcctatcgagtgtctggaccagaattggtggaactcaagaagcagattgatgagctattagaaaagggttacatcagaccaagtacctcgccttgggccgctccagtgttgtttgtagagaagaaagatggtaccaaaaggatgtgcatagactacagagccttgaatgaagtcactgtcaagaacaagtaccccctgccaagaatagaagatctgtttgaccaactcagaggtgccagcgtattctcgaagatagatctgaggtcaggctaccatcaactcagaatccgaccctcggacataccgaagacagcattcatcaccaagtacgggttatatgaattcagagttatgtcctttggtttgacaaatgcgccagccttctttatgtatctgatgaacagcgtgttcatggactatctagacaagtttgtggtagtgttcatcgatgatattctcatatactctcaaagtgaggaagatcatgtggagcatttgaagatggtattgcaaagacttcgagagaaacagttgtatgccaagctgagtaaatgcgagttctggattcatgaagtcctgttcctgggccacatcataaatcaagatgggttagcagtggatccaaagaaagtggcagatatcctgaactggaaagcaccgaaggatgttcgtgggatcaagagcttcatcggaatggccggatactacaggcgtttcatcgaaggcttctcaaagattgctagaccaatgacagcgttgctagcgaagaaagttgagtttaagtggacccaaaagtgtcaggaagcattcgaagaactgaaaaatagattgactacagctcctgtgttagtcctgcctgatgttcacaagccattctcagtgtattgtgatgcttcttacaccggattgggatgtgtgctaatgcaagaaggaagagttgtagcatactcatctcgacagctgaagatccatgagaaaaattatcccacacatgacctggagttggcagcagtggttcatgctctaaagacatggagacattacctgtatggacagaaatgcgacatctacacagatcataaaagtctgaagtacatattcacccagtccgagttaaacatgaggcagcgaagatggttggaattgatcaaagactacgagttggaaatacattaccatccaggcaaagccaatgttgttgcagatgctctgagcaggaagagtcaagtcaatatgttggccacgtacccaatgccatatgagttagccaaggagttcgacagactgagtctcggtttcctgaacagtatacaaggagtaacagtggaattagagcccaccctagagcgggagatcaaagaagggcagaaggatgatgaaaacatcaacaatatccggcagctgatcttagaaggaagaggcaaagactttcgagaggatgaagagggagtaatatggttcaaggaccgattgtgtgttcctgacatcaaacctattcggaagctgatcctcaaggaagctcatgagacagcctactccatacaccccggaagtgaaaagatgtatcaggatttaaaaaggagattttggtggtatggcatgaaaagagaaatcgcagaatatgtcgccatttgtgatagctgtcaaagaaccaaagcagagcatcaaaggcccgccggattgttgcagccattgcggattcctcagtggaagtgggatgagatcgggatggattttatagttggcctacctcgtacccgggccggctatgattccatctgggtggttgtggaccgcttaacaaaggtggcccatttcatacccgtgaagacaacatacactggagcaatgttagctgagttatacatgtcacggatagtctgccttcatggtgtgccgaagaagatagtgtcggatcgaggaacacagtttacctctcatttttggcagcagctacaagaagctttgggcacacacttgaacttcagctcggcttatcacccacagacagacggtcagactgaaagaactaatcagatcctagaagatatgctgagagcctatgcgttacaagacaagtcaggatgggacaaaagattaccttatgcagaattctcctacaacaatagttaccaggccagcttgaagatgtcaccgtttcaggcactctatggacggagttgtaggactccgctgcattgggaccagcctggagagagacaggtgtttggccccgacattttgcttgaagccgaagagaatatcaaaatggttcgggagaatctgaagatagcacaatcaagacagcgaagctatgcggaccgaaggagaagagaactgagttttgaagtgggagattacgtctatctgaaggtgtcacctatcaggggagtcagaaggttcggagttaaaggcaagttagcaccccggtacgtcggaccatatcagatccaagcaaagcgtggagaagtggcctaccagctcgacctaccagagagcttgtcagcagtgcacaacgtgttccacgtgtcgcaattgaagaagtgtctacgagtaccagaagaacagttgccagtggagggtttggaggtccaggaggatctgacatacatagagaagccaacgcagattctggagtttgcagacagagtcacccggaggaacaccatcagaatgtgcaaagtcagatggggtcaccactcggaggaagaagcgacctgggaacgagaagatgatttgaaggccaaataccctgagctctttgctgaccaaccttga

SEQ ID NO: 45826 - DNA, 5413 bp, Zea mays
  Clone ID: MRT4577_141801C.1
ggggctcaggctgtttcctgagtacctctccatggctcgtcttagacacactgcacgtaagtcggtgattcctttcctgccgtctcgacttgcggagcgtcctctgcaccgcaccgtgtccggacagtcgagtcacctggagaggctgcaccaccgcctgcgtgaggagcaggaacgccggcgccagcacggagagcagcagggctcttcctcctcaccccagcaggaggtggagaccgtgaggccccgttcctctgttgcccagcttgaggcgccccttgtaccgccgcgggacgccccggctgttggaggagctactggaggagatcccgacgacgacgactcagaccacagcacggagtcttctgagtcgcaggaggcggaaggatgggtcgcccgacccatcacccgtgacgccgctcgcggttgtcacttccacgacgcactcgacaccttgctgcgccaggctttcgaccggcacacctggtcgatcgagtatcgttgtgtagtctaccagcacagtcgcgggaggtacccggaccgctgggaggctacctgcctagttcgccgtccggaggatgacctccggggtgcggaggccgtttcggagcactattccatctccgagagggacactgcagaggcggctatgcaggatgcagcacggcgtgcactctcccagtactgttctttgttcggtggcgtggccgacggtcttaaccttcggtactacccccgccgccctactggcagcacggagagtgtggttgtctcacctgttggtgaggctaaccctaggttgagcagcacagtcaacctagtcgcggtgcttaacactgagctggatcactctctggacaagctaagcagagctcgaacggagattgcggagttgcgtgctgagttggcagagcgccaccaccaggagggtggttctcccgcacctgttgggactcagcacccataccgctcaccgccacgtggtcaccacacttatggttcccctgtctgcgcagatgcaacaggcgtgctcagctggagcagcatgaccagcaggaggaaaatcagaggcagcctccccccaccacccccgatgtcagtggagcagatgttcttgatgcagacccaggcagtgcaggccattgggcagactctggcagccatgcagcaggctcaacagcaaccccaaccccaattgcaagtgcagatgccccagatgccacgagataagcgtggtgagtttatgagagggcaccctcctaccttcgcccattctgctgaccccatggatgcagaagactggctgcgcgcagtggaaagggagctgcgcaccgcccaatgcgacgacagggagaaggttctgtatggtccccgccagctgaggggagcagcccagtcctggtgggagtcctacctcgccacccatgctaaccccgaagctatcacttgggaggaattcagcgagagtttccatcggtaccatgtgctggagggactgatgatcgtgaagaaggaggaatttctggccctgaagcagggacccctgtctgttagtgagtacagagataagtttctgcagctgtcttgttatgcacctgaggacgtcaacactgatgctaaaaggcagtacaggttcatgagaggtttggtggatcccctgcattaccagttgatgaatcacaccttccccaccttccagcacctgatcgatagggcagttatgactgagaagaagcgtaaggacatggaagatcggaaacgcaagatgagtggaccccagtccggaggcatcagccgtccacgtttctcaggcagttcatctcagcaaggcagacctgcagcgaatcagagcaaccaagcagccccagcacaaggaggaggcagaggatgtttccactgtggagatcaaggccactgggcgatgcagtgcccaaagaagacggctcagcagcagaccaaccccaatgctccagcaaggcaaggtgtactgcagccggcagcaggcaatcgtaaccaagcgtacaaccgtggaaaggtgaaccacttggaggccgaagcgatccaggatgcaccagatgtggcagtaggtatgttctcagtcgaatctcatcccgcgaaagtgctatttgatactggtgcaactcattcatttgtcactgcaacatgggtagaattgcatagcatctcagtagaggcaatgatgccacccatgaggattaattcggttggtggcaaggtgcaaacagataaaatatgttcaaacataatggtggaaataagggggataggattccccagtgacttaatagtaatagacacccctgggatagatgttattctagggatgaactggttaatgaagtatgaagcaaatgttagttgtgacaagaggaccataacattgaagtccccgtcaggagaagaggtagtggccgagctaaggatgcctaagtcagaagagggagtctgtcaccagatttcagtcgatagtaaggagcccaacccgctcgaggctatcaaggttgtgtcggactttccggatgtgtttcccgaggagctaacgggcatgccacccgagagaaaagtcgaatttgccatagagcttatccctggtaccgcccccatttcaaaaagagcctatcgagtgtctggaccagaattggtggaactcaagaagcagattgatgaactgttagaaaagggttacatcagaccaagcacctcgccttgggccgctccagtgttgtttgtagagaagaaagatggtaccaaaaggatgtgcatagattacagagccctgaatgaagtcactattaagaacaagtaccccctgccaaggatagaagatttgttcgaccagcttagaggtgccagcgtattctcgaagatagatctaagatctggttatcatcaactcagaatccgaccctcggatataccgaagacggcattcatcaccaagtacgggttatatgagttcacagttatgtcctttggtttgacaaatgcgccagccttctttatgtacctgatgaacagtgtgttcatggattatctggacaagtttgtggtagtgttcatcgatgacattctcatatactctcaaagtgaggaagatcatgtagagcatttgaagatggcattgcaaagacttcgagagcatcagttgtatgccaagttgggcaaatgcgagttctggattcacgaagtcttgtttctgggtcacatcataaaccaagatgggttggcagtggatccaaagaaagtagcagatatcctgaactggaaagcaccgaaggatgctcgtgggatcaagagcttcattggaatggctggatactataggcgtttcattgaaggcttctcaaagattgctagaccaatgacagcgttgctagcgaagaaagttgagtttaagtggactcaaaagtgtcaggaagcatttgaagaactgaagaatagattgactacagctcctatgttagttctgcctgatgttcacaagtcattctcagtatattgcgacgcttcttacaccggattgggatgtgtgctaatgcaagaagggagagttgtagcgtactcatctcgacagctgaagatccatgagaagaattatcccacacatgacctggagttggcagcagtggttcatgctttaaagacctggagacattacctgtatgggcagaagtgcgacatctacacagatcataaaagtctgaagtacatattcacccagtcagagttaaacatgaggcagcgaagatggttggaactgatcaaagactatgagttggagatacattaccatccgggcaaagccaatgttgttgcagatgctctgagcaggaaaagtcaagtcaatatgttggcctcgcacccaatgccgtatgagttagccaaggagtttgatagactgagcctcggtttcctgaatagtacgcaaggagtgacagtggaattagagcccaccctagagcgggagatcaaagaagggcagaaggatgatgaaaacatcaacaagatccggcagctgatcctagaaggaagaggcaaggactttcgagaggatgaagaaggggtaatctggttcaaggaccgattgtgtgttcccgacctcaaacctattcgggaactggtcctcaaggaagctcatgagacagcctactccatacaccctggaagtgagaagatgtaccaggatttaaaaaggaggttttggtggtatggcatgaaaagagagatcgcagaatatgtcgccatctgtgatagctgtcagagaaccaaagcagagcatcaaaggcctgccggattgttgcagccactgcggattcctcagtggaagtgggatgaaatcgggatggatttcatagttggcctacctcgtacccgggccggctacgattccatctgggtggttgtggaccgcttaacaaaggtggcccatttcatacctgtgaagacgacatacaccggagcaacgttagctgagttatacatgtcacggatagtctgccttcatggtgtgccgaagaagatagtgtcagatcgaggaacgcagttcacatctcatttttggcagcagctacaagaagctttgggcacccatttgaacttcagctcagcttatcacccgcagacagacggccagactgaaagaactaaccagatcctagaagatatgttgagagcctgtgcgttgcaagacaagtcaggatgggacaaaaggttaccttatgcagaattctcctacaacaatagttaccaggccagcttgaagatgtcaccgtttcaagcactctacggacggagttgtaggactccgctgcattgggaccagcctggagagagacaggtgtttggccccgacatcttgcttgaagccgaagagaatatcaaaatggttcgggagaacctgaagacagcccagtcaagacagcgaagctatgctgacagaaggagaagggaactgagtttcgaagtgggagattacgtctatctgaaggtgtcacctatcaggggagtcagaaggttcggagttaaaggcaagttagcaccccggtacgtcggaccatatcagattcaagccaagcgtggagaagtggcctaccagctcgacctaccagagagcttgtcagcagtgcacaatgtgttccatgtgtcgcaattgaagaagtgtctgcgagtaccagaagaacagttaccagtggagggcttggaagtccaggaggatctgacatacatagagaagccaacgcagattctggaggttgcagacagagtcacccggaggaataccatcagaatgtgcaaagtcagatggggtcaccattcggaggaagaagcaacctgggaacgagaagatgacctgaaggccaaataccctgaactctttgctgaccaaccttga

SEQ ID NO: 45827 - DNA, 4365 bp, Zea mays
  Clone ID: MRT4577_141802C.1
atgccccagatgccacgggataagcgtggtgagttcatgagagggcaccctcctaccttcgcccattctgctgaccccatggatgcagaagactggctgcgcgcagtggaaagggaactgcgcaccgcccaatgtgacgacagggagaaggtcctgtatggtccccgccagctaaggggagcagcccagtcctggtgggagtcctacctcgccacccatgctgaccccgaagccatcacctgggaggaattcagcgagagtttccgcaggtaccatgtgccggagggactgatgatcgtgaagaaggaggagtttctggctctgaagcagggacccgtgtctgttagtgagtacagagacaagtttctgcagctgtctcgttatgcacccgaggacgtcaacactgatgccaagaggcagtacaggttcatgaggggtttggtggatcccctgcattaccagctgatgaatcacaccttccccaccttccagcacctgatcgatagggcagttatgactgagaagaagcgtaaggatatggaagatcggaagcgcaagatgagtggaccccagtccggaggcatcagccgtccacgcttctcaggcagttcgtctcagcaaggcagacctggtcacccacagggatatcagaatcagaatcagcgtccgcatcagcagcagtttcagaggcagtacccgcagcagcagcagcagtatcgccagcacagccagcagggaggtaatcagtatcagaagcagaacaaccaggcacctcgccttcctgccccagcagcaaatcagagcaaccaagcagccccagctcaaggaggaggcagaggatgtttccactgcggagatcaaggccactgggcgatgcagtgcccaaagaagttggcgcagcagcagaccaaccccaatgctccaacaaggcaaggtgtactgcagccggcagcaggcaatcgtagccaagcgtacaaccgtggaaaggtgaaccacttggaggccgaagcgatccaggatgcacccgatgtggcagtaggtatgttctcagtcgaatctcatcccgcaaaagtgctatttgatactggtgcaactcattcgtttgtcactgcaacatgggtagaattgcataacatctcagtagaggcaatgatgccgcccatgaggattaattcggttggtggcaaggtgcaaacagataaaatatgctcaaatgtaagggtggaaataagggggatagggttccccagtgacctaatagtaatagacacccccggggtagatgtcatcctagggatgaactggttgatgaagtatgaggcgaatgttagttgtgacaagaggaccgtaacattgaagtccccgtcaggagaagaggtagtggccgagctatggatgcctaaatcagtggagggagcctgtcatcagatttcagttgatagtaaggagcccaacccgctcgaggctatcaaggttgtgtccgactttccggatgtgtttcccgaggagctaacgggcatgccacccgagagaaaggttgaatttgccatagagcttgtccctggtaccgcccccatttccaaaagagcctatcgagtgtctggaccagaactggtggaactcaagaagcagatagatgagatgttagagaagggttacatcaggccaagcacctcgccttgggccgctccagtgttgtttgtagagaagaaagatggtaccaaaaggatgtgcatagactacagagccctgaatgaagtcactgtcaagaacaagtaccccctgccaaggatagaagatctgttcgaccagctcagaggtgccagcgtattctcgaagatagatctgagatcaggttaccatcaactcagaatccgaccctcggacataccgaagacggcattcatcaccaagtatgggttatatgagttcacagttatgtcctttggtttgacaaatgcgcccgccttctttatgtacctgatgaacagtgtgttcatggattatctggacaagtttgtggtagtgttcatcgacgacattctcatatactctcaaagtgaggaagatcatgtagagcatttgaagatggtattgcaaaggcttcgagagcatcagttgtatgccaagctgggcaaatgcgagttctggattcatgaagtcttgtttctgggtcacatcataaatcaagatgggttggcagtggatccaaagaaagtagcagatatcctgaactggaaagcaccgaaggatgttcgcgggatcaagagcttcatcggaatggccggatactacaggcgtttcatcgaaggcttctcaaagattgctagaccgatgacagcgttactagcgaagaaagttgagtttaagtggacccaaaagtgtcaggaagcatttgaagaactgaagaatagattgactacagctcctgtgttagtcctgcctgatgttcacaagccattctcagtgtattgcgacgcttcttacaccggattgggatgtgtgctaatgcaagaagggagagttgtagcatactcgtctcgacagctgaagatccatgagaaaaactatcccacacatgacctggagttggcagcagtggttcatgctttaaagacctggagacattacctgtatgggcagaagtgcgacatctacacagatcataaaagtctgaagtacatattcacccagtcagagttaaacatgaggcagcgaagatggttggaattgatcaaagactacgagctggagatacattaccatccaggcaaagccaatgttgttgcagatgctctgagcaggaagagtcaagtcaatatgttggcctcgtacccgatgccgtatgagttagccaaagagttcgacagactgagcctcggtttcctgaacagtacgcaaggagtaacggtggagttagagcccaccctagagcgggagatcaaagaagggcagaaggacgatgaaagcatcaacaagatccggcagctgatcttagaaggaagaggcaaagactttcgagaggatgaagagggggtaatatggttcaaggaccgattgtgtgttcccgacctcaaacctattcgggagctgatcctcaaggaagctcatgagacagcctactccatacacccggggagcgagaagatgtaccaggacttaaaaagaaggttttggtggtatggcatgaaaagggagatcgcagaatatgtcgccatctgcgatagctgtcagagaaccaaagcggagcaccagaggcctgccggattgttgcagccattgcggattcctcagtggaagtgggatgagatcgggatggattttatagttggcctacctcgcacccgggccggttatgattccatctgggtggttgtggaccgcctaacaaaggtggcccatttcatacccgtgaagacaacatacaccggagcaacgttagctgagttatacatgtcacggatagtctgccttcatggtgtgccgaagaagatagtgtcagatcgaggaacgcagttcacatctcatttttggcagcagctacaagaagctttgggcacccatttgaacttcagctcagcttatcacccgcagacagacggtcagactgaaagaactaatcagatcctagaagatatgctgagagcttgtgcgttgcaagacaagtcaggatgggacaaaaggttaccttatgcagaattctcctacaacaatagttatcaggccagcttgaagatgtcgccgtttcaggcactctatgggcggagttgtaggaccccgctgcattgggaccagcctggagagagacaggtgtttggccccgacatcttgcttgaagccgaagagaatatcaaaatggttcgggagaacctgaagatagcccagtcaagacagcgaagctatgcggaccgaaggagaagagaactgagtttcgaagtgggggattacgtctatctgaaggtgtcacctatcaggggagtcagaaggttcggagttagaggcaagctagcaccccggtacgtcggaccatatcagattcaagcaaagcgtggagaagtggcctaccagctcaacctaccagagagcttgtcagcagtgcacaatgtgttccacgtatcgcaattgaagaagtgtctgcgagtaccagaagaacagttgccagtggagggtttggaggtccaggaggatctgacatacatagaaaagccaacgcagattctggagtttgcagacagagtcacccggaggaacaccatcagaatgtgcaaagtcagatggggtcaccactccgaggaagaagcaacctgggaacgagaagatgatctgaaggccaaataccctgaactctttgctgaccaaccttga

SEQ ID NO: 45828 - DNA, 146 bp, Zea mays
  Clone ID: MRT4577_141803C.1
aattcaaaacaaaccttttactttaaaaataaagggaaacattttgaataaaggaagctacaaggtatatatgcttgtttccgtaaaaagggaattgaaaccatattaaggcctggaaacttttcccctcgggccaaattccgggg

SEQ ID NO: 45829 - DNA, 5778 bp, Zea mays
  Clone ID: MRT4577_141804C.1
ccgcggaggtccgccaccgtcgccccgggccaccgtcgcgccattgccgtcgccgaggagtccccggagcccgccttgagggggctcaggctgtttcctgagtacctctccagggtagtgaaactgatatatcagtcgtgctcacggttaagagcagccttgggatcctctttgattagagatacagatggttcgagatacaaggattatgttatggttttgatggctcgtcttagacacactgcatgtaagtcggtgattcctttcctgccgtctcgacttgcggagcgtcctctgcaccgcaccgtgtccggtcagtcgagtcatctggagaggctgcaccaccacctgcgtgaggagcaggaacgtcggcgccagcatagagagcagcagggctcttcctccccaccccagcaagaggtggagtccgtgaggccccgttcctctgttgcccagctggaggcgccccctgcaccgccgcgggacgccccggctgttggaggagctactggaggagatcttggaggagaccccgacgatgacgactcagaccacagcacggagtcttctgagccgcaggaggcggaaggatgggtcgcccgacccatcacccgtgacgccgctcgcggttgtcacttccacgacgcactcgacaccttgctgcgccaggcttttgactggcacacctggtcgatcgagtatcgttgtgtagtctaccagcacgggaggtacccggaccgctgggaggctacctgcctagttcgccgtccggaggatgacctccggggtgcggaggccgtttcggagcactattccatctccgagagggacactgcagaggcgactatgcaggatgcagcacgacgtgcactctcccaatactgctctttgttcggtggggtggccgacggtcttaaccttcggtactacccccgccgccctactggcagcaccgagagtgtggttgtctcacctgttggtgagggtaaccctaggttgagcagcacagtcaacctagtcgtggtgcttaacactgagctggatcactctctggacgagctgagcagggctcgaacggagattgcggagttgcgtgctgagctggcagagcgccatcaccaggagggtggttcccccgctcctattgggactcagcacccataccgctcaccgccacgtggtcaccacacttatggttcccctatgtctgacaacaggcgccgatgcaaccggcgtgctcagcaggagcagcacgaccagcaggaggaacatcagaggcagcctcccccaccacccccgatgtcagtggagcagatgttcttgatgcagacccaggcagtgcaggccattgggcagacactggcagccatgcagcaggcccaacagcaaccccaaccccaattgcaagtgcagatgccccagatgccacgagataagcgtggtgagttcatgagagggcaccctcctaccttcgcccattctgctgaccccatggatgcagaagactggctgcgcgcagtggaaagggaactgcgcaccgcccaatgtgacgacagggagaaggttctgtatggtccccgtcagctaaggggagcagcccagtcctggtgggagtcctacctcgccacacatgctgaccccgaagccatcacctgggaagaattcagcgagagtttccgcaggtaccatgtgccagagggactgatgatcgtgaagaaggaggagtttctggctctgaagcagggacccctgtctgttagtgaatacagagacaagtttctgcagctgtctcgttatgcacccgaggatgtcaacactgatgctaaaaggcagtacaggttcatgaggggtttggtggatcccctgcattaccagctgatgaatcacaccttccccaccttccaacacctgatcgatagggcagttatgactgagaagaagcgtaaggatatggaagatcggaagcgcaagatgagtggaccccagtccggaagcatcagccgtccccgtttctcaggcagttcatctcagcaaggccggcctggtcatccacggggatatcagaatcagaatcagcgtccgcatcagcagcagtttcagaggcagtacccacagcagcagcaacagtatcgtcagcacagccagcagggaggtaatcagtatcagaagcagaacaaccaggcacctcgccttcctgcccccgcaacaaatcagagcaaccaagcagccccagcacaaggaggaggcagaggatgtttccactgtggagatcaaggccactgggcgatgcagtgcccaaagaagttggcgcagcagcagaccaaccccaatgctccaacaaggcaaggtgtactgcagccggcagcaggcaatcatagccaagcgtacaaccgtggaaaggtgaaccacttggaggccgaagcaatccaggatgcaccagatgtggcagtaggtatgttctcagtcgaatctcatcccgcaaaagtgctatttgatactggtgcaactcattcgtttgtcactgcaacatgggtagaattgcataacatctcagtagaggcaatgatgccgcccatgaggattaattcggttggtggcaaggtgcaaacagataaaatatgttcaaatataatggtggaaataagggggataggattccctagtgacttaatagtaatagacacccccgggatagatgttattctagggatgaactggttaatgaagtatgaagcaaatgttagttgtgacaagaggaccgtaacattgaaatccccgtcaggagaagaggtagtggccgagctaaggatgcctaaatcagaagagggagtctgccatcagatttcagttgatagtaaggagcccaacccgctcgaggctatcaaggttgtgtccgactttccggatgtgtttcccgaggagctaacgggcatgccacccgagagaaaggttgaatttgccatagagcttatccctggtaccgcccccctttccaaaagagcctatcgagtgtctggaccagaattggtggaactcaagaagcagatagatgagatgttggagaagggttacatcaggccaagtacctcgccttgggccgctccagtgttgtttgtagagaagaaagatggtaccaaaaggatgtgcatagactacagggccttgaatgaagtcactgtcaagaacaagtaccccctgccaaggatagaagatttgttcgaccagctcagaggtgccagcgtattctcgaagatagatctgagatcaggttaccatcaactcagaatccgaccctcggacataccgaagacagcattcatcaccaagtacgggttatatgagttcacagttatgtcctttggtttgacaaatgcgtcagccttctttatgtatctgatgaacagcgtgttcatggactatctagacaagtttgtggtagtgttcatcgatgacattctcatatactctcaaagtgaggaagatcatgtagagcatttgaagatggtattgcaaaggcttcgagagcatcagttgtatgccaagctgggcaaatgcgagttctggattcatgaagtcttatttctgggacacatcataaaccaagatgggttggcagtggatccaaagaaagtagcagatatcctgaactggaaagcaccgaaggatgttcgtgggatcaagagcttcattggaatggtcggatactataggcgtttcattgaaggcttctcaaagattgctagaccaatgacagcgttgctagcgaagaaagttgagtttaaatggactcaaaaatgtcaggaagcatttgaagaactgaagaatagattgactacagctcctgtgttagtcctgcctgatgttcacaagtcattctcagtgtattgcgacgcttcgtacaccggattgggatgtgtgctaatgcaagaaggaagagtggtagcatactcatctcgacagctgaagatccatgagaaaaattatcccacacatgacctggagttggcagcagtggttcatgccttaaagacctggagacattacctgtatgggcagaagtgtgacatctacacagatcataaaagtctgaagtacatattcacccagtcagagttaaacatgaggcagcgaagatggttggaattgatcaaagactatgagttggagatacattaccatccaggcaaagccaatgttgttgcagatgctctgagcaggaagagtcaagtccatatgttggtctcgtacccgatgccgtatgagttagccaaagagttcgacagactgagcctcggtttcctgaacagtacgcaaggagtaacagtggaattggagcccaccctagagcgggagatcaaagaagggcagaaggatgatgaaaacatcaacaagatccggcagctgatcttagaaggaagaggcaaagactttcgagaggatgaagagggggtaatatggttcaaggaccgattgtgtgtccccgacctcaaacctattcgggaattgatcctaaaggaagctcatgagacagcctactccatacacccgggaagtgaaaagatgtaccaggatttaaaaaggaggttttggtggtatggtatgaaaagagagatcgcagaatatgtcgccatctgtgatagctgtcagagaaccaaagcagagcatcagaggcctgccgagttgttgcagccattgcggattcctcagtggaagtgggatgagatcgggatggattttatagttggcctacctcgtacccgggccagttatgattccatctgggtggttgtggaccgcttaacaaaggtggcccatttcatacctgtgaagacaacatacaccggagcaacgttagctgagttatacatgtcacggatagtctgccttcatggtgtgccgaagaagatagtgtcagatcgaggaacgcagttcacctctcatttttggcagcagctacaagaagctttgggcacacatttgaacttcagctcagcttatcacccgcagacagacggtcagactgaaagaactaaccagatcctagaagatatgctgagagcctgtgcgttgcaagacaagtcaggatgggacaaaaggttaccctatgcagaattctcctacaacaatagttaccaggccagcttgaagatgtcgccgtttcaggcactctatggacggagttgtaggactccgctgcattgggaccagcctggagagagacaggtgtttggccccgacattttgcttgaagccgaagagaatatcaaaatggttcgggagaatctgaagatagcacaatcaaggcagcgaagctacgcggacagaaggagaagagaactgagttttgaagtgggagactacgtctatctgaaggtgtcacctatcaggggagtcagaaggttcggagttaaaggcaagttagcaccccggtacgttggaccatatcagatccaagccaagcgtggagaagtggcctaccagctcaacctaccagaaagtttgtcagcagtgcacaatgtgttccacgtgtcgcaattgaagaagtgtctgcgagtaccagaagagcagttgccagtggagggtttggaagtccaggaagatctgacatacatagagaagccgacgcagattctggagtttgcagacagggtcacccggaggaacaccatcagaatgtgcaaagtcagatggggtcaccactcggaggaagaagcaacctgggaacgagaagatgatctgaaggccaaataccctgaactctttgctgaccaaccttga

SEQ ID NO: 45830 - DNA, 5493 bp, Zea mays
  Clone ID: MRT4577_141805C.1
atgcttgctctgccgaggctgagtgccgaggttctttcgttttgctctttgttagtcactctcctgcggggagggatggctcgtcttagacacactgcacgtaagtcggtgattcctttcctgccgtctcgacttgcggagcgtcctctgcaccgcaccgtgtccggtcagtcgagtcacctggagaggctgcaccaccgtctgcgtgaggagcaggaacgccggcgccagcacggagagcagcagggctcttcctcctcaccccagcaggaggtggagaccgtgaggccccgttcctctgttgcccagctggaggcgccccttgttccaccgcgggacgtcccggctgttggaggagctactggaggagccactggaggagatcccgacgacgacgactcagaccacagtacggagtcctctgagccgcaggaggcggaaggatgggtcgcccgacccatcactcgtgacgccgctcgcggttgtcacttccacgacgcactcgacaccttgctgcgccaggctttcgaccggcacacctggtcgatcgagtatcgttgcgtagtctaccagcacagtcgcgggaggtacccggaccgctgggaggctacctgcctagttcgccgtccggaggatgacctccggggtgcagaggccgtttcggagcactattccatctccgagagggacactgcagaggcggctatgcaggatgcagcacggcgtgcactctcccagtactattctctgttcggtggcgtggccgatggtcttaaccttcggtactactcccgccgccctactggcagcacagagagtgtggttgtctcacctgttggtgagggtaaccctaggttgagcagcacagtcaacctagtcgcagtgcttaacacggagctggatcactctctggacgagctaagcagggctcgaacggagattgcggagttgcgtgctgagctggcagagcgccatcaccaggagggtggttcccccgctcctgttgggactcagcacccataccgctcaccgccacgtggtcaccacacttatggttcccctattgtgagatcaatgctgatgtgtgaatgtcttccacagatgtctgacaacaggcgccgatgcaacaggcgtgctcagctagagcagcatgaccagcaggaggaaaatcagaggcagcctcccccaccacccccgatgtcagtggagcagatgttcttgatgcagacccaggcaatgcaggccattgggcagactctggcagccatgcagcaggctcaacagcaacctcaaccccaattgcaagtgcagatgccccagatgccacgggataggcgtggtgagttcatgagagggcaccctcctaccttcgcccattctgctgaccccatggatgcagaagactggctgcgcgcagtggaaagggagctgtgcaccgcccaatgcgacgacagggagaaggttctgtatggtccccgccagctgaggggagcagcccagtcctggtgggagtcctacctcgccacccatgctaaccccgaagctatcacttgggaggaattcagcgagagtttccgtcggtaccatgtgccggagggactgatgatcgtgaagaaggaggaatttctggccctgaagcagggacccctgtctgttagtgagtacagagataagtttctgcagctgtctcgttatgcacctgaagacgtcaacactgatgctaaaaggcagtacaggttcatgagaggtttggtggatcccctgcattaccagttgatgaatcacaccttccccaccttccagcacctgattgatagggcagtcatgactgagaagaagcgtaaggatatggaagatcggaagcgcaagatgagtggaccccagtccggaggcaccagccgtccacgtttctcaggcagttcatctcaacaaggcagacctggtcacccacagggatatcagaatcagaatcagcgtccgcatcagcagcagtttcagaggcagtacccgcagcagcagcagcagtatcgtcagcacagccagcagggaggtaatcagtatcagaagcagaacaaccaggcacctcgccttcctgccccagcagcgaatcagagcaaccaagcagccccagcacaaggaggaggaagaggatgtttccactgtggagatcaaggccactgggcgatgcagtgcccaaagaagacggctcagcagcagaccaaccccaatgctccagcaaggcaaggtgtactgcagccggcagcaggcaatcgtaaccaagcgtacaaccgtggaaaggtgaaccacttggaggccgaagcgatccaggatgcacccgatgtggcagtaggtatgttctcagtcgaatctcatcccgcgaaagtgctatttgatactggtgcaactcattcatttgtcactgcaacatgggtagaattgcataacatctcagtagaggcaatgatgccacccatgaggattaattcggttggtggcaaggtgcaaacagataaaatatgttcaaacataatggtggaaataagggggataggattccccagtgacttaatagtaatagacacccccgggatagatgtgattctagggatgaactggttaatgaagtatgaagcaaatgttagttgtgacaagaggaccataacattgaagtccccgtcaggagaagaggtagtggccgagctaaggatgcctaagtcagaagagggagtctgtcaccagatttctgttaatagtaaggagcccaacccgctcgaggctatcaaggttgtgtcggactttccggatgtgtttcccgaggagctaacgagcatgccccccgagagaaaagtcgaatttgccatagagcttatccctggtaccgcccccatttcaaagagagcctatcgagtgtctggaccagaattggtggaactcaagaagcagatagacgagatgttagagaagggttacattagaccaagcacctcgccttgggccgctccagtgttgtttgtagagaagaaagatggtaccaaaaggatgtgcatagactacagagccttgaatgaagtcactgtcaagaacaagtaccccctgccaaggatagaagatttgttcgaccagctcagaggtgccagcgtattctcgaagatagatctgagatctggttatcatcaactcagaatccgaccctcggatataccgaagacggcattcatcaccaagtacgggttatatgagttcacagttatgtcctttggtttgacaaatgcgccagccttctttatgtacctgatgaacagtgtgttcatggattatctggacaagtttgtggtagtgttcatcgatgacattctcatatactctcaaagtgaggaagatcatgtagagcatttgaagatggtattgcaaagacttcgagagcatcaattgtatgccaagctaggcaagtgcgagttctggattcatgaagtcttatttctgggtcacatcataaaccaagatgggttagcagtggatccaaagaaagtagcagatatcctgaactggaaagcaccgaaggacgttcgtgggatcaagagctttattggaatggccggatactataggcgtttcattgaagtcttctcaaagattgctacaccaatgacagcgttgctagcgaagaaagttgagtttaagtggactcaaaagtgtcaggaagcatttgaagaactgaagaatagattgactacagctcctgtgttagtcctgcctgatgtccacaagtcattctcagtgtattgcgacgcttcgtacaccggattgggatgtgtgctaatgcaagaaggaagagtggtagcatactcatctcgacagctgaagatccatgagaagaattcccccacacatgacctggaattggcagcagtggttcatgccttaaagacctggagacattacctgtatgggcagaagtgtgacatctacacagatcataagagtctgaagtacatattcacccagttagagttaaacatgaggcagcgaagatggttggaattgatcaaagactatgagttggagatacattaccatccaggcaaagccaatgttgttgcagatgctctgagcaggaagagtcaagttaatttgttggcctcgtacccgatgccgtacgagttagccaaagagttcgacagactgagcctcggtttcctgaacagtacgcaaggagtaacagtggaattagagcccaccctagatcgggagatcaaagaagggcagaaggatgatgaaaacatcaacaagatccggcagctgatcctagaaggaagaggcaaagactttcgagaggatgaagagggggtaatctggttcaaggaccgattgtgtgttcccgacctcaaacctattcgggaactgatcctcaaggaagctcatgagacagcctactccatacacccaggaagtgagaagatgtaccaggatttaaaaaggaggttttggtggtatggcatgaaaagagagatcgcagaatatgtcgccatctgtggtagctgtcagagaaccaaagcagagcatcagaggcctgccggattgttgcagccattgcggattcctcagtggaagtgggatgagatcgggatggatttcatagttggcctacctcgtacccgggccggctacgattccatctgggtggttgtggaccgcttaacaaaggtggcccatttcatacctgtgaagacgacatacaccggagcaacgttagctgagttatacatgtcacggatagtctgccttcatggtgtgccgaagaagatagtgtcagatcgaggaacacagttcgcctctcatttttggcagcagctacaagaagctttgggcacacatttgaacttcagctcagcttatcacccgcagacagacggtcagactgaaagaactaatcagatcctagaagatatgttgagagcctgtgcgttgcaagacaagtcaggatgggacaaaaggttaccttatgcagaattctcctacaacaatagttatcaggccagcttgaagatatcgccgtttcaggcactctatgggcggagttgcaggactccgctgcattgggaccaggctggagagagacaggtgtttggccccgacatcttgcttgaagccgaagagaatatcaaaatggttcgggagaacctgaagacagcccaatcaagacagcgaagctatgcggacagaaggagaagggaactgagttttgaagtgggagactacgtctatctgaaggtgtcacctatccgaggagtcagaaggttcggagttaaaggcaagttagcacctcggtacgttggaccatatcagattcaagcaaagcgtggagaagtggcttaccagcttgacctaccagagagtttgtcagcagtgcacaatgtgttccatgtgtcgcaattgaagaagtgtctgcgagtaccagaagaacagttgccagtggagggtttggaagtctag

SEQ ID NO: 45831 - DNA, 355 bp, Zea mays
  Clone ID: MRT4577_141806C.1
caaccggtaaagctggtgagctttgtaggcaggacccatagaaaatgccttggaaaagaaagcattttctgcaaacctcgcatgcttacaagcaaaattttgtgcacacagtttaaacccgagttttttttgcaggtgcgatgatggcccctacaaaaaggatgcaaacgagacagaattaccaaagttgctctgatacaagttattgtcgtggtagcattgcacgaatcaccagtggtcgcgtgaacacataggcctacccaaatcaaactagttctgtttcaatgtgctccaaatgttgacaatctgcagagtatgattccaagaacaagggaatgcacctgtctggataaca

SEQ ID NO: 45832 - DNA, 4449 bp, Zea mays
  Clone ID: MRT4577_141807C.1
atgtctgacaacaggcgccgatgcaacaggcgtgctcagcaggagcagcatgaccagcaggaggaaaatcagaggcagcctcccccaccacccccgatgtcagtggagcagatgttcttgatgcagacccaggcagtgcaggccattggacagactctggcagccatgcagcaggctcaacagcagccccaaccccagttgcaagtgcagatgccccagatgccacgagataagcgtggtgagttcatgagagggcaccctcctaccttcgcccattctgctgaccccatggatgcagaagactggttgcgcgcagtggaaagggagctgcgcaccgcccaatgcgacgacagagagaaggttctgtatggtccccgccagctgaggggagcagcccagtcctggtgggagtcctacctcgccacccatgctgaccccgaagccatcacctgggaggaattcagcgagagtttccgtcggtaccatgtgccggagggactgatgatcgtgaagaaggaggagtttctggctctgaagcatggacccatgtctgttagtgagtacagagacaagtttctgcagctgtctcgttatgcacccgaggatgtcaacactgatgccaagaggcagtacaggttcatgagaggtttggtggatcccctacattaccagttgatgaatcacaccttccccaccttccagcacctgatcgatagggcagtcatgactgagaagaagcgtaaggatatggaagatcggaagcgcaagatgagtggaccccagtccggaggcatcagccgtccacgtttctcaggcagttcatctcagcaaggcagacctggtcacccacagggatatcagaatcagaatcagcgtccgcatcagcagcagtttcagaggcagtacccgcagcagcagcagcagtatcgtcagcacagccagcaaggaggtaatcagtatcagaagcagaacaaccaggcacctcgccttcctgccccagcagcgaatcagagcaaccaagcagccccagcacaaggaggaggcagaggatgtttccactgtggagatcaaggccactgggcgatgcagtgcccaaagaagatggctcagcagcagaccaaccccaatgctcccgcaaggcaaggtgtactgcagccggcagcaggcaatcgtaaccaagcgtacaaccgtggaaaggtgaaccacttggaggccgaagcgatccaggatgcaccagatgtggcagtaggtatgttctcagtcgaatctcatcccgcgaaagtgctatttgatactggtgcaactcattcttttgtcactgcaacatgggtagaattgcataacatctcagtagaggcaatggtgccacccatgaggattaattcggttggtggcaaggtgcaaacagataaaatatgttcaaacataatggtggaaataagggggataggattccctagtgacttaatagtaataggcacccctgggatagatgtcattctagggatgaactggttgatgaagtatgaagcaaatgttagttgtgacaaaaggaccataacattgaagtccccgtcaggagaagaggtagtggccgagctaaggatgcctaagtcagaagaaggagtctgtcatcagatttcagttgatagtaaggagcccaacccgctcgaggctatcaaggttgtgtcggactttccggatgtgtttcccgaggagctaacgggcatgccacccgaaaggaaagtcgagtttgccatagagcttatccctggtaccgcccccatttcaaagagagcctatcgagtgtctggaccagaattggtggaactcaagaagcagatagatgagatgttagagaagggttacatcagaccaagtacctcgccttgggccgctccagtattgtttgtagagaagaaagatggtaccaaaaggatgtgcatagactacagagccttgaatgaagtcactgtcaagaacaagtaccccctgccaaggatagaagatttgtttgaccagctcagaggtgccagcgtattctcgaagatagatctgagatcaggttaccatcagctcagaatccgaccctcggatataccgaagacggcattcatcaccaagtatgggttatatgagttcacggttatgtcctttggtttgacaaatgcgccagccttctttatgtacctgatgaacagtgtgttcatggactatctagacaagtttgtggtagtgttcatcgacgacattctcatatactctcaaagtgaggaagatcatgtagagcatttgaagatggtattgcaaaggcttcgagagcatcagttgtatgccaagctgggcaaatgcgagttctggattcatgaagtcttgtttctgggtcacatcataaaccaagatgggttggcagtggatccaaagaaagtagcagatatcctgaactggaaagcaccgaaggatgttcgtgggatcaagagcttcattggaatggctggatactataggcgtttcattgaaggcttctcaaagattgctagaccaatgacagcgttactagcgaagaaagttgagtttaagtggactcaaaagtgtcaggaagcatttgaagaactgaagaatagactgactacagctcctgtgctagtcctgcctgatgttcacaagtcattctcagtgtattgcgacgcttcgtacaccggattgggatgcgtgctaatgcaagaaggaagagttgtagcatactcgtctcgacagctgaagatccatgagaagaattatcccacacatgacctggaattggcagcagtggttcatgctttgaagacctggagacattacctgtacgggcagaagtgcgacatctacacagatcataagagtctgaagaagagtcaagttaatatgttggcctcgtacccaatgccatatgagttagccaaggaatttgacagactgagtctcggtttcctgaatagtacgcaaggagtgacagtggaattagagcccaccctagagcgggagatcaaagaagggcagaaggatgatgaaaacatcaacaaaatccggcagctgatcctagaaggaagaggcaaagactttcgagaggatgaagaaggggtaatctggttcaaggaccgattgtgtgttcccgacctcaaacctattcggggactgatcctcaaggaagctcatgagacagcctactccatacacccgggaagtgagaagatgtaccaggatttaaaaaggaggttttggtggtatggtatgaaaagggagatcgcagaatatgttgccatctgtgttagctgtcagagaaccaaagcagagcatcagaggcccgccggactgttgcagccattgcggattcctcagtggaagtgggatgagatcgggatggatttcatagttggcctacctcgtacccgggccggttatgattccatctgggtggtcgtggaccgcttaacaaaggtggcccacttcatacctgtgaagacgacatacactggagcaacgttagctgagttatacatgtcacggatagtctgccttcatggtgtgccgaagaagatagtgtcagatcgaggaacgcagttcacctctcatttttggcagcagctacaagaagctttgggcacacatttgaacttcagctcagcttatcacccgcagacagacggtcagactgaaagaactaatcagatcctagaagatatgttgagagcctgtgcgttgcaagacaagtcaggatgggacaaaaggttaccttatgcagaattctcttacaacaatagttaccaggccagcttgaagatgtcaccgtttcaggcactctacggacggagttgtaggactccgctgcactgggaccagcctggagagagacaggtgtttggccccgacatcttgcttgaagccgaagagaatatcaaaatggttcgggagaacctgaagacagcccagtcaagacagcgaagctatgctgacagaaggagaagggaactgagttttgaagtgggagactacgtctatctgaaggtgtcacctatcaggggagtcagaaggttcggagttaaaggcaagttagcaccccggtacgtcggaccatatcagattcaagccaagcgtggagaagtggcctaccagctcgacctaccagagagtttgtcagcagtgcacaacgtgttccatgtgtcgcaattgaagaagtgtctgcgagtgccagaagaacagttgccagtggagggtttggaagtccaagaagatctgacatacatagagaagccaacgcagattctggagtttgcagacagagtcacccggaggaacaccatcagaatgtgcaaagtcagatggggtcaccactcggaggatgaagcaacctgggaacgagaagatgacctgaaggccaaataccctgaactctttgctgaccaaccttga

SEQ ID NO: 45833 - DNA, 853 bp, Zea mays
  unsure (1)..(853): unsure at all n locations
  Clone ID: MRT4577_141808C.1
ccggccgggggaaattttcgattccccctagccgcgaccttccctctccctgtctccttttccctcacggcagcactgcagcagcagccagcatagttcttcctcctccctgcttcttccctctgccatggatgcgagctccaagctcctgctcatccagccccccttctccatctcaccatggacgccaccatagcagcagggtaggccgatgtcctcccctggtttatgcgctggacatctccttcctcccacttcatgccggccctgctcctctccacagagccgagttcgacgtccctgccatggtgggcgctcggcgcccgagctccattcctccatgccagccgacgcctctagcaggacgcgcgctcagccgcgccagggccgctctccccatgttcccctcaaatccgagcttccctggcgtccttgccctgcatgaactccccatgggcgctggaggcgcccagcaccgcgcaggtgtgcggcaaggcttgaccgacgcccttccctggtcggctttgagcattgggtcgagcccctctttttgccatggcactaggcccctgctcctcctctcttccccaccaaaatagcaagcctccgccatgcccaagtgttctctcgagctcgccgtcgggactcccaagtcgctgcacgcctctgcccaggctccaaatccatggncggaatcctcactggaagtgacgctagccgcgagcctcactgctcccttgtcatagttgntgttgtccatcgccttgaagntccctcgtcgtcgtgtcgcttcttcgcctctccctcgtagcacgcccctccccggagctcaccatcgatccccatttcggac

SEQ ID NO: 45834 - DNA, 280 bp, Zea mays
  Clone ID: MRT4577_141809C.1
aatacttgctcggtattttttgatgaggtagattcattgacaacaaaaagaggtaaagagggggggtgggttgttgaacgtcttctaaacctacttccttctccaacttgatggtgtctctcttctttaatggcaccttcattatattaactacacactcaattgcaatgatagatctggctaaactacggcctgccccaactagaacgacacattatacacccatccttcgtcctctcgcatctggtttaatagtataggcccttacccccattcctac

SEQ ID NO: 45835 - DNA, 444 bp, Zea mays
  unsure (1)..(444): unsure at all n locations
  Clone ID: MRT4577_14180C.1
acgacggcgccggcgncagccgacgcccggccgccggggccgggggccggccgcaggagcccccgaccgggccgcgccgaggccgccgccagggcccgccgcgcacgcgcacgaaccccaacgccagccggcgcgccgccacgcggcggcgcggcgaccgcgacgggggccaccccaacgcgcgcaccgcgccngcacgaggagacaccgcaccaacgggcaccacgcgacgaggcngnacancgggacgcccccgcaggagnncgcgcagancgacgacnccgggagcaccgccaccgacgagcccggccccnccggcgagcaggggggcaaccaccaggagccacgancagaaccggaccgcggcagaggacacccaccagcaaaaggcaccgccgaagggacgggagacagcgacaaaaaacagcgcacgaaggaaaggca

SEQ ID NO: 45836 - DNA, 190 bp, Zea mays
  unsure (1)..(190): unsure at all n locations
  Clone ID: MRT4577_141810C.1
taatgtgtatggggnggcaataggggccggatatgaaacctgagtccaaattttnngaatcaaataaaggggagtggnngccaatgtggttntgttcattgaaacaaactctttttttttttgggatcnaataattattacatgtgaaaccgaggctanctgtgccnagagcgaagtgnggttattatac

SEQ ID NO: 45837 - DNA, 349 bp, Zea mays
  Clone ID: MRT4577_141811C.1
aaaagggaaccaagctgttaaacccgttgggggaaaaagggggggcaaatcagcaaaaatggggatgctgcccccaaaatttgggaccgcctacccaaaaaaaaaccccctgcccttaaaaaaacatgctttcctagctgaaaccggattaggggaaaaccttggaggcaggcgaccgtaatccccccttttccatttgggaacgggtttttcaatcgggaaagaaattttgacaaaaaatatactttcaacccctcaacataattgctgttgcctgaggcataaaaaaaaaaatcgggggaaaaaatggggggggcccttgggatgcatatgaaaaaggacttgtttt

SEQ ID NO: 45838 - DNA, 377 bp, Zea mays
  Clone ID: MRT4577_141812C.1
acccaacctcatatctcatctcgtcctatatcgtccactagatcggtcggccgggcagctgtgactccggcaagctcggccgtcgaatcctgcgtcatcattcctcgaaacttaaggctactagaagagctagaacgtagatagaacggcattcggatatgggacgacattgctatggaataggagacgcacatcacatatacatgcaaccaaggtctgacagcacatatatgccactttatgcagtgcaaacattacgtaagctcgaacgttacctgctgcagaagatatcattgaatggctagcgaccaatactgtggatttctttaaccaagttaatatgctgcattgcacactcacataatattgcacacctg

SEQ ID NO: 45839 - DNA, 913 bp, Zea mays
  Clone ID: MRT4577_141813C.1
cgccggtgtcgcgtgtccctcgttcgcgcacgcccagcccgcctccacctctcatgccggagcaccaccgcatcgccggagatccgccgtactggtgatccccggagcaggagcagacgcaatggaccgcatcatgatgtcccgcccaccccttcccgccccgacccatgccgctgcgggcgccgacggtgacttcctcgagctcgacgtgctctggcccgcctccccttccgcggtaggtctcggcctcctcgccgcgcttccggaggatgagggcaagaagaagaagcgcgccgcggccggggtcggggtcggggtcggagcccccgcccgatccgccgcgcgccccgtcccggagaccgtcgcagcgtccgcgatggcgaggtcggcgccggtgcgtataccgtcggatcccgcgcggagggggaggtgggcccacgccggggcgggagctggcggcagcgcggaggacgccggggaggccttggtccccccgcacgagatcgtcgcgcgccgcgctgccgcgcacagctcggtgctggaaggcgccgggaggacgctcaagggccgcgacctccgccgcgtccgcaatgccgtcctgcgccgcaccggcttcctcgactgaggcggaggcgagtcgtcacgtcgctttcgcgataaagttttgatcatgttgttttctcttcgcgattttgtttccccatgatgtgtttctggtccggctactttgattccttcccctaccgagagggggttggaaaaaaatgaggtgagttgaggtgaacgagcgacgacgtaattaccttgctgtgttgtttcatcacacatatatggaaaattttggcccttatatttgttccaaacatatacaataaacttcatacaatttttccaatataatataaaaataaat

SEQ ID NO: 45840 - DNA, 400 bp, Zea mays
  Clone ID: MRT4577_141814C.1
gggaaaaccaagttagttaaattttgcaatattggcttcgaaaggggcctgcctacccggggggactgggaccccgttctcaccgggcaggtgttctcaccgggccctggttaaaggagtttacatgggggaagaaaaccctggccccgggggggcaaaaaacgggccacgggttcctgccaaggcccccggtcgatgcaaaacaaacagcttttgtcgttccggggcatgcatggggatcgcgcgagcgggtgcccgttttcctttttaaagagctcgggccctgacaatggccatgctcatcttgctgggggcgggggcccgcaactccagctggatgccctccaactcccttttgaaccgggccttggagcttgggtacaggattttggtcctgacc

SEQ ID NO: 45841 - DNA, 491 bp, Zea mays
  Clone ID: MRT4577_141815C.1
aaattatattctaaaattttaaaacctcaagtttagatttgaggcatcaaaattcaatattacttttatttgcatagctagttagaaggatatgctgtgataaagattcacgtagtaatagatgctaaattgtatttctcgaatgatgaagaaacttccaactatcttaaatacatatgctagggtttacactcgtgcgcctccctggcggagcccactgtgaggctgggcttgcgcctgtgttgcccctctagggtcgccgtggtggcccatattttggtctgcgacaccttcacacactagtttgatgttcttttttttaacttgattattgcaggattggagatggctcatcttatatgtggcgcctggcgaactttgctgatgtatactcccagtgcaaacaccgtaaggtgttcatgttgcaacacagctaaccttgatagaccagtgaattatatagctcatgagaactgcggccagtgccggac

SEQ ID NO: 45842 - DNA, 295 bp, Zea mays
  Clone ID: MRT4577_141816C.1
ggggggggggtaatatttataatattttaagaccattcggggggttcatcgataacccgggctcagcatatcaccccctttcccctaaaccccgggagaccgcttctaaagcctgacccatgggctcaacaaaaaagctctcaccactttaccaggccaagcctttgttttaccccctaaaagaacatccaaatttctccccgtttgtagattgcgggggtaatagaccccccgaaagagggttgctcgcttttgtcccaaaaaaatcgaacccaacctggccccccccccgggc

SEQ ID NO: 45843 - DNA, 385 bp, Zea mays
  Clone ID: MRT4577_141817C.1
gctatccatccagccagccagccgccaaaagccgcgcgcctcgcggggacgaggcttttgaggtgcgaatgattgctggttcgtccagccgcctcgtgccgcgcgtgttttgagccctgttctgttctgttccggtcccgggaggggcggctgctagccttgttgcctttgctggctgctacagtgggtttcctctgctcgtctcgatcggtcggatcggaggtcgttggctcgtgaaaagggctttcttccccaccggtcaccagccttttccccccttccctaccactactactagtactactattccgttcctctcccggcgtctcctgctgccctgagcactgcccctctctgtggttccctgctgccactactacccact

SEQ ID NO: 45844 - DNA, 171 bp, Zea mays
  unsure (1)..(171): unsure at all n locations
  Clone ID: MRT4577_141818C.1
aaaaaaaaaaaacaaaaaaaaaaaaaaaaaaaaaaaaaaaaaaaaaaaaaaaaaaaaaaaaggatctttcagtttgccacggaggctgccattactatcctgaggattgacgacatgatcaagcttaccaaggaagaagagggtaancgaagagtaagcagcccaccagta

SEQ ID NO: 45845 - DNA, 337 bp, Zea mays
  Clone ID: MRT4577_141819C.1
ctgacctcaaaagattctaccttatccttatggattcatcttgccctagtaagcataattattccacactaatgtaacaaccatgatctaatccaaagtaattagatattatctactcatatccgatctaatctagatcctatctaatctaatacgatctaatctaatgtggtctacttaatcagactagtgacactggtaagaaaagattagaccctacaagccaggtgttaacttaacttagtatagtaaaccaactcagtcacatacatgagagctatcccaaccaatagagtcatgatgaattacataatctgtctatccccacctaacatca

SEQ ID NO: 45846 - DNA, 367 bp, Zea mays
  Clone ID: MRT4577_14181C.1
acacacgtcaccagcgtgtcaggcgtcttccgtcaccgtttgtcttgaaggttctggaccccgcgagcgtcttctcctctgctccttggtgcttcgtcctcctcccacgtgtgtgcgcctggacgacacaagcttaggggtcaacggctaccagcgctacgatcatgtgtgaccaatcgctgcttgcgatttgcaaaccgccggatcaaggcgtgtgagcatacctttagatggcaaagggacggaagccgaagagggcatcatattctgtagtctctatccatttgttggcaacataaatgagccaatcgtatcagaaactttatccagagcaatctaaagccacctctcgagtgtaaggatgtca

SEQ ID NO: 45847 - DNA, 313 bp, Zea mays
  Clone ID: MRT4577_141820C.1
gaagagggagggccccaaataaaagaaaccgggccccacggagaagaaatactttaccacggagggcagggggggggggcgaacggcccccccgggcgggagcatcttctctctccacgccaaaaccactctccgcggctccgaaccctggacggggggcacctcccgcccacgcccccggcccgccggagccgtccccgggaggggagcagccgcttgcccaaccccgcgccgagccgggaggccaagcccaaaagccctggggcccaccccgccttcgttccgccgtcgaaacgcggcgaactgcaaacgc

SEQ ID NO: 45848 - DNA, 424 bp, Zea mays
  Clone ID: MRT4577_141821C.1
ttcacaatgcgccgtgcacaaccagctagggaaattttgggcgctgcgggctgaactgcactcaacgataaacggctggtcgctaggattcgtcctcgctgcgcaggctccatcgacaagccatcgcccagctcggtcggagggaggtggaagaagcgaggttacgagacacttgaagaccaagttggtacctaggaatctcgagtctaaggtcaagagcaggtaccacaggatgaggcgcatgaaggatgttgcgatgagttcgtgagaggtctaggtcgtcctcttccagtcaactttgggttgctggatcgttgtctttgtatgatgtagtcatttatctattttgtatagaactccattatatattaatgatgtggcattcgtttcaacaaaaaaaaaaaaaaaaagtcgacgcggccgc

SEQ ID NO: 45849 - DNA, 234 bp, Zea mays
  Clone ID: MRT4577_141822C.1
atggatactagcctggataaagttattgcgttatggtcaccggctactacagatcctgttcccgcctttcgcgctggaaggcctttaggttttgccacaccacactgacaagggcagagtactagacttcaggtaaacatttggcaataccacccaacatggggtttattacactagcccagcctgaaaagaaccctgcattggcgatatatgtggaccataccttatatacat

SEQ ID NO: 45850 - DNA, 312 bp, Zea mays
  Clone ID: MRT4577_141823C.1
aaaatggtgtagtatgaaacagagaaattccacaagaatctctgactacaaatctacaatatacattcaaatccagcgtcataagggacagtgatggactgatcttttacatgaataaagggacggaaaatggaaacaaccatagtagttatagaacatagattcaaatcaaagtagagacacaaacatcccttctttttgtattgttcccagtcccattacatcagcaccaaccttcttattttaaacagcctttcctcaaaacaccacaaactgcatttgtatttttttataggcacaaattgctttgct

SEQ ID NO: 45851 - DNA, 826 bp, Zea mays
  Clone ID: MRT4577_141824C.1
aattcggcacgaggctgctgccctgctggcttggtctggcgttacggcggcctcgctgctggcgctgttcggtggtttggaccaaccgatcgaggaagactatcgtcatcacccctcctcggcgccactcaccatcaccaccaccaccgggcgtcaagggaagaaggcgtccccgaggccgagcctgctcttaccgggcttggggagcgagcgtccagcaccagcaggctaggccggcggccgattgaattcctcgtcgaggcccccctcggcaataaattggtgcggggatttcctccctgacctaaccggccagccagcaggtcgcggtcgaggttctcttctcggctcgatttcctcccgcggcggagggccggccggggtggagcatgcgtcgcgtgcgggtgtcctcgcaccaggcgcccgtccacaagctcggcgacggccagatgaagctgacgccgaggttccgcctggcggcgacccccgcgccgccgggtccggatccggacccgcagcaggcgtcgtgggaggcggcggaggcgctgatcccggggctccccgacgacgcggcgctgaactgcctgctgcggctgcccgtggagtcccacggcgcgtgcaggctggtgtgccggcgctggcgccatctcctggcagacaaggcccggttcttcgcgcagcggcgggcgctggggctgcgcgcgccgtggctgttcacgctggcgttccaccgctgcacgggcgagatccagtggaaggtgctggacctggtgcagcgcagctggcacgccatcccggtcatggcgtgccgcgaccgcgcctgccc

SEQ ID NO: 45852 - DNA, 415 bp, Zea mays
  Clone ID: MRT4577_141825C.1
aatatttgttcttggtttttcttgctcctgtttctcccttttcctttttttgttttttagatgtaaattttctctttttttttcgggaaaaaaggcccatttttcccccaggggggggggtttttcccgccccctattttcggggacttttgggagggaagaggccccagggggcccgggattttgggcgccaggggggggggcccctagggggcccctgggacaacaagggcgcgccaaaagggggttctaagggacaccccttggacgggtatgggggccccccctggacccccccggggggttggccaaggccccaccctggggggtggctatggcccccgggggggtttgaccccgggtccttcgggcggtgggggaaagaatgactgggcccagggccttgggggccccc

SEQ ID NO: 45853 - DNA, 508 bp, Zea mays
  Clone ID: MRT4577_141826C.1
gacaagctccgccgcctgcaggttccctctcgaaatttcaattataacccacgggatcgttcactcaaacacaaataaactttggggagatttatacttatgcaggagtattttctataataaattaatatatatcactattagatttcaaaactaaataagaaaactgttatttgtagtcaaagttttatatatttaatttaaatcttgtccaaaacgaccttttgctttaggactggatggagtactatttggacttgaatttgactatggtaatacgaggttctatccagtattatgtttttgttagcaatattatttatgtatatcattaaaataattacaattaaaaattgtctattacttgttgcaaaataattctttgtattggattaaaagaaaaaaaagcgagaatgattggtagttatggtagttgaaataaaaaaaacttttcttttttaaaacattagtttctatggcttctccatagatgggctcccttgggttt

SEQ ID NO: 45854 - DNA, 520 bp, Zea mays
  Clone ID: MRT4577_141827C.1
tataagccactctgccgcctcaccgactctctcactctgacaccgcatattcgccggccgatgagagtgaagccgcgctaacccatgtcctccgtggagcttggctgcgcctaccccgtcctctcatccgcgaagacgatggcatccccatcagccgccgagaagatcgccacgatcgcgaacgagctctacatcatcgactagtcctactgctcggcactcttcaacaagatcctggagaagagccacgccgatgacctcgtcctctccgtgggatccgctgctacagctgctccaaatgctgctgccgctagctgctgtcaggcgctgcggttgctggtgccccgagtgccgaggaaaggacggaagatgccaaggacgagtctagatgacgacatcgtactgcactcatgctgcaactgacgagatcccgctcacgctaaacatcagcgtaccgtactcctcgatgtcgacgactatcttgtcttaagtaatgactcgaagctcttgttactactac

SEQ ID NO: 45855 - DNA, 2285 bp, Zea mays
  Clone ID: MRT4577_141828C.1
gttctgtccatgatcaagatctatagctggaggaagtgggaaaccttagcaggtccaattgctgctgaggaattgaaagctaggagaaccaaggtgatgagaaggcagtcaacctttgtttttaacaatgcttctcatccatggagcaaaaataaaatacttatttggatgctttgctttttgcgccaattcaagggctccataataaggtcagactatttggcactgaggttgggctttgtcacatatcacaagctaccacattcatatgacttccataaatacatggtacggagcatggaagattattacaatgggactattggtatcagttggccactttgggcatatgtgattgtctgcgtattaatcaatgttcatggtatctctactacttattaaggctcagcacgagcagcacgccgtgccgctccaaccgtctcgcttccctgcttagcttcccgccgcgccatggcgtcgaccaaggcacccggccctggcgagaagcaccactccatcgacgcgcagctccgtcagctggtcccaggcaaggtctccgaggacgacaagctcatcgagtacgatgcgctgctcgtcgaccgcttcctcaacatcctccaggacctccacgggcccagccttcgcgaatttgtccaggagtgctacgaggtctcggccgactacgagggcaaaggagacacgacgaagctgggcgagctcggcgccaagctcacggggctggcccccgccgacgccatcctcgtggcgagctccatcctgcacatgctcaacctcgccaacctggccgaggaggtgcagatcgcgcaccgccgccgcaacagcaagctcaagaaaggtgggttcgccgacgagggctccgccaccaccgagtccgacatcgaggagacgctcaagcgcctcgtgtccgaggtcggcaagtcccccgaggaggtgttcgaggcgctcaagaaccagaccgtcgacctcgtcttcaccgcgcatcccacgcagtccgcccgccgctcgctcctgcagaaaaacgccaggatccggaattgtctgacccagctgaatgccaaggacatcactgacgacgacaagcaggagctcgatgaggctctgcagagagagatccaagcagccttcagaaccgatgaaatcaggagggcacaacccaccccccaggacgaaatgcgctatgggatgagctacatccatgagactgtatggaagggcgtgcctaagttcttgcgccgtgtggatacagccctgaagaatatcggcatcaatgagcgccttccctacaatgtttctctcattcggttctcttcttggatgggtggtgaccgcgatggaaatccaagagttaccccggaggtgacaagagatgtatgcttgctggccagaatgatggctgcaaacttgtacatcgatcagattgaagagctgatgtttgagctctctatgtggcgctgcaacgatgagcttcgtgttcgtgccgaagagctccacagttcgtctggttccaaagttaccaagtattacatagaattctggaagcaaattcctccaaacgagccctaccgggtgatactaggccatgtaagggacaagctgtacaacacacgcgagcgtgctcgccatctgctggcttctggagtttctgaaatttcagcggaatcgtcatttaccagtatcgaagagttccttgagccacttgagctgtgctacaaatcactgtgtgactgcggcgacaaggccatcgcggacgggagcctcctggacctcctgcgccaggttttcacgttcgggctctccctggtgaagctggacatccggcaggagtcggagcggcacaccgacgtgatcgacgccatcaccacgcacctcggcatcgggtcgtaccgcgagtggtccgaggacaagcggcaggagtggctgctgtcggagctgcgaggcaagcgcccgctgctgcccccggaccttccccagaccgaggagatcgccgacgtcatcggcgcgttccacgtcctcgcggagctcccgcccgacagcttcggcccctacatcatctccatggcgacggcccccctcggacgtgctcgccgtggagctcctgcagcgcgagtgcggcgtgcgccagccgctgcccgtgggtgccgctgttcgaaaggctggccgacctgcagtcggcgcccggcgtccgtggagcgcctccttctcggtggactggcacatgggaccggatcaagggcagcagcaggtcatggtcggctactccgact

SEQ ID NO: 45856 - DNA, 331 bp, Zea mays
  Clone ID: MRT4577_141829C.1
ttgttgcacggacagtgcaagatacggagcttggggacactatacacatgtgggaccttgggtagaggggagcgcaacaactgagcgtgaagaggcagctatcagagcaaagagggactactcactgggtgagcagaagaggcaatttgggtccttgaaccagcaacgacatggcgagctttattacaaggtagatggacagaagctgggctcacattaacacacgtacaaagcacgagagcagtggactctgcatgctagctgaaactactgatctcatgagatggatgcccaagcacatagagagaccgatcaacactgttggtgaagg

SEQ ID NO: 45857 - DNA, 497 bp, Zea mays
  Clone ID: MRT4577_14182C.1
atagatctctgattcttttattgttgagaggtgacttttttaatgatgataccttgattatttcgggttaacttatcaaaaacaccccaaaatggccgtagaaatggagggcgcgaaccataacgtgactggaaacaggcaaccatgaaaccttaccgccagtaatggttggggcagctagaaggccgcggcgtgaacaacatggtgtgtttagaagggaaacaaaaaaaggtgcgggaagaacgcattaaagttcccaacatcctgtggcttaccatggcacaaagagaggcgctttaagaaaatgtcactgtttgccacagttgggttacccaaggaatatccctgcggagccttaagaaggcccaatgtctcacaaaaaggagggtataagagcttggcggatgggagggcaacgtgaaccccgggggaaaatgagttagcggtcagaatggcccaaactgtagctgctgaaagaaaaaaggaaaacacccggg

SEQ ID NO: 45858 - DNA, 495 bp, Zea mays
  Clone ID: MRT4577_141830C.1
gaggtcgacggtatcgataagcttgaaaattgaagaaaccctagctatggaggagagcaaatttcggcagcaactagtgaagatgatgaccaattgggtgttatttttcccattttatttcatttaatatacaaacccttactactaaactttccaaaaattccctccatgtccaacttttgtccataacttaggaatgggtcaaattgctatttaagacctcctagttaatatcccaaagcaatttcatactaaaaacttctaaaacacgagttttacaatttattcggtttagtccctaatctcaacttaagcactcaatgtatagaatttcataacgaaattttcacgaaatcatgaaatcatatcataaaccccaaaataattataaaacaattatgtctatcgccgatttgtggtcacaaaaccactattctgattaggccctaattcgggttgtcacaattcttccccctttagaagattttcgccccg

SEQ ID NO: 45859 - DNA, 354 bp, Zea mays
  Clone ID: MRT4577_141831C.1
gccatttcactgttcaagtgcatatgcgtcttgcttaatctcacttctactggccctcacctacaccaatgcccaagaataatcttcacatccaactctaccacctttcccctccatcccacgccatccactgcccccgttgctgccaacttgccctccaacaccaaccgatcccttcacatcactgttcacaataacaccttcctcattcacactaacccacaaccacttgctccctatttaacccaccttattaactcgctattaactaaaatacctttatgtacaactcgtacatttatctatttctttttttcatcatttatccattcattcttttttattaaagtttat

SEQ ID NO: 45860 - DNA, 261 bp, Zea mays
  Clone ID: MRT4577_141832C.1
aacccaatgaccccctctaagggagccctcactgatgattgagatcatcatcccaaacaactttagatgacgtgccacgcaacgacttttgcagccaaaaagcgatgccttagtttaaaacatacatttccaaaaatttgttcttaagcatacactgtttaaaagcattccatgggccacagggcatcccacccctccaaaataaaaaatgccagggcgcaacccgtaagcaaagtgccaatgccatggtcagccccccct

SEQ ID NO: 45861 - DNA, 327 bp, Zea mays
  Clone ID: MRT4577_141833C.1
ccgctgcgccctcataccccccgcccctgtggcgcactcatctctctcgccgcgcaaaatcgtttagccgtcccaatccgaccacttttctccgatcgagcatgagcatggcgttctcctgcgcgagcgcgcgcctccacggtcgcaccggcgtcggcggcgccaaatgtcgccccggcgcggccctgctcgggcggcggggcacctgcttccgtccgaccgcctggaggtggagcaccgccaagggaatccgcgctgatctcccgccaccgccgcgggcgagcgcggatggcgccgccacctccggcccggacgtcatcgtcccct

SEQ ID NO: 45862 - DNA, 392 bp, Zea mays
  unsure (1)..(392): unsure at all n locations
  Clone ID: MRT4577_141834C.1
attcggctcgagaaaaaaagaaatattgttcctggaaagagcttcaacagatacgcagatatttttcagtgagcctgatgctcagacgcagcaattgcattcggaggtctttgtcaggttttagcttgaaatgaggaaatgctgttgtagtccagtttctgctcctatagttttagatttctagcctttagagaacagacatggggaaaaaagtatctgcaaggcatacatagttttgatatatgttttctttttgcaatttgtgttactaaagaagtcctgcatagcggttgaaatgagagctgttctgatcttccacannnaaaaaaaaaaaaaaaaaaaaaaaaaaagggcggccaacagactagagagcttgtttgacccgggaatta

SEQ ID NO: 45863 - DNA, 565 bp, Zea mays
  unsure (1)..(565): unsure at all n locations
  Clone ID: MRT4577_141835C.1
gccggccggtccgggactggtcctancaacactctccctaccacaccgaaccaacaagaggagcaagaggtagctatagcagcctagcacacaccaccacccaccaccaccgcgccacagagctgccgagagtgtgctgtgcttcgctcatcgaccgaccgatcgatctcggcatggcggactgggggccggtgctgatcgggctggtgctcttcatcctgctctccccgggcctgctcttccagatccccggcaagggccggatcatcgagttcggcaacttccagaccagcggcctggctttatttgacatcaatctgggtggctggattaggtactgcgtggtgcggaggcatatactactatatacatttacatgttcatctccatctgcttgctagctgtatgttgatttatttagctactactttatcaacgacatcctcgagtccagatacagtatatccaattaatcccttatgagcatgcttctgatagatggccattaataatacatatgtcatgtttttttattaaagaaaaaaaaaaaaaaaaaaggccccta

SEQ ID NO: 45864 - DNA, 1343 bp, Zea mays
  Clone ID: MRT4577_141836C.1
tcgaggcttggccgggcagcattacccacgcagcatggacagagaacatgagtcagatgaacccaaccttccatccgttcggccctcgggaaaaggccgggacgctatatatcgcgtgacgcaacgcacgttctcgggactggtcctacaacactctccctaccacaccgaaccaacaagaggagcaagaggtagctatagcagcctagcacacaccaccacccaccaccgccaccgcgccacagagctgccgagagtgtgctgtgctttgctcatcgaccgaccgatcgatctcggcatggcggactgggggccggtgctgatcgggctggtgctcttcatcctgctctccccgggcctgctcttccagatccccggcaagggccggatcatcgagttcggcaacttccagaccagcggcctctccatcctcatccacgccgtcatctacttcgccctcctcgccatcttcctcctcgccgtcggcgtccacatttacctcggctagctagtcgcccgtcgtcgccggcgggctgagcgaggctagctgctggcgcgcggcggcccggcccggcctggctttatttgacatcaatctgggtggctggattaggtactgcgtggtgcggaggcatatactactatatacatttacatgttcatctccatctgcttgctagctgtatgttgatttatttagctactactttatcaacgacatcctcgagtccagatacagtatatccaattaatcccttatgagcatgcttctgatagatggccattaataatacatatgtcatgtttttttattaaaaaaaaaaaaaaaaagaaaaaaaaaaaacgtccgacctgtgtacactcgtactcgtctcttcttcgccacacacacacggctgctagtgtacacagaggcacagcagcaggaggatggccgtagtgccggcggcgccggtggttcttggagtggccatggtgctcgtcgtcctggccgccagcgccggcgcggccgggcagctcaggatggggttctacgccgagagctgcccgggcgtggagcgcgtggtgggcgacttcgtccggcagcacgtccgccgcgtgcccaccgtcgccgccgcgttgctccggctgcacttccacgactgcttcgtcaggggctgcgacgcctccgtcctgctcaactccaccgccggcagcgtggccgagaaggacgcgccgccgaacctgacgctgcgcggcttcgacctcgtcgaccgcgtcaaggcgctcgtcgaggatgcctgccccggcgtcgtctcctgcgccgacgtcctcgcgctcgccgcccgggacgcggtcgtcgc

SEQ ID NO: 45865 - DNA, 346 bp, Zea mays
  Clone ID: MRT4577_141837C.1
ccactaaaaaataaaacccccttaaaaaaatggggttttaaaaatggccctaaaaaatgcaagaaatccggcccgttccatttttgtccacaacatatttttttgcaaagattcagtccttaaggttttttaaaattacccttccccccccttaccttgggacttttgcaaaactccgggtccgggtttaaaaatgcaccgggttcaatcctaaaatttaagcgtggggcaatttaatttttttcctcgccctggttctcagcaatgttaaagtaggggagcttataaacgtttcggtccttggtggcagaaaccacccttagccaatcccgcacgttgggttttt

SEQ ID NO: 45866 - DNA, 853 bp, Zea mays
  unsure (1)..(853): unsure at all n locations
  Clone ID: MRT4577_141838C.1
cggccgggccggggttcattatttctgatctgttagctcggtttttttttctgttgccaaattctgggttgttcccgcgatgtaaccggaaatgcgattggatccgctgatttgccacctaggaatgtcctggcccatgcttgtctctctctctctctcttttgacgaaggttattcgattggttttgtgattctgcgtagctgagtgggatccctagtgtttgattttgggagaattcaagtcgtcctttaattgcgaaatgtaactgttaaccttagagacagagagctttgtggatttattatcataacttagtgcagttttgaagtataagtttcagtactgaaactagatctggaagaacatacgtcaccgtttgaacggttgggctcatggaattatttgtaatcatggggagatatgtttgaagtctgctataatattgatgcatttagtacctatcagtaggcgattcagtggttgatgtgtgtgcaagatggttttgaaagcccagatcttgtcatggttcgctatgtgatccgagtacgagttcagtgacgttttagatctgaaactgcagtgacaatgtgcgctcgctctctggtttcgttgcaaatggctagaaatacttgaggagggtgacaacaagcaaatgtttttcctttccttcggcgcagcattttaagttactgtgtgcttgttgcagtatctgtaactaattcctatgcgattctcttgtttgtanggcgaagatgagggagatcctgcacatccagggagggcaatgtggcaaccagatttggcgcagttctggngagtggtgtgcgatgaacatggcattgaccctaccgg

SEQ ID NO: 45867 - DNA, 423 bp, Zea mays
  unsure (1)..(423): unsure at all n locations
  Clone ID: MRT4577_141839C.1
ctcaacttgttcattttccactgtcattattggcactattggtaggttatttaatgttttaacatatgagaaactagtatgtgtagataatatgcaacaaaagaaccattgtactcatctggtaacctaatttatctgtatccctatgtagtacttcatccgttccaaactagacattttggcttttttagatacattgccattttggccttttttagttacattgctgcttttattatgtatctatacataatatatatctgaatgcatgacaaaagctatgtatcttgaagagagtccaaacatcttacaatttggaatggagagaatagtccataatctgcaaaaaaagaacaactgtactcctctggtaatctaatcagcatcctttttcaggggttttgcattgnttcagctgctctt

SEQ ID NO: 45868 - DNA, 204 bp, Zea mays
  Clone ID: MRT4577_14183C.1
ccgataataccccgcaaactctcgcccgagcggggcggatgtataatgccccatacggtccaccggtcgaccttgacgccagtctcggtctcttccgaaggcgtcgcgcgcggatgtcttgagaggagaggaggaagcttgggcccgggacaatggacacgggcccgaccggaccctttgagactgcatctgctcctgcaaact

SEQ ID NO: 45869 - DNA, 270 bp, Zea mays
  Clone ID: MRT4577_141840C.1
aagccaaaggaccagcctccatgtttgattcatgtacaaaagtagggaaaacgaacccaggggccccctgggatttaaaaaaagggtttgttcactttccaaatttcgaaacaaaatatacatttttatttgggtttattgactaccacgcgattcccaggaaaaaaaaattggtttttggaatacatgtttgcaaaaaacccacaaaaatttaccaggtgatagcccccggttttttacctttccatttttttaaaaggaaggtgatgc

SEQ ID NO: 45870 - DNA, 402 bp, Zea mays
  Clone ID: MRT4577_141841C.1
attcggctcgaggtacagcacctttttttggcctgcgacctctctcagtcgccgcgatggagtgcacctctgtcatgatcatgcctgactgcggccataggggcctgattggccagaccatcaaccgtggtgagcagaagggttattaccttaaggtcttggaacttgtaaacgttgagaggtagtttgcccataagcactactctgggctcgcctccaagaccttttaccaggggcttgttgactacatgatgtctggacctttggtggcacatggtctgggcgggcaagatcgttgcacaactggcccatagatcagtggcgctactaaccctgtgggtattgagcttaggaaacattcgtggcgactctgctggctacattggactgaatgacaatcat

SEQ ID NO: 45871 - DNA, 675 bp, Zea mays
  unsure (1)..(675): unsure at all n locations
  Clone ID: MRT4577_141842C.1
agaaggcgtnttcgtactcgcctatctccgcgataaaagcttcttccatttcctaccgccgccgctgcagctccaccccattccctcgacccatgagggagtgcatactcatccacatcggncaagccggtatccaggccggaaaccgcgctgggagctctactgcctcccagcatggcattcaccgccacggccccatgccccgcgaccagactcttgggggcggcgatgcacgctttccacacctttctcactgacactgccgctgccacacccctccccccccgccgcttttcgacgccctccgcccaactgtcctcgatgagccagaggaccccgcaccccaccccccctccttcccccccccaccacttcccccccccccccgccccctccccccccccccccccccccccccccccccccccccccccacccccccaccgcccccccgccccaccccgcctcccacccacctctcccacaacccccctcccccacccaccacccccccccccccccccccccacccattcccccccacctctccccccctccccctcgcctcgcagccccacccgccacccgcccccttcccccccccctcctacccccccccccccccccactaccccgcaccatacacccccacccaatccccacacccccaccccc

SEQ ID NO: 45872 - DNA, 1367 bp, Zea mays
  Clone ID: MRT4577_141843C.1
tgttccactctgtaatatatctggcaaatggcatgaattaaaatatgcagttaataagattctgaagatccgcatgagatcctacaaggactcatctctttgaattataaatatgcaacatataaatctcgtaccgaataacacattcctgacgaatgaactctctcctatgtagagagaatatctcctagatgagattatagttccttgatgggacttttcctgaagaaataaagtctgtgttaaacatcaaagtttgataatccctataaagggataaagacccatatagacccgaaaaggaataagatgaggtaccaaaggacttgaagttcaccgaataagcacatgtgcattccatgagttttactcatggtaatttccactagatgtggaattatggtatcctctaaagccctgatggcagaaacctataaggtttaggtgttactggcaaaatatccccattgtgccagaatgacagactataacgatgtatctcatcgatgaaaaatccctgatggattacgatctttgatttacttttgttacaccatcatagatgttgcaatggatgaacgcctggagcgatgtgtcataattagaatatgtactattgcaactatattatcccctaagtcctattgaaggacatgttatttgctttgcacaactatgtataaattgtggtgtgagatagaaaatgatagcaccccaacctcatccattctcgttattccagatgaacaatgagacatataacttgaagaatatgcttgagttataagggataacgactttgacagatgtcatcgtcagggggagcgaatgcttatattgatcacaatcgtgagacaataaatgtcatattctatgccctgaaggcgtgagcttgatgatcaatatgtgaacctttatggaactttctatcaaatatatagatccaatcgatcgaacaccattagtcaaagtggcttatttatattgatacgtgcacttgcctcgtatatcctagaagtgagtagaggtaaagttcctgaaatagtccttgcaaggatatgcactccgtttgctaaatctttatgtacatatacttccagaagaagatgttttgccttattgatacaattttgcaaggatcagagggagcacatttctaaagttagcccttgtagaagattcgatagaatctagatcccagaggattgaaatttgtcccgatgacagctgttgtactctttttcccttggtgagttttcttgaagtttctcacatgagagttttaacgaggcaacaaagtacaaatgcaatttgcgtcaccatgtactctttctccatattttttccactgggtttttgggagtttt

SEQ ID NO: 45873 - DNA, 341 bp, Zea mays
  Clone ID: MRT4577_141844C.1
ctttcgtgttcacgggagcttgagccgccaccgtcggggaggtcatgacagcggaggctggtatcttctattgcaagaatgctgacgcggcggcggcctgcactgcagggcactgagtgacgtaatccatactggcctcttagagtccactgagagacgttactccagcgccgtgaacagaccaaaaagccggccgacgctgaagaggggatgagggccattgcatattagatagtgtacataactcgcttacagagtgctcatggatggttttggtatttcctcctgtttacttggggatgctgtgaattcgttttcttaagaattataatgaggagagt

SEQ ID NO: 45874 - DNA, 370 bp, Zea mays
  Clone ID: MRT4577_141845C.1
ctcgagccgaatcggctcgagctcacagcgagttctcaggtgaaatctccgcgcccgcgaagtcaggctctatcgcgtgggccacccaggaccgcgtcagtcccttcccctccgctgtaaccgaagccaaagctgccgccgggtcgtccgcatggtggttgtggctagcttccccgccgatatttgctctaacaaccgagctccgccttcggcttctccctgctccttatgtaccggcctcgcggctttcccttcccctcatctatgaaccccggaccactatcaaagcagagaggtgaggtcgagagggatttacagaaccgagagattgaggacgaatgccgccaccgtcaagggatcaccggaccac

SEQ ID NO: 45875 - DNA, 399 bp, Zea mays
  unsure (1)..(399): unsure at all n locations
  Clone ID: MRT4577_141846C.1
ccggccgggaattgataacgaggaggnagttgcaaaagccaaaattcatcaccgccgcgacgacgacgacgatggcagcctcgctccaagccgcggccaccctgatgcagccggccaagatcggcggccgggcccctttgcctcgctgccgtcccgcccgtcgtcgcaactcgcctgcagggcgttcggcgtccacgacggcgccagcaggatcacgtgctccgtgaaggacgtttccaacaagagctccgactccgcgaagctcgccatctacgagctcgaaacctagggggtcctcgtctaggacgagagcaccgacgtcttgtacaagagggtgacctacgacgagatatagatgaacatcggagtggatgtgaacgatcaaggccatgccgatgt

SEQ ID NO: 45876 - DNA, 429 bp, Zea mays
  Clone ID: MRT4577_141847C.1
agcatcaaaaggctagtaatatgttttattttagagagcggactgctacatacaggggttggtttagaaagatactggcttaaattgtcaaatcccaatttcaaaattgcgaccctgaagcacgaacagacacatttcatccttgaacgctcaaattctgaccatccatgactcataggtgggataatctaccaaccacaaccgatcatgcgggaacccatgtatattactctgaaaccctgtgatgaatctattatgtataacgacacgctctcgccttatctgcttgacccagctattattgtcgaaatataggccttcctttggctattcacactgaggcaggaggtaaacatcaacctgtccggacgtattgcacaaagcccatgtgaatgccggctgatgatttcactatatttgctttgacca

SEQ ID NO: 45877 - DNA, 342 bp, Zea mays
  Clone ID: MRT4577_141848C.1
cgggcaggaaggggtatttttattgaattttttggggggggggggggggagaaacacccctgcaacctttaaaggggggggaccagtcctttggaccgtggaaaacgagggggcagcgggggggttaaaaaaaaggcagtacaaagggcggaaaaactcaaaaccccgggggcggcggggggacaaggggcaaaaaaaaaaacgggtgtgataaaaaccgccaatgtaacttatgtggactgcggggttggacgtaatgacaaaaagggggctccctttttgacatctgagtacactagttgtggggggaaacaaaatggggggaggaaaaaaaaaggggtt

SEQ ID NO: 45878 - DNA, 621 bp, Zea mays
  Clone ID: MRT4577_141849C.1
gaggcccggccgggaaaacggggaggctcccctccccaagatcagaccttcgatccgttgctcctccacggcgccagccgccagcgcctccgttcctcaacgcctgtttgtccttgcatggccggagccagacgtcgcaccttgcctccaccctcgcattccgatcacccgcttccagctcctctccgtctcgctgctcctcctccgctcgcagagctgagctgatcgatggaccacgagcagcggcgccagcggcagcagcacagtcccagaggcaatgctcctgggagcgggaggtgcggctcctcgtcgaggaagcacaagggcgggggcaagaaacccatcaaagtggtgtacatctccaaccccgtgcgcgtcaagactagcgccgctggtttccgcgccctcgtccaagagctcaccggccgcgacgctgacccctccaagtacagccccgaggacctcgccggcgccgccgtggcggcgggcgaccctgactgcggcgccgcccaggggctcagccccggggacacgacggctgcgtcgtccgataccatcgtcgccatccccagccctgccgcggtggaccacctgcacgagcacgacgcctcgcccgcggcc

SEQ ID NO: 45879 - DNA, 774 bp, Zea mays
  Clone ID: MRT4577_14184C.1
acctagctcttccttgccctcttggcctctcccttcctcgtgctccccgggcggcggcgcgcagcacctgttcgacggaacgccgctccggggcgggaagcttggaccatggcgagcggggaggaccgcataagcgccctcccggaggacatcctccaccaggtgctccgcctcctgccggctcatgaggtggtgcggacgtgcttgctcgcccggcgctggcgcggcgtctggaggtctgtgcccaccctctgcttcaccggggccaaggggtggggcagcgccgacaggttcgcccaattcgtggaccacttgctccacctcaggtgcgggggagacggcgcgcctctggattcctgcgattttgatttcgatttcgacggattcatgctgttgcccgctaacgagcggcatgcgagcatctggctctggaaggccctgcctcgtgtccgggcgctccggctttgtatcgtcgaggagcaggaagcctcgccactatctgatatgcatctcttctcccagcacctcaccagattagagcttgttggtgtcggtgtcaacaacagcgtcgttgattttgcaggctgtccgacattggtggaactgagtatggatacttgcgacgtttttgtcagacagctgttgtctccatccttgaaacatctgcggattacccgcagctatacttccgagtgtgaccgcattcttatttctctaccaaatcttgtttcgctggaggtcctcgcaatgccggaaaggaaagaatccatttct

SEQ ID NO: 45880 - DNA, 569 bp, Zea mays
  Clone ID: MRT4577_141850C.1
gacgacgacccatcacatatggatatcgtaagcagatgctccgcgaacgcaacgcgaccgctgcgctttcgtggggcgttctcgcgctgcctgcccccgtcctggttccgtgccggaactgaagcagcactgaactacgatgcagctacgaagatgaaacaagcatctgcgagagctgtgccgaagatgcaggatggatacaggtaccctgcaaccaccctgccaccgggacacccgggggagactcggtgccctcatgcagccgacgtcgacctgaggtaggacagagcccagatgcagctaaactgcatgtgcatgacatgggaaagataccgcctatgaacacacatacgaaacccatacttaatatacggatcatatactaaccgtatcctcatggcatgatagaggcgtatcacacgcgctacacactcactagctactacgcgcctgccagtcacactgcggtactattgtataaccatgctacctctctattatatacctactcacaccagagacgcacataaggatcaaatagaaatctcgttgatccatcgcgcatcaaa

SEQ ID NO: 45881 - DNA, 3513 bp, Zea mays
  unsure (1)..(3513): unsure at all n locations
  Clone ID: MRT4577_141851C.1
gataagaggtcgagatgctgcttttttgggcccagatgataatcaatatgctattctggaggaagatagaactggtctgaatctctttagtctcaaagctgtagctacaaaggaagctcttgaaaataatgctgctgtgcttgaagaaaacacttttgctgataatgctgctagtgctacctcaacggaacgtcaaggtcctctacagtttacttttgaatcagagggatataggctgtctgcagacaacgggctatccattacaacaaaaactgatgggaaggagtttattaacctgaacgccaatgagatcgtgctgcaggcccactggcaaacaaccctaagaggccccgcgaggggaatattgacaaatcagagggtgctaattgcttctgctgatcttgatatactatcaagcagctcaacaaagtttgatcgtggtctcccatcatatcggtcaatgttgtgggttggaccagcacttatcttctcaagcgcaactgcaataagtatgcttgggtgggacaacaaagtccgatcaatcctctccactagcttccctcgctcagtattacttggtgcattgaatgaccgcctactgcttgtaaatccgacggatataaacccaagacagaaaaagggagtggaaataagggcctgtttagttgggcttcttgaacctcttctcattggatttgctaccatgcagcaacacttcgagcaaaaacttgatctttcagaagtcctgtaccaaataacctcgaggtttgatagtttacggatcactccaaggtcattggacatattaactaaaggacctcctgtttgtggagaccttgctgtatcattatctcaagcaggacctcagtttacccaaatcatgcgctgcaattatgcaatcaaagctctccggttctctactgcgctgtcaattttgaaagatgagttcctgcgctccagagattatcctcaatgccctcccacttctcatctgttccagcgtttccgagaattgggatatgcatgtataaagtatggtcagtttgacagtgcaaaagaaacttttgaggttattacagatcacgagagcatgctggatctatttatttgtcacctgaacccaagtgcattgcgacgccttgcacaaaagttagaggaatctgctacagattctgagctgaggcgataccttgagagaatattaagagttcgttcgactggatggacacagggtgtattcgccaattttgctgctgaaagtatggttcctaaaggccctgaatgggcaggaggaaactgggagatcaaaacacctaccaacattaagaatatacctcagtgggagcttgcaggagaagtcatgccttatatgaagacaactgatgctggtatcccatctgttgttgcagatcatattggtgtgtacctgggtgtgatgaaaggaaggggtaatgttgtggaagtaagtgaaaagagtttggttaaagctatagctgcagctagcagtgagaacacacagccggtgtcttctgcatcagcagagaaaagtaaggcaattcctcgtggtgattcggttggtgatactttggcaaggcaactgggagtccagattgcatcttctgatgaacaggcaaaagctgccgaggacttcaagaagactttatatggtgttgttgatgatggaagtagtgatgaagacgagtcaacctcaaagactaaaaagatacatataaggatacgtgataaaccggctgcacctactgtagatgtcaacaaattgaaagaagccactaaacagctaggcttgggtcctccgctgagtaggacaaggtcattatcagggacacctcaagacttcaatcaggctcctacacaaccaggaggtccagccgcagctgtttccccagcaatgccaaattctgcgattgatttatttggaacaaatactttagtgcagccgcaagcaccctctagttccacaggtcctgttattgcaggcatgggagtgacggctgggccgatccctgaggacttcttccagaacactattccatcgcatcaacttgcggctcaactacctcctcctggaatagtcctgtcacggatggctcaacccgctcctggcattgaacaaggccgaccagtacctaatcaaatgatggctaatgttggtcttccagatggtggggtgccaccacaagcaccaccgcagcagtcccagtttcctccgcagcagtcccagtttcctcagcaaccaggcattcctatggattctattggcctgcctgatggtggtgtccccccacagagtcagccacttccttcacaaggccagtttcttccttcacaggcacagggctttcaacttggtattcctgctccatcacaaccaattgatctcagcgctctcgagggtcctggagcggcgaagcaagctgctcgccctccagcacctactgctgtgcggcctggccaggtaccacgcggggcccctgctgcagaatgctacaagatggctcttgctcatcttgagcagaatcagcttaccgatgcactatcttgtttggacgaagcattcttagcccttgcaaaggaccagtcacgtgaagccgacatcaaagcgcaggccaccatttgtgctcagtacaagatcgcagttgctctgctgcaggaaattgctcgtctgcaaagggttcaaggagctggtgctctcagtgcgaaggaggaaatggccaggctatctcggcaccttgcttccctgcccatccaggccaagcacaggatcaactgcatcaggaccgccatcaagcggaacatggaggtccagaactacgcctacgccaagcagatgctggacctcctctactccaaggcgcccccgacgaagcaggacgagctcaagagcctgatcgacatgtgcgtccagaggggcctgacgaacaaatccatcgacccgttcgaggacccctcgcagttctgctccgtgaccctcagccggctgtcgaccatcggccacgacgtgtgcgacctctgcggcgccaagttctcggcgctctccgcacccggttgcgtcatctgtggcatggggagcatcaagagatccgacgccctcgctggtgggcctggacccgtgccgtcacctttcggctgaaggtcgagtctgctcctttcgtcctccatcggtcctgatattgtatctatagtgttcagtttgcgttcattacattcgattcgttgcagcttgtattgtatgtagcctttttgacgtgtagcacgcttggtgttgagagccatgtacacctgtactgttgggttggttgtgattatgcacgcgttttttttggagctagcaatgtaaggtgcatgtgcatatctgagacgcgagcgtcgacgtgaaacgttctagtctccagagttggtaaatacagttattgcagaaacttgcatctatctgtgaataacagtgatagagagtctaatggatccatcgnatgggtttatctctcttatnat

SEQ ID NO: 45882 - DNA, 413 bp, Zea mays
  unsure (1)..(413): unsure at all n locations
  Clone ID: MRT4577_141852C.1
nagcaggggtaacaacgcagagtacgcgggtgatttatttacaccaaaaaaaaaaaaaaaaaaaaaaaaaaaaaaaaaaaaaaaaaaaaaaaaaaaaaaaaaaaaaaaaaaaaaaaaaaaaaaaaatttaaaaaaaaaaaaaaaaaaaaaaaaaggtccttggggtggtacccctggttaagggggaattccaacaaaatgggggccggtttttggggatcccggtttgggccccaggttgggggaatgctgggcataagtgttttccgggggagaatggttttcggtgccattttccccccaaattattgcccggaatttattgggtaaaagctgggggggcttagtggggggccaaatcctatataatggggtggccttcctgccggttttttctntgggaaacctgtcgg

SEQ ID NO: 45883 - DNA, 180 bp, Zea mays
  Clone ID: MRT4577_141853C.1
gcgtcgggagaaccagcatcttaataagagccagtctatatactaataaaactctcgccgagggcatccgagcgaacaagccaagcgaccccgtgctcaatgcaatatcgtcgtcgacgtaccaccaccaccttatgatcgagatggagatgaagaggatcctcttcgccgttctcgtcg

SEQ ID NO: 45884 - DNA, 271 bp, Zea mays
  Clone ID: MRT4577_141854C.1
ctttcaggcatagagacagccagagagacagagaactctactaccaattacttctgttaatgatttagaagcactgtcatttcctcttaagctagcatctgactcattatcattaggaactgctggatccgttaatttattcatcagtgtgtattgcgcactgctgtgctgtgctaggtactcaggaagcaaggataaagacacagccccatcttaaagacgctcagacccatatactattacaagaagtaggtagatggtcatggcagta

SEQ ID NO: 45885 - DNA, 698 bp, Zea mays
  Clone ID: MRT4577_141855C.1
gggtctatttacttccttttccatctcctaaatttatattctgaatttttggtttgaaatttgcacacacacaatttgaaatgctcaagcaaataaaactccagcatgagatgcaaggtaaattttatttatttattggtcacatgactattttaatattcttaaatgattataaaagaaaggtgccctaataattttgaaaggtaaataaacctaaattattatcataaatttatttatttatttgtttttttcttataccaaattttgggcattacaccgtcttagcccaggcgtggaccgtctgaacgtacgaagaggaggagccgctcctgcgttaggtcgtggaccgttcggtcctgtggtgcggaccgtccgtgtcaccgctagatggttcatcttaaggtgtttggtgtccatatcggtgccaacaatttataaatacctttcaaaattgagcgtgtaaatattgaaaattgtgtcttattgttagcagacacacatgtctatcaccggaagattaaaattaggccttggcgtcgacgggtactactaaaaaataacatcactaaatcaagaaaatgcaagcgcactcatggcaattagagaatttaaattcggatggataagttgcaccatatgatatctaattagctgaggtacaattaattcataagttcatggttcctatgaatata

SEQ ID NO: 45886 - DNA, 387 bp, Zea mays
  Clone ID: MRT4577_141856C.1
ccgggctcgctgattttgcagatcaccaggagatgtttgagagggaaattggtcgtcttagaacattgttccagtagcatgtaccgcagcaacagactcctacccatagccgtagtaatagcggagacctggattcacaatttgcaaacatgtctctaaaacacaacgatcccagttcagggcttgacgctgtctctggcctttgcatttaaggttcatttgttctagcttttggatccctaagcttcacagaatatgttgtccctttatgccactctgtggttgttagtagcatcatgagaggaggagcggtgaacgggggatctcatcccatggtgaatacaactggaaaggttaataactgtggatctgattattagttcttcc

SEQ ID NO: 45887 - DNA, 259 bp, Zea mays
  Clone ID: MRT4577_141857C.1
cggctcgagggtaattggagttcttgccagagcatggagatgataaatttgggggagaatctgatctctggtgggattcctaaggggctggtggaatgtgagaatttgaagttcctgaatttgagcatgaacaagtttacaggttcagttgattcttcgctgccagtaccttgcatggacgtatttgatgtcagtggaaatcagctgtctggctcgttgccagtatttatgtcaaaaaagaattgtctttcatcccagg

SEQ ID NO: 45888 - DNA, 167 bp, Zea mays
  Clone ID: MRT4577_141858C.1
cccacgcgtccacacacgcgtcctgtcgtggtcaccctgatgcaaccagacaagagcgacggtctaacacactttgcgtcgctgccaaaccgcccatcgtagcaactcgcctgcacggcattcggcgtcgaagccggctccgtcaagatcaaatactccctgcaaga

SEQ ID NO: 45889 - DNA, 478 bp, Zea mays
  unsure (1)..(478): unsure at all n locations
  Clone ID: MRT4577_141859C.1
tctcagacacctagacnnactacctatcgtgacgtccgagagatccgcgggacggcgggtgctgggcctnnactctaagatcccccgccggcgnnngtcgtggcggcttccttccccgcgtcccgcccttccgagggccccgcgggccgggcgtcatggcctgtatctgnngggtggcngccgcaggcagcacagagggagccgcccccaaaatcgtattttcgtgccctttctcaaagaggtnntcgcggaccgcctaggtcggacccactnnngccgcgnnnccttcctnncttcctgcccggccccgccgcaccttctccgccaagcgccgtaccctacttacctanncctgcataccctgtatnntctgtagnntagtatgaaaaaggggtaaaaggccggcgtacctgctttatagtantnnctctgcaagaatgggttcggaaggagggagtacccaccaactcgaaagagg

SEQ ID NO: 45890 - DNA, 254 bp, Zea mays
  Clone ID: MRT4577_14185C.1
atttggctcgaggtgttctgatcaccgaatatgttacccagtttctgctggactatcggacagggcaggctttgtaagagatgggcatgaagatagtatacaacaaggccaggatcttctgcaagaactgtacttaggcggtcaatgccactgctgctaacacgttgtgtaaggccgatgccaaagtgctttgcaagtatgactgatcattggatgatgccaatcacgatggatgtctagatcgagtatctcct

SEQ ID NO: 45891 - DNA, 308 bp, Zea mays
  Clone ID: MRT4577_141860C.1
tcctctacagcgagagcgctcgccctttttttttttttttgttggtaaaagggggggtgggaccaacatggcaagagcattaacaaattttcagatcattggcaactaccgaccctttatcagctatctacctattggtcatcatcagctctcatatgctctcaaggacttcttagcagtatccataatcagctctctgtgaacaagtttatcatgaacttcttcgaatggcctgcagaagaactcagtctgtgtctcttcaatcttattcttcgtagccatcttcaatggctgcagagacatatttt

SEQ ID NO: 45892 - DNA, 508 bp, Zea mays
  unsure (1)..(508): unsure at all n locations
  Clone ID: MRT4577_141861C.1
catttaggcaggtttttattttcgcctttaggatttgtcaagttaaaacaataggtttatagctttacttagtaataacacgttggttgatttcgagtagataaacgcgaattcttgcgttggcaaaaatgtgtgtcgtattctcgttgacgaacgctaacaaataaacaaaacccgatacaattgcagccaaaactgagaatattccctccccctcttcctcaaaactacgtcactgaaacgtccgttaagattgcagcagcttctaattcctcctgttaaatctattgccgccgcctccccctgccgccaccaccacctctgcctcttccgccaccaccgaagccgcccccacggccaccaccagagaatctcccgccacctccacggccaaatcttcctccccccgagttgcctcttgactgctgctgctgcttctcttgcaagggtggcaattgctgccctcgagtcattgtcacccgggaggcatncnccgaagcttgcccgg

SEQ ID NO: 45893 - DNA, 158 bp, Zea mays
  Clone ID: MRT4577_141862C.1
agaaatacagatggaggtcgagggccgctttttttcttttttttttctaaactcagctaacatatagattagctcaaaaacttcacaaattacagaataattcgtgcagagggtagttttttgtacttgagctcggagatggaacaggactatatatg

SEQ ID NO: 45894 - DNA, 597 bp, Zea mays
  Clone ID: MRT4577_141863C.1
ctcgcatggtggcttcctgacaacacatctcatcggtcaggctccggacaggttcgccgtggcagctgctcggaaccctgtctgcaacctgtcgctgatggccggcaccaccgacatcccggactggtgttacgtagtggcctgcggaacccaagcgaagcgatacgcctctgaagcgccttcgccccaccatcttcgtctcttctaccagagatcgccgatcgcccatgtctctaaagtcaaagcgccccttcttatgcttcttggcggagctgaccttcgagtgcctgcttctaatggcctacagtacgcaaggagcctgatagaaagaggaggcgatgtcaaaatcatgatgttcccagaggacatacacgaaatcaatttaccgcggtccgatttcgaaagcttcctcaacattggggtatggttcaagaaacatctgaatgcagtggcatgaagcagatccggcttggtggttcatctaggcgaccatgtacagcattgctactttaagtttgtcaagaattcaaacttttttgtgaaaaaataaatgctcattcatactggtttcataaaaaaaaaaaaaaaaaagcggcc

SEQ ID NO: 45895 - DNA, 118 bp, Zea mays
  Clone ID: MRT4577_141864C.1
tcggcggccatcgcttttccgtcccaacaaccacccgttattccgccgcccctgcaaggtgggttaatcaaaacctcttatttggcaacaagctcctgccgattcaatcaacctccaa

SEQ ID NO: 45896 - DNA, 556 bp, Zea mays
  Clone ID: MRT4577_141865C.1
ccgtgttcgtcacagcctgcacatagactgcccagggagccctcgacgaagagagccacagacctgaacagcgcgctgtaactggacagcttggtgctagagatccgatgagcgctcaacttcgctgcttcaaaccatccaacaggctgtcacgccacagcgtcatgtgactcgataacacacagtgactgcctggcgcactaacgcgtcgcacttcttcgctacggaccgttgtaatggcacgctactccactgactacaacgcgtcgttgtttgcgaccgcaactgagacggcacgctctctcacaatctacagacgggacactcgctgcgcgtcgatggagcatcaggcactctcggcactggagatccctgtacgacctacagctgccagggcacgagtcacgtccaatgaatcacgctcactggccatgggtgccgactccttagcagagaccactatcagtccttgcagatcaggatacctgccaagggcaccggatgggcttgaggagatccactgcaactggactgacacggaacatgagagataatg

SEQ ID NO: 45897 - DNA, 233 bp, Zea mays
  Clone ID: MRT4577_141866C.1
ccttgcaaggtcaatctcacctgcaaccatgggtaaaggggagggccacatcaacattgggggtattggccacggtgactctggcaagtagaccaccacagggcacctgagctacaagcttggaggcattaacaagcgtccgatcgagaggattatgaaagaaactactgaaatgaacaagcgggacttcaagttcgcaaggaagctaaagaaggttaaggctgagcttgaga

SEQ ID NO: 45898 - DNA, 1905 bp, Zea mays
  unsure (1)..(1905): unsure at all n locations
  Clone ID: MRT4577_141867C.1
cctcatccggtaccctctagcgcaccagcgccatcgtcgtcgtctgagtcctccgcagcaccacgcccattttctgatggcacctccagagccattacatgtttcgatccgggtcactgcgcggtaggcccggctggtgatgtggggctcggttcggttcttcgtcgcgttgctttcttcctttcctccccttcccctcccacgtacgccggtcgccggcacgcgctcgtgacgcgcaagtcgcaggtcgcagcaaccgtaacgcgccgcgagcccgcatggcggcctgactcggcgccacgcgtttgctcctccggccaccatcctggctccttccttgtcgccgtttcctcggctatatagccgccagcctgggggaaggagaacggccaaaccagcacccgccgccgacagggaacatcgccggccgagatcggctgcacatctgtgctgcttcagggcgccggagttcgcgtcgtcgttcggtaacttgcggggtcaatgggaggagggaaagacaagcatgacgagagcgacaaggggctcttctcgaacatgatgcacggcgttgccggtggtcatgggtacccccaccagggataccctccgcagggctacccaccgcaaccaggagcatacccgcctcccccaggggcgtatcctcctcctccagggacccggcgcatacccaccacaatatgggtaccctcagccgggtggctacccacctcaaggtggatatcctcctgcaggctaccccggctcatctcaccagggttatgggagcagccacgccgggggccacatggggacgggggcaatgctagctggaggtgccgccgccgccgctgccgcttacggagcacacaagctttctcatggccatagcggacacggtggacatgggccctttggaggccatggtcgtggtcgtgcggtggttatggccgtggtcgtggccaccacggcaagttcaagcatggcaagcacggacacggcatgttcggcggcaagttcaagaagtggaagtgatgtgtttgatcgtagctagcggtggtaatggatcacgatttaaatgttttttcacaatatgttagagtccgtaaataattttagtttaaaaatgaataaaaatatagctcgatcctaatcagatttgatccttaaattttatagtgtaaaatttatggcacattaccatccctaatggtagctgaattcaggcttctaggacatgtgttgccaggaatgccttttcagtatctatgtctgcagtaatctagattgtggcaagtgacatattgctaataagtgacataaataaccatttgctggtatgctgtatatgttggtctcgtggatggagcgctttaaagattatattctgtgtgttggaatgatatggttgtactgtatcctgaccatgctggcactgaatggtttctgttgccagtaaatcattgttcgtgcaagttattatcaaaaaaaaaaaaaaaaaaaaaagcaggtaattaattaatctggggctgtatttttttttccttcttgtttcgttccgtttattttattcagctggttttgatcttttgctggatctgaagatgtcgatgctggcttataatgcagcacaggtgcaacacaagtatgcttgctggatggaggattcataccagctgatgctgatgtagtgtttcactggtgtcatgcatgcatgtatcgtgctattataatcaaaaagaaaaaagaaataacagtcagggatggtttgtttgtgcccatgtgatcttgtacactcctacttaaattatggctgctgcacggtgctgcgagccaccaaagaggacgaaaaccccacaccccacaccatgnactgacggaaatattacttagtattaagggccccta

SEQ ID NO: 45899 - DNA, 1236 bp, Zea mays
  Clone ID: MRT4577_141868C.1
cagtcgcatgcgctcgcgacgcgcaagtcgcagcaaccgtgactccccccgggcccgcatggcagcgggcatggtgcgtggaggtcaaagcctatccacgcgccggccccgcgaatagcacccccgggcccgcatggcagcctgactcggcgccacgcgtttgcccctcccggctcccatcttggctccttccttctcgtcgtctcctcggctatatatccgccagccggggggaaggggaacggccaaaccagcacccgccgccgacagggaacatcgccggccgagatcggctgcacatctgtgctgcttcagggcgccggagttcgcgtcgtcgttcggtaacttgcggggtcaatgggaggagggaaagacaagcatgacgagagcgacaaggggctcttctcgaacatgatgcacggcgttgccggtggtcatgggtacccccaccagggataccctccgcagggctacccaccgcaaccaggagcatacccgcctcccccaggggcgtatcctcctcctccaggggcatatcctcctccacctggggcatacccaccacaatatgggtaccctcagccaggtggctacccacctcaaggtggatatcctcctgcaggctaccccggctcatctcaccagggttatgggagcagccacggcgggggccacgggggccacatggggacgggggcaatgctagcgggaggtgctgccgcggccgctgccgcttatggagcacacaagctttctcatggccatagcggacacggtggacatggggcctttggaggctatggtcacggtggttacggccacgggtatggtggccacggcaagttcaagcatggtcacggccaccacggcaagttcaagcacgggcacggcaagttcaagcatggcaagcacgggcacggcatgtttggcggcggcaagttcaagaagtggaagtgatgtgccctccatggttgatcgtagctgaactcaggcttccaggacatgtgttgcctgtaataccttttcagcgttactcatccttcatctgtatttccagtaatccagcttgtggcgagtgacataatgctaataagtgacataaataaccatttgctgatatgctgtatatgttggtcttgtggatggagcgctctgaagattatatccattgccagtaataaatcgtggctttatctgaaaaaaaaaaaaaaaaaaaaaggcccctaggacctcgcg

SEQ ID NO: 45900 - DNA, 271 bp, Zea mays
  Clone ID: MRT4577_141869C.1
gcgtttcgcacccgagctcttctggcgcatggcactggctgcctgggcaccactccgcacgggacacctgtcaccacatcgctgcgtcactgccatttggttggttgttcctctcgatcagcagtggccaccaggcagcagctatcccaatctcgctagaggaagagaggcgggggcgaggcctacggcttcccttcccatagggctcccggaatggcgctccgccttccacgtacgacgcgctctgcctctccccacctagtcgtcgacc

SEQ ID NO: 45901 - DNA, 854 bp, Zea mays
  unsure (1)..(854): unsure at all n locations
  Clone ID: MRT4577_14186C.1
ctcgaggccggccggggccgatcgagccagggcccagggccgagcaacctggtgctccgcccctcgccgttacagcggcgcctcggcctccggttccacagcgtctgcctgcctgcgcggccctgtgaccgtgaggcgacacgacgccgagagatcacccgccccccgcatcgtgtccgccccgcttgggattgtgaggtaaagcgtgatggcagcgccgccggcgagggctcgagccgactacgactacctaatcaaactgctcctcatcggagacagcggtcagttcattggaggacctatcagcccctctatctcctctctcgatctacgtgagatttgatggcgtcgggggctcggggtcatgctctgtattttgcgtaatttggagtctcgactgggatctggttccaaaatcgatttctgttgatgtttgcaaaatgtgaatcggtgaatgaatcttaaatatctaaccacttgagggcacttgtttgtcgtttaacatattcttggagtgatcgtgttcctacctgcaccgtgcaatatacagtcaacaactcaatattgttacactttgaaaataggtgcttagatttatttttgggtgtaattagtttcgttaccgttcactcagaatttaggcaacctttttgggatgttcattccccaagcactgtgagagctttctttttaattcttagcaatttcacacgcagctagtaagcgcagtgggagcatagatctttgcatttcccttactntctctggctttatttgtttntttgccagtgggtgtatctatctatggtttaggctggttgggtcagtaggcgcatctctctatggtctggact

SEQ ID NO: 45902 - DNA, 1414 bp, Zea mays
  Clone ID: MRT4577_141870C.1
gcccgggcagaactctacactaagtcgtagttatggcgttccagagctacctcaccaagagcggcgtcatgtcgtcgtccccgaccagcacgctggtctcgcccccgaggtcgccgccgtcggagtccccgccaatgtcgccggacgccgccgccgcgcggcgcgtggccgggtgtcggcggctcgcccgtcaacgaggtcctcgcctcgctgcgccagctccgcctcagcggcggcggcggcggcggctcgccgaggtcggcgccttccggcgggtcgttcttggcaggcggctacccgttcgggtccccgaagtcgccggccggtctgtacagtctcccgtccacaccaccaaccaggccgtgcccggtgatggtgaccaccgcctccggcgccaccatcatgaccgtggaacgcctcaacctcgggctcctcgtggatgaggagccggtcatggagcgggttgagtccgggagagccctccgcgagaaggtgttcgaacggctcagcaaagaaaccgccgtgcccaacgacaccgctgcctccgtcaacgtagagggagcggctccggacgtcggctgggtctccgacctcatcaactgagggaaagttctgaaactaccagcatcagccgtgcctcctctgaacggtgcttatccatggtaagtgcgtgagggaagcttattagaggcgtcactgcacagcagcaggagaggaaagtagttcgtgggaaaaacaaaaaaaaaaaaatatttttctagatttgtactaagatgatccttgtacatattttcctccatgtgtgaatattcccggatggctgttggagggaggggaggcagggaaaggttgatttgttgtggggtttcagatgatggcatgccagtggggaggtagaagggatggccagtaaaacacaaaaggatcaaaggagacatggtatgcgaccagaccatgcatgaggtgtctagatgtacatagcgtctgtgtagtgtacctgtgtgttgtgtgtgtgtggaggtagagcgtggagaggcgaccatgtcggcgatccaagactggaagtaaagatgactggatttttttctatggccgcactgcaccggcggcggctcccggtgacgtttccggcaagaaggcctggagcggttccagaacaacatcatcgtctcgactctcgagtacttgtcattccaccgttcattctgttatttattatctggtattactgctctgtaattttctcaatgtatttccttattgatctcgtctgctctagctaggggccgggagcatctatgtaccttgcactactatgtgctactgtttctgctgataaggaaataattaagaccggccttgttaattaaaaaaaaaaaaaaaaaaaaactcgagactagttccccgccgactt

SEQ ID NO: 45903 - DNA, 299 bp, Zea mays
  Clone ID: MRT4577_141871C.1
ggggcggactaacgatttatttatccattcaaccccaacaaaatttgttcctttttaccggcacttgggataattaactaaaaaacaccccccccccgcggggtaattgtgtccataaccccaatgggatacacaaacatgcccccgcaaagaaaaacacgttgaaaatcccctttttttttaactccgtccctttttttttttccctttggtcccccaaaaactaagcgtttgaagcaccttaaccccaggtttttcttccatttttacccaaacacaggcgtccaaaccttggattc

SEQ ID NO: 45904 - DNA, 395 bp, Zea mays
  Clone ID: MRT4577_141872C.1
gaagagcacgtcgacgagttttcacattatatcgtgaggtccatgtccatgcaagagccgacgagcgccgacacccagcttcgcgccgcggtggaagcggaatagtcgctctcgtgactgcagatcgccttcacggcggacgcggtgatcgtggcgcggggcgtcgggctgaccgtcacgaggtacaagcggagatacgtgggactgaggctgcctccggggccgcccgagaggcgcgtcgtcgataaactcttccaggcggcggctctgcggcaaagtcgtcgtccactacatgcggcgagagtcggcaagggagtaaggttcttttgttgttcctccgccgccgggagtgaaagcctctgggtgatcagcagcgccaagctcgcgcaggagag

SEQ ID NO: 45905 - DNA, 289 bp, Zea mays
  Clone ID: MRT4577_141873C.1
aggacccccaaaacaactcccaatttaatttccccggttcccgccagaaaagccacccaggtttttattttaaaaacatggaattatttttttataccaaaaggccccccgttaaggggggattattgaccggaccaatactgggggatagaatatgcaacaagaaaagttttggcttttccacaagggttttccattcgttacaaaaatttgcaaccggggccccggaaacaacctggtggaacggctccaaccgtaacaatcattatggatgaaggggaaacctttt

SEQ ID NO: 45906 - DNA, 136 bp, Zea mays
  Clone ID: MRT4577_141874C.1
aaaaagcatcagctaacgatggctggagcccaggcactgctaatagcacttgcgggtgccgtagatgacctggacgggcggccagcgattgtaggcgatggagacggcgaggtggcggatatctggatgatgactt

SEQ ID NO: 45907 - DNA, 299 bp, Zea mays
  Clone ID: MRT4577_141875C.1
cgggccgccaccgccatcagggaggctgagggctagctgagcaagcggtggggacgccgctgccttcctctttgcctggctcgccgccctcatagacacgctcctcatctacggatcctaccctccccgctcttgcaagcattcactcggccggtcgcctgctgaccctccttcgccacaggctcgtagcggaggcagcagcgaggtgtccgatttgggcacgtgaggcccgcgatccccggcggtggacgccaggcagggcatgaagacccccaacgcacaggaagccgaagggcaac

SEQ ID NO: 45908 - DNA, 653 bp, Zea mays
  Clone ID: MRT4577_141876C.1
attcgttatcataaatattattaattttagtcaaacttcgtatgtttaattaaatcaacatgaaagttgaatgacttataaacaacccatccttcgtagtaagttctattaaatcagggttgttaataagcgtgtacatacgtggcaacaaattaaatgagagattactgattacatatatcctgtatgctccatgcgctgccgacgacaccgcctttcctgaacaaagtagagcacaccgccacgacgacgatggcggatgtatacgtggcagtaaatgagaggccgtgccccatgtgctgccgaccccgcctttcttgactggaccgactgaatgacaaagtagagaaccccgccacgacgaagatggcggccgtacgtacgtcattcaggccgtggctgccacggacccaagcaccgccagcagtacgaagacccagcacgcggcaccctccttcctcccgccaccctcagaagtgtcgagcctgtccaccgtcaggttccagtcacgtacgccgacgagaacgtcttggatggcgctagcgaagaagccgaccatggctgtctcggtggtgcgacgtccagcgagcccgaagcgcgcgtcgaggagggcggcggccggcctcggctcccccgcggcggcgacgtacacg

SEQ ID NO: 45909 - DNA, 807 bp, Zea mays
  Clone ID: MRT4577_141877C.1
tacctcgaggccggccgggatgctcggtacatcacggtgctggacagtcgcagcgtttccaggggaatcgcgcgaaatggagctctcaccggcggggaggtggactgacctccccgaggacatcgccctagccgtcgcctcccgcctccaggaggctgatgtgtgctcgctcggcggctgctcgcgcacctggcgcagagcctgcgacgccgactgcatctgggagcgcctctttcgctgccgctggccagctgccgtggcggaggcgtcggcgtcgtcgtcccgtatgcaggtacataaagaggggtaaagttgagtgcttgctgactgctgactgctgctgctgtagccaatttccgatcttgtggtcatcctagttcaatttgaccgaaattcgagcttcttggcacatgtctccgagtcttcttttgttaatgtattgtcctgccttttaggctgttatttatgctaattggtaattgctaccgaggaaattttgcataacctttacctgatgtcgatttttatatgatttatttcttgtaccatcagaaaattgttgttcattgcaatacagatacttcttgattctttttactgaaaagatgatgctcacccagcgatcttaacacaatggacaatagatgatcgctaaatgtaatctgacctttgcaatgtcctagtggattgtccaaaatgcaaaacctagaatcattatatggaacaatatcctgactgctctgttatcctcgcgctttattcttcacttcacccagtgacctgatccctcccctcgatgcccctgat

SEQ ID NO: 45910 - DNA, 561 bp, Zea mays
  Clone ID: MRT4577_141878C.1
ggccgcgggttttttttttttttttttgtagtaagttctattaaatcagggttgttaataagcgtgtacatacgtggcaacaaattaaatgagatattactggttacatatatcctgtatcctccatgcgctgccgacgacaccgcctttcctgaacaaagtagagcacagcacaccgccacgacgacgatggcggctagctgtataggtggcagtaaatgagaggccgtgccccatgtgctgccgaccccgcctttcttgactggagtagagaacaccgccacgacgatgatggcattcaggccgtggctgccacggacccaagcaccgccagcagtacgaagacccagcacgcggcaccctccttcctcccgccaccctcagaagtgtcgagcctgtccaccgtcaggttccagtcacgtacgccgacgagaacgtcttggatggcgctagcgaagaagccgaccatggctgtctcggtggtgcgacgtccagcgagcccgaggcgcgcgtcgaggagagcggcggccggcctcgagggtcccaatcgcccataggagt

SEQ ID NO: 45911 - DNA, 530 bp, Zea mays
  unsure (1)..(530): unsure at all n locations
  Clone ID: MRT4577_141879C.1
gcgggggggggggggggaaaaaaaaaaaatttttgtttttttttttttttttttttttttttttttttttttttttttttttttttttttttttnttttttttnaaccaagtaaaaagggacccaaagcaaggccaaaaatccaacaaggggggcagaagggggagcaaaaaaccgccnaaaaacaaaagaaccatggccggggaaaaaaaaaaaaaaaaggaaaaaaggaaaaaaaaaaccaaccaagcaaaggggacacggggaccccaagcaaaacccaaccacaaaaaccacccaggggaccagctacaaacccacccaaaagcgaactaactaactaacccggggggggcggcccgggggccccggcaaaaccctgcccgggggcctgtaggcaaaaaaaccaacccaccgcgtctgcttgaaggtgccaaaacccaaaacccggggaaaggcgccccggaaaaaaataaaggccccctgcaactccttgaacaaccggggggggtctttgcaaccaaacagggc

SEQ ID NO: 45912 - DNA, 433 bp, Zea mays
  Clone ID: MRT4577_14187C.1
ctttctcattttagccgccgccatggtgatttccaccggtcatggcggctccgatccgagctcctccggcatgggcgggcgcgggttcctccccggcggcgcggcccttgcagcggcatctcctggtgggcacggcctgccccggcgacgcggtagcagccgtcccggcccctgcctggctccccggcgacccacagcgtgcggccccggcggcttgggtgcggctccggcggctcgcggcgcggccggcacggacccccggcgttgggcgcgtgggcacgtgccccctcggcctagcgcggcgacccggccacggcccacagcgcacggtgcggcgctgtcgcctggccatggcgcacgacgcgggcggtagggcaccggcggttgtgccccgggcaggggcgcgggctcggcgtgggtccggcccctgtgt

SEQ ID NO: 45913 - DNA, 461 bp, Zea mays
  Clone ID: MRT4577_141880C.1
ggccgcttttttttttttttttttctttttttttttttttttttttttcatactgtttctgttatgatttttgacgcttgatcacaatacataccataaaccactttgcatctcctaatacatagatactgctcaaactgggaatctccatgaaactaaaaatgaaatattgagccattttgacagtgggggggcttacttatccaaacttgtgttacaccttcaacacaggatctgaaccctaactaacatgatcactactaaattaagggggcgattatcagcaatgaccatgccctaaagctaaaaggatcgccaaaaatgaactgtttagctacaactgaaccccttgacctcagcctcaaaccttgcaagaggtatggacattgggcaaatctcattctcttgacctggctagacatccttttccaactttctccacttggatcgaaaggctcatg

SEQ ID NO: 45914 - DNA, 502 bp, Zea mays
  Clone ID: MRT4577_141881C.1
acacagacatggaagccatgtaccggcctcttgcatggctgttctgtcaaccaggcgctgctctacacaggacctgtacgtggcgcttgacctagggcatgcaccgaaggcgcacaccctagaccgtccggatcccggacctctgcatggtgcgcactttcatcgtcgacgaggccttgttggaggcccgagctcggcacgagaccgtcaagcaccattaaaatcgaacccccaccgcctgctttcccgggactagctgcgactctcgcattgtgaccatgcgactgatttagacctccccttgaaggagcggctatacctggacgctctgccgccaggtgacgcgctgtaaaggtcaagatcttagcgcacgacatcatcaacctcaagccactcatagacaagaaagtttgagccatacgatgcagaacgatcatgctctccggggctgctagcttcggttccaactcaatacacgtatccgttgccaacccaaggagga

SEQ ID NO: 45915 - DNA, 244 bp, Zea mays
  unsure (1)..(244): unsure at all n locations
  Clone ID: MRT4577_141882C.1
ataaattgaccgaagcaggggcagcagagggagcgattgatgcgganaagccgccggagccaaccgnnggaagaggggaaaaaaaaggcagaggagcgaaaacaccgaagaagaaaaggaagcagacagaggaagaaccggcaccggaaagaaagcaacaaccagaaaaggcaccagaggcnacaggggaagaaacacaacagagccgaagaggacnnagggagagaaaagaacgacaacacaa

SEQ ID NO: 45916 - DNA, 704 bp, Zea mays
  unsure (1)..(704): unsure at all n locations
  Clone ID: MRT4577_141883C.1
ctacattcacctgtccagactttgcttatgctgttaacaggtttgtcttaaattgcatgatccgggaaaacccttggctgccctcaaacgcatcctacgatacatcaggggcactttgcatctggggctgtttcttcgaccaacttctcaaactgagttgatcgtttactgtgatgtcgatcgggcgggctgtccggatacccgcagatccacatctggctatgctgccttcttcggtgacaacctggtctcctggtcttccaagcgccagaacacagtctctcgctccagtgctaaagtcgaataccgtgttgttgctaatgccgttgctgaggcaacctggcttcgacagctcttgactgaattgcatgctcctcttccgaagacgaccttggtatactgtgacaacatcagttctgtctacatgtcctccaaccccgttcagcatcagcgcactaaacatgtggagatcgacattcacttcgttcgggaacatgttgctcttggcaatgtccgtgtcctacatgtaccgacaacttcacagtatgctgatgtcttcactaaaggcctgtcgtcttcggtattcactgattntcggtccagcctcaatgttcgctcaacggacgtatcgactgcgaggggatgttagacaacaatattcattgccttgtatataggttgtgatgccctggcttccttatgca

SEQ ID NO: 45917 - DNA, 494 bp, Zea mays
  Clone ID: MRT4577_141884C.1
tttttttttttttttttttttttttttttttttttttttttttttttttttttttttttttttttttttttttttttttttttttaaaaattcaaaacccaacagagggggcatcgccagggttgttattgcccccatcgttattcaacacattattacccttaaaaaaaattggtctgattgaacccacggaaaaaaaaacatccccaagggtgccattgcaacacaaaactacattttcctgacggggggcgcccccattcataattacaaaatttttttttccatggaaaaaaaaaaactcatggtggatattcagcatttatttcaacatatttggagctaaaaaaaaaaccccatgcctttccatttccccccccacccccaactgaaaaaaaaaggtttactggaccaggggcatttccagcatttttgaaaaacttgttagcggccaaacttgaaaaggggaggggttgcccatttttcattagggg

SEQ ID NO: 45918 - DNA, 922 bp, Zea mays
  unsure (1)..(922): unsure at all n locations
  Clone ID: MRT4577_141885C.1
cgcctgcaggtcccgttccggatttccggggggcgccaccacgcgcgcccacgcgtccggttcgggcggcacaaactcctcgagccggctccccgagcgcctcctgtcctgtcacgcggcgtcctcggctcgccgctcaccccaccctctcctccggtccggccacttctcaccgcctcttgccggacgcccaaaaaaatcgaagccgaaggagccgctcccatggccgctgccctctgcccgcgcctgcgcggcttcatggcctcctctcgcccgctcctggccttgcgccccgtagcgctgcgcctacccatgcgccgcgccgtcccggccatgcccctcgccgcccgcgcacgccgcggcttaggttcctccaccgccaccgcccagctcgacgaagacttcgccacggcttctgacctccggttcgaatcgccactcgaggtagtcaaataccccgatcccgtcctgcgcgcgcgcaacaaacgcatcaacacgttcgatgacaacctccgcgccctggccgatganatgttcgacgttatgtacaagaccgatggcattggtctctcagcaccacaagttggagtcaatgtgcagcttatggtattcaatcctgctggggggaagggggaagganaaaggaaaattgttcttgtcaacccagtgatatacaagtccgcgaaacgattgcttgtggtttgaagaagggtgcttatcgtttcctggaataatgggcaatgtggtgagaccagaaagtgtgaaaattgaagctcaagatgttacaggggcaaagatcaaagtaaaattatctggtatacatgcaagagttttccagncatggagttgatcattttgctgggggattcttttctttgataaaaggacaattgatgttcttggaaccgtacgtgaggaactg

SEQ ID NO: 45919 - DNA, 247 bp, Zea mays
  Clone ID: MRT4577_141886C.1
gttgagccatacaacagtgtactgtccacccactccctcctcgagcacactgatgtggctatactgctggacaatgaggccatctacaacatttgccgccgatcccttgacattgagcgcccaacctacaccaaccttaacaggcttgtgctccacgatatctcatcccttactgccttcctgaggctcgatggagctctgaacgagtatggtaacgacttccaaaccaacctgataccctacccga

SEQ ID NO: 45920 - DNA, 650 bp, Zea mays
  unsure (1)..(650): unsure at all n locations
  Clone ID: MRT4577_141887C.1
gggaccccgcatcccaaccccgcgagttcagtttagttccactccagctccaatcgaagncgtgaccagagcgagagccagctagttagagggncgtgaaaatgccgatnaataggatcgacctggggagccaccaggaggtggaccanncgggcgccctaaaggcggcgctcgctgagctcatctccaccctcatcttcgccttcgccgcccagggctccggcatgcccttcacccaagctgcccggcgccgccccgaccccccccgccgccactgacccccccgccgctggcgcccgcgccccgcgctgaccgtgccgcagcccgcgcccgcgcaacatcaccgacgcccacgcgaacacccacgagcacctacgccgacccccccggacgcccccccaaccccctgccccccccccctccctgcactgccccgccccaccctgcccgctcctccccccgccgccccgccttccctgcctcacctatcccccacccccccccccaagcccaccctccccccccccccccatgcccccccctccccacccccccccccccccctgcccccctcccccaccactcaccccccccccccccccacccccacccccccaccaccccccacgccccccccccccccccaaccc

SEQ ID NO: 45921 - DNA, 318 bp, Zea mays
  Clone ID: MRT4577_141888C.1
atcgaccttacaggtcccatcgttaaagttttcctaacattgaaagtttataatgctcgtgcaaactcttaagcatcacgagttcttctcaccttcacgcccacaaagtttcaacatctctctattgtcaaagccacaagaaccaaagctaaacccaagaataaagcattcctacccctcttggtccaaaccttttaactcaccaacacctctcccaactcccctcgcctctactcttgtctacttaacacttctcttaaacccgtctaatcaaccactttaaaagtgctattcattctcacttactttttaaaaccc

SEQ ID NO: 45922 - DNA, 238 bp, Zea mays
  unsure (1)..(238): unsure at all n locations
  Clone ID: MRT4577_141889C.1
ggcgacagccctccgcctcggaagcaagctttgcaaaggcaagcccgcgagggggcggggcnncgncnccagnccaagcaagcgaagagcaccccncgagaacnctccctccccgcgccgccanggacgcagnngacnncggagncgacccgcnccgggagnncgccaaggacagcanccgccncgncaagcgcngccacaagcgcggcgcgggaggagnncaccaaggncgccgcgc

SEQ ID NO: 45923 - DNA, 1286 bp, Zea mays
  Clone ID: MRT4577_14188C.1
accgtttccttgcagctcgcgaatctgcggcccccgttccccgacccgacacggcacaccactcgctccagtccgccttcatccaacggttcccctcctatttgccctcggaatcccgcccgcgaaccctagccggcctccgcgagatggacgacgactgggagctcctcctcgcgtcccccaaggcggcggcggccgagccgtacgccggaggcggggaggacgacgccggcgccatcaagcacgactacttcgacctcggctccgacgccaagtacccccggagggcgtcgctgtcgacgggggacgaggaggagggcgcggaggaggggcttctcagggcgtcggacaacgcgagctgggtggagccggaccctgacgaccttctcttccccggccgcgaccgcgcggcgctatggtcggactcgtcctccgacggggagaggcccgaggtcgaggccaccgatcccgtggggcgggccagggaggagggcggggtcacggcggcggctgacgcgggcgagggggccgtggcgaagggaggaaaaaaaaaaaaaaaaaaaaaacctccccatcccgtcccgtggtggccgctgccgctggacgtgctgcgggtgtgggcgctgcgcgcggccaggagcgtctggtcggtgccgctcgccgtcgcgctgctcgggttcgccgtgctcgggcgccggctgtaccggatgcgccgccagagcaaggccgtcgcgcgcgtccgcctcgtcctcgacgagaagaaggtctcccaattcaagggccaaggatcacgtctgaatgaatccatgacggtggcgcggcgaactcctatcataaaacctatgcttcctgccaacggagtgactccatggcctgtgctgggacacctgtgagatgacgtgatcgagctagtagtacaagtacaactgccccagcccacgttgccacaggcggggcatattatgcgatgcccagcagcagatgtactactggctgcttgtaatttggaactacacacttgtggaagaccttgtaagtttaggacctgatctagtttatgccccttctgtgtatacccatgcttatatttttatttcctgaatccttatgtcatcgatcttgtgtgctggagttgtaaatgattggatactcagtacccatggtactatggtagtgtgatgtatatgactattacccataaatcaatgcacgagtggaagcttgattatgttctgggcaaaaaaaaaaaaaaaaaaaaaaaaaaaaaaaaaaaaaaaaggggcggc

SEQ ID NO: 45924 - DNA, 267 bp, Zea mays
  Clone ID: MRT4577_141890C.1
ctatgtgacgatcaatgtggtgaccatgatccaaatcgaactgaacatgctactagaggtaaaggtgggcaacttcctttttctgtccttcacagggtaataatcaatgaaaacaagaagaccccggaacaagtttgtgggacgtcaagcagttctgacaccccagtgcttaaatggatggtatgctgtgaatacttcacacaacccagagagtgtgaagctgcaataccgctacttggcaaacgatgatcgattcaatcacccttc

SEQ ID NO: 45925 - DNA, 150 bp, Zea mays
  Clone ID: MRT4577_141891C.1
tcgattcccgggtattacaaatgggcaattggtgatgagctgcgaggagctagctttgcagatcgcagtgttgcttgggcggcgcatttcgggcggagacaccacactgctacactgaggcctgagccatggccactgacaccaaagcgg

SEQ ID NO: 45926 - DNA, 278 bp, Zea mays
  Clone ID: MRT4577_141892C.1
ggatgagaacaccgaaccatggacgttatgattcacggctcaacagaaccatgtacatcacgcagggtgcttagctgcctctgataccggagaggggcatccacatgatgttgaagggcaccctacttatctgctgaagacaaaacatggaactgaagagggacaagactgccttgaggcgagggagctgtcacatagacctgccacatatgggattggactgtaacgacatctgcagcttagtggcccatatgatactgctctgatggctgttcaaa

SEQ ID NO: 45927 - DNA, 394 bp, Zea mays
  Clone ID: MRT4577_141893C.1
acagtctcgttctcttttccaaaaaaaaaaacagatgcttttctaattctgggtcccacgcctacccgactcctacccgtttgatgacggcatcatcctattcctacaaaacaaggggggggcccccccatgtgggggggaaggaaaaacactggggggtttcgaaaacactggccttggaagaggcaaccttcttggggagcaaaagctgcccgatgttaggcataacacctccgttaagcgagggaggcaccgcgccaacagttaagaagagctcctgggtccacccccacagcatgctggatggggcgcggcacaatgcaggtctaattgatgaccctcgcagcgttcccggcaaggtcgaaaaccaaaaacgcgagggacctgcccgggc

SEQ ID NO: 45928 - DNA, 492 bp, Zea mays
  unsure (1)..(492): unsure at all n locations
  Clone ID: MRT4577_141894C.1
tccggngnaatctccaaatttaaactcgcacaggtgagaatgacaccttttggggtagaagcaaatgatatcctcgtgactggaggttgggcctgttgggctctcctctgtactcttaggttgcgtttggttgcaatgacggaatgggacgggatgagacgattacttagataaggttgtttggttcagggtcaagggttgggacatgaccatcccagtgtcgtcctcaacagtccgtcagaattggatggatgagaggggacgactgaggacgcacctgtcccctgttgtcctagctgtcccgcaaccaaacacacccttactcgcataggtgacatgcagtgctcacccgctcatgcttgcattgtccgagaaaaacagatgtggacatttattcatttgcttcttgaatgcaaaatatagttgtatttcctgtaaccattataccgacttgtcaatctctcatgctatgcatgtctatgcaaaaggatg

SEQ ID NO: 45929 - DNA, 290 bp, Zea mays
  unsure (1)..(290): unsure at all n locations
  Clone ID: MRT4577_141895C.1
tcgtannagctcggagattcggcttcgaggggatgtaataggatgaatagaataaccatgtgtgcattgcatgaagacttcaagagtttctaccatgagtaaaaaaactcgacctgcccagcccccgggcattttaataagaagaagaccttctcacgcaggtcgagaaaaccctcgaacccctgtcccacccatacacagcggcatcgaagagtttctaccatgagtagcaagctgaactttgtaaaacgttgagtacttgagtgattgctggttaatgatcactaaaa

SEQ ID NO: 45930 - DNA, 616 bp, Zea mays
  Clone ID: MRT4577_141896C.1
tggtcgagcgccgccgccgcaagcgcctcaacgaccgcctccatgctacggtacgtcgtgcccaagatcagcaaggtgagattgagaatgacaaaaaaataaaaacctctcctttttccttggctcttgtgtctcgtcggcatttgcaaagaacaaacaaagaagcaattcgctctatatctatatatggcagctgtatatctatatatggcagctgggctgatgagatgtgaaatatatgtggtggtttcggtgtgggaggaccgcgtgcctttcagcagcatgatccaggagatgaagggaaagatcggcgccatctcgtcgcgcggcgtgctacggttccggccgggggggcacgccggggtcgggcgagcgccggcagccgagccggacgaggcgtcgcgggagggctgctgggcgcagttgcctttcgagcttctgcgtatggtgctggtcagggtcgaggaccaggagtcacggtggccggcccgcagcgccatcgtggcgtgcgcctgcgtctgccgctgctggagggccaccgtcaagattgtgcgcgtgccggaggcttctgggaaactcaccttccccatctctcaagcagccttggccaagggat

SEQ ID NO: 45931 - DNA, 177 bp, Zea mays
  Clone ID: MRT4577_141897C.1
cggggaaggtggagaggctgcgcaaggaatgccccaacgcggagtgcggccctggcgtgttcatggcggcgcacgccgacaggcacgcctgcggcaggtgcggcctcacctacgtcgtcgtcgagaaccatatgtttttcttatgaatgcttggctttttaaaaaaatattttttat

SEQ ID NO: 45932 - DNA, 802 bp, Zea mays
  Clone ID: MRT4577_141898C.1
ttcagtatggttgcttttatcaccttggtgatgtctttgatagtgtataactttttctagttaattttctcgcttacttaaggcgtcctggggatgaaagtgatggggaatctatggatactagcagtgagagcagcattgagaatgatgttgagcggctaagagtctcatcattactagaaggacacatcgattggaaaatggtggcatacgaagtgatgatggtaaaggtgatgcatcttcaagctttccaatatttgagtatatggagagggatcctccatatggtagagagcctctgacagacaaggcatcaactcttgcacatagatttccagctctgaagacgttcaaacgctgtgatctgctgccatcgagctggatgtctgttgcatggtatgtttctatcgtagttatcttttgttcactcgatttttacttgcattttctcaatggtaaggccgtgatgaaatatgattttgtattgctggactcaccatgatgtatgatatgtcttgtgctattgctctagttctgaggccaatgctgtattctagcttccacttgaaaataaaatgtgttgaataattttttaaggccaatgttttcttgtgttttagctgttgcctatgagctgcttgatgttttcagaagatacctccattaagttgattgccttaatgctaacatctagtttcattgccttaatgctatgcttcttctttttctgtataccccattttgatttgtagaaactggaacgatgctgtcgcgatggtcagagttatgacatttgccaact

SEQ ID NO: 45933 - DNA, 2403 bp, Zea mays
  Clone ID: MRT4577_141899C.1
cctcgagggcctggcccggggaccgcacccaacaagaaccaccaccacaccagatattatgcatgtgctcgcccttcctcttccttctggggcgatataggttattgcgcgttttgcagcaccccctccctggttttgctctttgctctgcatcagtttcctgaccagcacagccttggattggatcgatcggagctctcatcagctgttaggtggccacttgtcctatcagcagaaccacagccaaagccagatagatagtcctcatcttcgtcttcggcctcctcaccccttgaggaaaccatcatccgggagaaaccaccaagagcaagagcaagagcagaagctcaacttcttcctccctcagcgtttctcaagaacaataaggtgttgaagtaactacaagatccggtggcaggccacggcaccatgagcaatcttaagcttggtgttgaagttaccagcgctcatgatctcctcccgaaagagcaggacacggccaatccttttgttgaggtcgacttcgacggccagaaattccggacagccgtcaaagatagggaccttaaccctgtctggaacgagctgttctacttcaacatatctgatccatcccgcctcccagagctacaccttgaggcctacgtgtaccatacagaccgccccagtaattccaagtcctgcctgggcaaggttcgcatatcgggcacatccttcgtcagccagcctgatgctacggccctgcactacccgctggagaagcgcacgatcttatcacgtgcgcgcggtgagcttgggcttagagtcttcctcacagatgatccatcagtacgagtgtctgctgctccagctcaccaggagttcgatatgctaagcacgcctaccactgcgcaggagcagcaggcagcagccaactccatctcaaatcctttccaagagaccagagcaaacccagtgaggcagttccagcacttaggaagagaacagcagcgtcctgcacagccacagccatactacgctgaaggttcatacggagaccagcagcagcaacagagaagcttttctgcggttgcgaacaaagctgcagcccctcagcctcaggttcaggtgtcaaggatgtatgctccaggtccacagcagcctgtagacttccagctcaaggaaacaagcccaacgcttggcggcggccgtgtcattggcggccgggtgtaccctggccagaaggctggggcgtacgaccttgtcgagaagatgcagtacctcttcgtgcgcgtggtcaaggcacgcgacctgcccaacatggacatcactggaagccttgacccttacgtggaggtgcaccttggaaactacaagatgaagacaaagcactttgagaagaaccagaggcctgagtgggacgaggttttcgcgttccccaaggaagtcatgcagtcgacgatgcttcaagtcgttgtgaaggacaaggatgtccttcgggacgactatgtcggccgagtgagcattgatctgaatgaggtccctctcagggtccctccggacagcccactggcaccggagtggtaccgtctgatgggcaaggacggcgtgagggacagaggggagctgatgcttgcagtctggtacggtactcaggcagatgaatgcttcccaagcgccatccatgcaggatcgacaccggttgattcccatcttcacagctacatccgcgggaaggtgtaccccgcgccaagaatgtggtatgtgagagtcaatgtgattgagggacaggacatatacccaatggagaaccgcatacctgatgtgctggtaaaagtgaggctgggccatcaactgctgaggacaaggcaggttcgctcgccgaccagaaacttcatgtggaacgaggagctgatgttcgtcgcagcagagccgtttgaggacgacttgctcatatcagtagtagaccgtgtggcacaagacaaagacgaggtgattggtgaggctatcataccgctcgcgaggcttccaaggcgggctgatcacaaaccggtactcccagcatggttcgatctaagaaggccagggatcatcgacgtgaaccagctgaaggaagacaaattctatgcgaaggtaagccttcgtgtctgccttgaaggtggttaccatgtgcttgatgagtccacacagtactgcagcgatctccgtccgacgatgaagcagctgtggaagccaccaatcggcatgcttgaagtcggcatcttaagtgcgaacggtctcaatccaacgaagaccagaaacagccgtgggtcgtgtgatgcgtactgtgttgccaagtatggttccaaatgggtccggacgcgcacgatagttgacagctttgagccctcgttcaatgagcagtacacatgggaagtctttgat

SEQ ID NO: 45934 - DNA, 710 bp, Zea mays
  Clone ID: MRT4577_14189C.1
tatttttttcccttcactgaataaacgatgtcatgcctcacggtagctgactgtctttggagatgcccttgtgctgaagccaaatcacagaaaggaaacaaaatactcctgcaattgcatctgcggttgcttcaacttataggacttcgttgtagaacgtgaacagatcgtgaatggcagagcagatgtaatatcagggtattcctagatcgacgattcagcaagtcattggttggaatgctgggaaggtctcccaattcaagggccaaggatcacgtctgaatgaatccatgacggtggcgcggcgaactcctatcataaaacctatgcttcctgccaacggagtgactccatggcctgtgctgggacacctgtgagatgtgtgtgaccagcgacgtgatagagctagtagtacaactgccccagcccatgcagagacgctcacgttgccacaggcgggggcatattatgcgatgcccagcagcagatgtactactggctgcttgtaatttggaactacacgcttgtggaagaccttgtggaagacctttgtgtatacccatgcttatatttttatttcctgaatccttatgtcatcgatcttgtgtgctggagttgtaaatgattggatattcagtacccatggtactatggtagtgttatgtatatgactattacccataaatcaatgcacgagtggaagcttgatt

SEQ ID NO: 45935 - DNA, 227 bp, Zea mays
  unsure (1)..(227): unsure at all n locations
  Clone ID: MRT4577_1418C.1
catacactctattatctgagaccaacaggcaacatagaaagcgggatccagtagcgacaatagagcaacactggcgaccaagatattccccctccttatgctactngatatatctcgatgggntgctaacgcgacactggggtctcaatgctgacaagctcctatagcttatctcgttccgctatctgtcccatttatgataggggaagcatgtcataacacctgtc

SEQ ID NO: 45936 - DNA, 298 bp, Zea mays
  Clone ID: MRT4577_141900C.1
caggtgtgcctagttggctagggattattagtaccaagccctgttatttttgactctatacactgatcatcgctcctcgcggatccttagctcccccaattgtgtgtcctctgcactggacaatctgggcagcacacatcatctctgggagtgcgccaactgcgtccggaggcctgctggatttatgctttggctggggatgggccggggctggcggacgacacgctctcgagggacctcttcacgactgcgagggctgagagctgcttggcgacggggattgttggccgcacgtcca

SEQ ID NO: 45937 - DNA, 596 bp, Zea mays
  unsure (1)..(596): unsure at all n locations
  Clone ID: MRT4577_141901C.1
cgatcggcggcagccagcaagcgggnggggaggaggtcacaacagcagctagatccggtcggcgacgaggagcgagcgggagcggacgacaggcacgtatcgcccaacctctctcaacctcacgcctccccctctcttcgtctttccctcaacaacacgcaaaaccctagctcgatccccactctcccaggggggggcgctcccaccacccgccttcgtccagatctgccttcgcgcgttcctgggtgggggcggcgatggcggtgccacggggccaacacagtcggcggctcacacaatcggagcagatggacagacacaatcggttttaaaagtatcatacaatcggttttacaaatgtctcattttctatactaaatatttttattatttttatcatactataaggcaatcagagcagatggacagacacaattgagccatgaaatagctttggagctaagtcagaggagtgctgctgctggactaaggccgattggagcagtggtcttcatgcaacggggtgtcctgaaggtttgcttgaggactactgacagtacagttaatacatcagagattgcaaaggcatatggcgg

SEQ ID NO: 45938 - DNA, 890 bp, Zea mays
  Clone ID: MRT4577_141902C.1
cccacgcgtccgcctttgtgggctgcttcagccgtgttgatgcagaggtgggaggagacgcggcgaccgaagccaagcctgtggctccagacaccgtgggctcaacagcggtggttgcgcttgtctgctcatcgcatgtcatcgttgccaactgtggcgctttccgtggaccataaaccaaacagggaagatgagtatgcaaggattgaggcccagggtggcaaggtcatcaattggaatggctatcgagtcctcggtgttctcgccatgtcccggtcaattggggacagatacctgaagccatatattatcccagtccctgaggtcacaattgtcgcccgtgcaaaagatgatgagtgcctaattattgcaagtgatggcctctgggatgtgatgtcaaacgaggaggtatgtgatgctgctcgcaagcgcatactgctgtggcacaagaagaattcagatgcctcatcgtcagcccaaagaagcggtgattcgccagatgaagcggctcaagcagctgctgagtatttatcgaagctggctctccataaggggagcaaggacaacataaccgtaattgtagtcgacctcaagtcacataggaagatcaagagcagagcataaccgtggattcggtaagacttggacagtagaaatggttgttactacactaggacgctagaaaggtggagaaaaggctcctgttcagtctgctgcacatgtacactggttggcccaacactagtctttttccacaaccatataggctgccacgtttgttcagggactcatacacagatctaatctggttagaaattgggctgacgaggtaaggtaaatctgaaatatatatataacatacatatgtagattccaaatagctattactg

SEQ ID NO: 45939 - DNA, 1858 bp, Zea mays
  Clone ID: MRT4577_141903C.1
tccggccgggcccatcgagcccgtcccgtccctctcccaccctttttaaatctgcctgcgagcccccgccacgcacccccatgcccatgcggccatgcccatgaccccccgacgcgaggccactactgccaatggctccctgccgtgaccgagcccatggaggacctcgccccgggggccctcgcgctcttcgccgccgtcgctgacttcatagacgactccgctcctgctgccgccggggccgggatgccaccgccggagcccgagtccgcgcccgggagtccctgctccgactgcagcagcgtcgccaccgccgacttcgagggcttcgccgacctcgcctccacgctcgtgctcgacgacctcgtctcccccgcctccgcctccgcctccgccagctcgctccccgcctccgggcccagggccgccaggagcgtcttcgcgctcgactgcgtgccgcgctggggactccactccgtgtgcggccgacggcccgagatggaggacgccgcccgcgtgctcccaaccttcttccacgtcccgctctggatgctcgccggcgacgcgcccgtcgacggcctcgaccgggcatccttccgcctccccgcgcacttcttcgccgtctacgacggccacggcggccttcaggtcgccaactactgccgggacagaatgcacgaggtactggccgaggggctcaccagggcagagcaggccgtgtccgacgctgacttgagtggccttgaccctagcactcacgagcactgggagaaggtctttgtgggctgcttcagccgtgttgatgcagaggtgggaggagacgcggcgaccggagccaagcctgtggctccagacacagtggggtcaacagcggtggttgcgctcgtctgctcatcgcatgtcatcgttgccaactgcggcgactcgagggcggtgctctgccggggcaagcagcccctgccgctgtccgtggaccataaaccaaacagggaagatgagtatgcgaggatcgaggcccagggtggcaaggtcatcaattggaatggctatcgagtcctcggtgttctcgccatgtcccggtcaattggggacagatacctgaagccatatattatcccagtccctgaggtcacaattgtcgcccgtgcaaaagatgatgagtgcctaattattgcaagtgatggcctctgggatgtgatgtcaaacgaggaggtatgtgatgctgctcgcaagcgcatactgctgtggcacaagaagaattcagatgcctcatcgtcagcccaaagaagcggtgattcgccagatgaagcggctcaagcagctgctgagtatttatcgaagctggctctccataaggggagcaaggacaacataaccgtaattgtagtcgacctcaagtcacataggaagatcaagagcagagcataaccgtggattcggtaagacttggacagtagaaatggttgttactacactaggacgctagaaaggtggagaaaaggctcctgttcagtctgctgcacatgtacactggttggcccaacactagtctttttccacaaccatataggctgccacgtttgttcagggactcatacacagatctaatctggttagaaattgggctgacgaagtaaggtaaaggtacaatagaaaccgccagcattaaactgtacctgtgctacttgtgttttggtatattgatgtctaggagtagcagattagcagtgcaaagaatactacgataccccaagttgtttctgcaacaaatgttatgtgcatgtatatcataaaataagaccatctgtaatatgaattcaattcttggcatccgacgttattaattcagttgattgcc

SEQ ID NO: 45940 - DNA, 902 bp, Zea mays
  Clone ID: MRT4577_141904C.1
agcggagaagcgcccaacccaacccgccgttcctcctccaaagcgccctcctgccccgcaaaatggagacctctttcctgcccaccacactccccaacacaaggcctctccccgcgctccgaacctacgccccagccgcctcgatccgttcccaacagcgccctcgtcgctccaccatacgcgcagccatcacccggggccggaaggaggagacggtgaccaccgtccgggagcaactggaggggtgctacctcctggcgggtatcaagtacgagggcctgacggtgaagcagctgcagggaatccgcgacgcgctccccgacacctgcaggctgctggtggcgaagaacacgctggtggggaaagccatcgagggtaccccttgggaggcgctcaagccgtgcatgaagggtatgaatgcctggctcttcgtccacactgaggaggtacccgccgcgctcaagccctaccgcgccttccagaaggaggagcgtgtcgaggagaccaacgacttcgtcggcgccgtctttgagggcaagttttacgggcccggcgacttcaaggcgctcgagactatgcccagccgcgcagaggtgtacgccacgctgctcggcgcgctgcagggacccgctacgtcgctcgtcgccacgctgcaggcgccagccagggatgtcgttgcggtgctctccgcgtacgtacgcaagctcgaagaggaggctggagccgcctagtggggttgtgaaatggttgtcatctccctttcactccctactttctgtttgtagaattctgtgtaccttaactggctcctaatcacatttgaattgaatcacagtttccattttacaaaaaaaaaaaaaaaaaaaaaaaaaaaccaaaaaaaaaaaaaaaaaaggcccctg

SEQ ID NO: 45941 - DNA, 465 bp, Zea mays
  unsure (1)..(465): unsure at all n locations
  Clone ID: MRT4577_141905C.1
cgggcgggcggtggcggctccatatcttcttcttgggccgccgtgtccactccgcgtgccctgggtccctgcgttgcgtcttgggggagagagagaagtgggagacccgcgagaggcggccgtgtanggactanggaccgtgnagtaagcgacggcgggggagggagagggggatggccgggatcgggccgatcaggcgggactgggagccggggggtgtgcggaaaaaggcgcccaccgcggctgccaanaaggaggagaaggccgtgaacgcggcgcgcgcggccggggcggggatcgagaccatgaagaagtgcaacgcggggatgaacaaggcggggtgcagcggggcatccctcaacaccaagcgcctcgacgacgacacagagaacctcgcccatgagcgaggtccaagtgacgctggnaaaaatctcatgcgagcgaggcgcggtaagaaggtgaccc

SEQ ID NO: 45942 - DNA, 1815 bp, Zea mays
  Clone ID: MRT4577_141906C.1
gccggccgggacctcgaactccgcttggccggcgtccgttcgtccctcccagcggagaagcgcccaacccaacccgccgttcctcctccaaagcgccctcctgccccgcaaaatggagacctccttcctgcccaccacactccccaacacaaggcctctccccgcgctccgaacctacgccccagccgcctcgatccttccccaacagcgccctcgtcgctccaccatacgcgcagccatcacccggggccggaaggaggagacggtgaccaccgtccgggagcaactggaggggtgctacctcctggcgggtatcaagtacgagggcctgacggtgaagcagctgcagggaatccgcgacgcgctccccgacacctgcaggctgctggtggcgaagaacacgctggtggggaaagccatcgagggtaccccctgggaggcgctcaagccgtgcatgaagggtatgaatgcctggctcttcgtccacactgaggaggtacccgccgcgctcaagccctaccgcgccttccagaaggaggagcgtgtcgaggagaccaacgacttcgtcggcgccgtcttcgagggcaagttttacgggcccggcgacttcaaggcgctcgagactatgcccagccgcgcagaggtgtacgccacgctgctcggcgcgctgcagggacccgctacgtccctcgtcgccacgctgcaggcgccagccagggatgttgttgcggtgctctccgcctacgtgcgcaagctcgaggaggaggctggagccgcctagtggtgttgcgaaatggttgtcatttccctctcactccctatctgctgtttgtagaattctgtgtacctttactggcacccaatcacatttgaacgctttcaaacgtctttctacttcgtgcggactccgttcgtccctcccagtcccagcgcgcaacccaacccgccgttcctccgcctcctcccgcacagcaaaatggagacctccttcctccccaccacgctccccaccgcaaagcccctcccggcattccgaacccacgctgtagccgcatcgaaacttccccaacagcgccctcgccgctgcaccatacgcgcggccatcacccgtggccgcaaggaggagacggtgaccaccgtccgggagcagctggagggctgctacctcctggctggtatcaagtacgagggcctgacggtgaagcagctgcagggaatccgcgacgcgctcccagagacctgcagactgctggtggcgaagaacactctggtggggaaagccatcgagggcaccccctgggaagcgctcaagccgtgcatgaagggtatgaatgcctggctcttcgtccacaccgaggaggtaccagccgcgctcaagccctaccgcgccttccagaaagaggagcgcgtcgaggagaccaacgacttcgtcggggccgtctttgagggcaagttttacgggcccggagacttcaaggcgctcgagactatgcccagccgcgccgaggtgtacgccacgctgctcggcgcgctgcagggacccgctacgtcgctcgtcgccacgctgcaggcgccagccagggatgtcgttgcggtgctctccgcgtacgtacgcaagctcgaagaggaggctggagccgcctagtggggttgtgaaatggttgtcatctccctttcactccctactttctgtttgtagaattctgtgtaccttaactggctcccagtcacatttgaattgaatcacactttccagtttacaaaaaaaaaaaaaaaaaagcggccctaaccgcggtggaaaaaaactaataacgg

SEQ ID NO: 45943 - DNA, 825 bp, Zea mays
  Clone ID: MRT4577_141907C.1
ccctagtcgtccgcccccgcgtccgcccgcgcgtccgcccgtccgtgttaataatgcatatttttaaaactagatgagtctgattatgcatagaagagataagacttattttatcgtggttgttagacgagacatggtggacaaatatatctgtacgtgacgcacgacacacgaagcttgagctgagctgagactcaaataagatcattaacctctccgtgctattatcgaccccaaacatcttgtttgacttggatcccgaaggaattcgtactgttatcaccaccaaacatcttgtttgacttcgctttgttgctgaagcgtccccaatcctctgggactcaaatgtgatacaattactagtctcaggaggctagtaaacacatttatacatcagatgatttcagatctgcttaaacgagacaaacctataaaggtggcgatcaactttaagagttggtccacaactcgggacatatcatcagagtggggctgaagcagctcgatatacgcagcgaagcaaatcagcggtccaacagccacaggcaaggttgggaacagtcgtaactcttactcgatctccttttttctgaaaaacaacaaataagcaagggtgagtacaaacgtactcagcagcccaccttcacccacggaatggggaaatcagatataatgcatggaatatgtggagctcaagatattttgcagaaacatcaatattttatgcagggttgttttgtaaaaaacattttgtattttgcaaagcgcatcctctcccaaaggagcaggaagtttttcaatattagaacaaaaattccctggact

SEQ ID NO: 45944 - DNA, 580 bp, Zea mays
  Clone ID: MRT4577_141908C.1
aagatcctgagcatcagtttggtgaagggtgctcgggccattttcctagagtacctcttcgtaagaacatgttcgttgaagcgtcccgatcctctgggactcaaatgtgatacaattactagtcccaggaggctagtaaacacatttatacatcagatgatttcagatctgcttaaatgagacaaacctataaaggtggcgatcaactttaagagttggtccacaacttgggaaaaatcatcagagtggggctgaagcagcccgatatacgcagcgaagcaaatcagcggtccaacagccacaggcaaggttgagaacagtcgtaactcttacccgatctccttttctgaaaaacaacaaataagcaaggatgagtacaaacgtactcagcagcccaccttcacccgcggaatggggaaatcagatataatgcatggaatatgtggagctcaggatattttgcagaaacaacaatattttatgcagggttgttttgaaaaacattttattttttttgcaaagcgcatcctctccaaaaggagcaggaagttttttagtatagaaaaaagtccacttgact

SEQ ID NO: 45945 - DNA, 981 bp, Zea mays
  unsure (1)..(981): unsure at all n locations
  Clone ID: MRT4577_141909C.1
agaaatcttgtttgtgagaaatcttaataagtcggagtctctcacgccttacacaagatgatcacaatccaaaatcagagtaagggagggagtagaacacacacaagtatattacaaaacaacaacacacatgaaagcaaatacaagagcacaataataaaacgatagagtaacagttcataaatgcgctcaaatctctctcaaatcactaaacagtgtggtcgtggagtctcggagttgtagtgtgcacttgtgatgcttgcataccaggagagggcacctaggggctccttttatagccccaagaggtctaggagtcgttgccttctccacaaggaagctagaaaacttctttgtttgtgggcttactaaagcgtcccgatcctctgggactcaaatgtgatacaattactagtcccaggaggctagtaaacacatttatacatcagatgattccaaatctgcttaaatgagacaaacctataaaggtggcgaacaactttaagagttggtccacaactcgggacatatcatcagagtggggctgaagcagccctatatacgcagcgaagcaaatcagcggtccaacagccacatgcaaggttgggaacagtcgtaactcttacctgatctcctttttctgaaaaaaagtaaataagcaagggtgagtacaaacgtactcagcagcccaccttcacccgcggaatggggaaatcagatataatgcatggaatatgtggagctcaggatattttgcagaaacagcaatattgtatgcagggttgttttgaaaaacattttgtattttgcaaagtgcatcctctccaaaaggaacaggaagtttttcagtattataataaaatcccctggactaaaccatccaggtatctcagcagtttcccactggttttccttttcaaaaacaggtactggacttcccgtccaccatagctcacggctcnaaccgccggacttttaaaa

SEQ ID NO: 45946 - DNA, 933 bp, Zea mays
  Clone ID: MRT4577_14190C.1
cgcgatctgcggcccccgttccccgacccgacacggcacaccactcgctccagtccgccttcatccaacggttcccctcctatttgccctcggaatcccgcccgcgaaccctagccggcctccgcgagatggacgaggactgggagctcctcctcgcgtcccccaggcggcgccggccgagccgtacgccggcggcggaggagacggggaggtcgacgccggcgccatcaagcacgactacttcgacctcggctccgacgccaagtacccccggagggcgtcgccgtcgaagggaagcgaggaggagtgtgcggaggaggggcctttcgcggcgtcggacaacgcgggctgggccgagccggaccccgacgaccttctcttccccggccgcgaccgcgcggcgctctggtcgcactcgtcctccgacggggagaggcccgaggtcgaggtcgaggttgaggccgccgatcaggtggaacgggccggggtcacggcggcggctgacgcgggcgagggggccgtggcgaagggaggagggccggcccagtggtggaggctgccgctggacgtgctgcgggtgtgggcgctgcgcgcggccaggagcgtctggtcggtgccgctcgccgtcgcgctgctcgggttcgccgtgctcgggcgccggctgtaccggatgcgccgccagagcaaggccgtcgcgcgcgtccgcctcgtcctcgacgagaagaaggtctcccaattcaagggccaaggatcacgtctgaatgaatccatgacggtggcgcggcgaactcctatcataaaacctatgcttcctgccaacggagtgactccatggcctgtgctgggacacctgtgagatgacgtgatcgagctagtagtacaagtacaactgccccagcccacgttgccacaggcgggcatattatgcgatgc

SEQ ID NO: 45947 - DNA, 1078 bp, Zea mays
  Clone ID: MRT4577_141910C.1
acggggcgcgttagtgtctggtaattggaatgagtacaatctaaatcccttaacgaggatccagtgggatgtccgaaactgtctcccgtctctcgcctcgcctccccgacgcgagcgagcccaacacgcaaaacggaacgcttcctcctcgcacctccgccttatccgatggcgtccctcaccaccaccacgtcctcaccggccgccctcccggcggccaccaccgccaccgcggcttcgtccatatccccccacgccggatcgaagcggccgctcctcgcgggcgacgacgcgccctggcgggccaccgcggccacctccgcggggcaggggatccgacccgtcccgcgcatcaaccacgcctccgtcctccgcgtttccacgcaggaagactccgccgcctacgccctcgccatcatgaagcatccggatccgatcggcgaggggctggctatggaggcgttcgcggaggcagccgggccggagtgcatcgtgcccggacagcaagcgcctctaaggcttatggggctcaaggtctggcccgttgatatagatatgaagttcctagagccatttggacgggaactacattcaatgaaaaaattcatggacaaatcgtgcagtgttatggactcatctatggcaaacaagtaggcacatgacacatcagttccgtccaatacagctgttgttgtatccacctgcttcctgaagttacaagacccgaaaaatagaagagacattggagagaagccacattcttttgcgtatcttgctcaccgtcacctgacgaacaaaatatgacatcgggagtgcagtaacgattagtgagtggtcctgtattgagcctgggtgcagcctctgccagtataagtgctctacgtgttatacatttttttatgtccatgaaacattgatccactgagaaaatatatcttcaggtgccaatctacgacaaaaaaaaaaagaaaagagcggcccataccatctgaaatgaaacaaaataaattttatttgttctcaggctcaggccaaaaaaaaaaaaaaaaaaaaaactcgagactagttctcctcgtgc

SEQ ID NO: 45948 - DNA, 293 bp, Zea mays
  Clone ID: MRT4577_141911C.1
cctagaggataaggcgacgcccagggaggataaggcgtcgcccagacgcctactacgcctaggcggacgcctacctcgccaaggcggacgccatacacagttttccctgggcggcgccgacgcctagctcctctcgccgcctggacgcctaggcgtcgccttggcgacgccggcgccacccctcgtgaaccatgccccgtccgacctttcatagtcatctgcttgcttactaatctttgtttgctcatcttcattactgataatcttccacataacatcgttaaacatggatc

SEQ ID NO: 45949 - DNA, 606 bp, Zea mays
  Clone ID: MRT4577_141912C.1
cggacgcgtgggcggacgcgtgggcggacgcgtgggcggacgcgtgggtgctgcagcagtgacaggtatggccgaggtagtgtcgtcctctcggtaacacgcggtgatctaggtgcctgccgcctaggtgacctttaccgctacttggaggactcacaattttgcttttccgattgtcgtgatctgggttcttactgcttgggggcagcttggaggagaccactcgccattttgcgttttcgatcatcggttactactggatcatggttcgccatcgatgctatgcacaggccacgctagagctctctgcttgttgacgtgaatatgcttctctcccttcatgtttaagcctaagcagcttgctttgcttgtgccaaagactttttgagcactagcacaacaaaccaacgcctacaacgcgcttttgtgtacaacgatcatctgcttgttgcaccatacatgtatagtctacggggctgcaaactgttagagttacgtatttctgtactaaacatcctttcgcaactgcctgtacgctatcttttagaacccttgtgaaaccttatgcagtgcgttagtgccatatgtattatattgttgtatcgt

SEQ ID NO: 45950 - DNA, 820 bp, Zea mays
  Clone ID: MRT4577_141913C.1
tgggaccctcgaggccggccggggatccatatgcccccgtcctcagcgttgctacgcaggaagactacgccgcctacgccctcgacatcatgaagcatccgaatccgataggggaggggctggccatggaggcgttcgcggaagccgccgggccggagtgcatcgtgcccggacagcaagcgcctctaaggctcatggggctcaaggtttggccccttgatatagatatgaagttcctagagccatttggacgggagttacattcaatgaaaaaattcatggacaagtcgtgcagtgttatggactcatctatggctaacaagtaggcacatgggcacatggcacatcatcagttccgtccaatacagctattgttgtatccacctgcttgctgaagttacaagacccgaaaaataggaaattagaagaaggtccatggagggaagccgcagtgttttgcatatattgcccaccttcacctgagagaagatatcgggcgcgcaataatgattagtgagcagtcctgtatgtgagcctgggtgcagcctctgccagtataagtgatctacgtgttatacattttttatgttcatgaaacattgatccactgagaaaatatatcttcaggtgccaaggggtcgatacgacaataccttctgttctgttgctagatcaattttatttgttctcaggctcaggccacatgcgatggtcaagtcagaattcttgagttagcctttgtgaggcgtgttggttcttaaaaaaaaaaaaaaaaaaaaaaaaaaaaaaaaaaaaaaaaaagggcggcggacgcgtgggt

SEQ ID NO: 45951 - DNA, 811 bp, Zea mays
  Clone ID: MRT4577_141914C.1
tcctcgcgggggacgacgcgccctggcgcgccaccgctgccaccgccgcggggcaggggatccgacccgtcccgcgcatccaccatgcccccgtcctcagcgttgctacgcaggaagactacgccgcctacgccctcgacatcatgaagcatccgaatccgataggggaggggctggccatggaggcgttcgcggaagccgccgggccggagtgcatcgtgcccggacagcaagcgcctctaaggctcatggggctcaaggtttggccccttgatatagatatgaagttcctagagccatttggacgggagttacattcaatgaaaaaattcatggacaagtcgtgcagtgttatggactcatctatggctaacaagtaggcacatggcacatcagttccgaccaatacggctattgttgtatccatctgcttgctgaagttacaagacccgaaaaataggaaattggaagaagggccatggagggaagccgcagtgttttgcatatattgcccaccttcacctgagagaagatatcgggcgcgcaataatgattagtgagcagtcctgtatggagcctgggtgcagcctctgccagtattaagtgatctacgtgttatacattttttatgttcatgaaacattgatccattgataaaatatatcgtcaggtggcaaggggtcgatttgggggaaaatatcttacgcatttaaaaaaaaaaaaaaaaaaaaaaaaaaaaaaaaaaaaaaaaaaaaaaataaaaaaaaaaaaaaaaaaaaaaaaaaaagtcctctgcgttgttaccactgct

SEQ ID NO: 45952 - DNA, 251 bp, Zea mays
  unsure (1)..(251): unsure at all n locations
  Clone ID: MRT4577_141915C.1
gaaaaaagcagggaaccaacagcggnncccagcccaagncnngnaggcagccagcaaaaaccgaccccngcggaggggaaaggcagccctataaccgaggcggggaaaggcaagccngaaactgccggagcggcagcaacggggaggaagactaaacgccctgactcacattaggcagcagggaccacacgaggcattgttgacacagtaaacgccaacgcccaaaataaaacgctagcaaggaggcaacc

SEQ ID NO: 45953 - DNA, 379 bp, Zea mays
  Clone ID: MRT4577_141916C.1
ggatgaaggtagcagcatccacagtccatactgggtagcttggcagtatacataatgttgcagacgtcaactgcttttgtttctcgtaattagaatggattttctttctgaaacatggaaagggagaaatgctgttcttaatttggtagggccattcggtaaccaaaatgtctggtttagcccaacgcagtggcattgactgtcctgttgtcttattgctgtattacttgagatgcttatgcatgctaattgtgtacctgtgcttactaagatgaagtatgtttatatacaacttagtgtttactccctccatcacgataaaaaaagcaattctgactacagtgctaagttaaaatatcttcaagttgactattttttt

SEQ ID NO: 45954 - DNA, 623 bp, Zea mays
  unsure (1)..(623): unsure at all n locations
  Clone ID: MRT4577_141917C.1
ccggccgggagtcgctagaatcaactgaaatgaccgagagatgctcctctccctctccctctgcgatccttctcctccgcgtctaagaactctgcgtgacctccctgagatgtcgtgcgaggttcacctgcaactatcacctgatgagccagatcgagggccaccacctccctgatgagcacatacctggacacgaatgtgacgatctgcctgctgagcattccgcctcccactagctgagaacgaagatgtgcgccatctcattaaggnattttcacgtggatggggacctccagccgaccggcctgctcctcgaacctactcacgacattcttcttctccgggatcctgcagcagctgtcccagttcacaacggatccggacgtctcctcgcaaatatgactgggcatagagtcgtggcatctgtctactgatcatccggttacccttgggccagatcacaattcaagggcaagacctaggactacttctagaagagcagcggatgaaactactaccttcctgcattgtgtctcgactgatcgaggatgtatgcgagttccgacttatagaatatttgctgcatagggtaggccttcctcccagcgtatttgctttggctc

SEQ ID NO: 45955 - DNA, 505 bp, Zea mays
  Clone ID: MRT4577_141918C.1
ttttttttttttttttctttggttttttttttttttttgaaactaactatatgacttgttatttattttgtgtgtacgtgtttttaatacacatatatacaacggttgtgtatgtggggtgtacctgccctaaattgtcatgaatgtacaatcacaagctactgatacactcacacaactccacgacactatgattgcgcaacacaaattacaaatcaaatcctttcccttcatctgcctccaccaacctttgccttgctctctcgcgtacgtcctccttgctgaacacagctgatagacgggtggatcgtccgtgttcgtctcctttgcatctctgccttgccgctttccggtgccgcgcgcgctgttcgagctcaaaaccacgagcgcatatttgccgcaactttatttcactttgtggcgtgccctagattaaaaaaaaaacctttgcgctaaaggatgtcggtcgtccacattgtcgtcgtggacgtcttgattgctggat

SEQ ID NO: 45956 - DNA, 471 bp, Zea mays
  Clone ID: MRT4577_141919C.1
agccgtcctttccgcgtgggcgcgcagatacttcggccagagggctgcagcggcggcgtggaccggtgccggatcccccaactcggtgctgctctcgcgctcggctccacacgccgacgtgctcgcactttcggacctacgctgcatgcgccagcggcttctgctcggagacagcaccccagccggggcggggctgacacacgcggcgccgccagcggtgctgcaggacggggcggtcactgtgctcatcaccgacggcgcctactgtatagcgcgcgtcttcgacgagctcaccgagcggcggctcatcgaaaaggttgagacttccactcactaatctgtagtctgccggcttcttgtctgaaaaaaaaaaccaaaccttcagctctgcctagctgtcttggctggatacaggcgacatatgatcctgacctcaaacatttcagtagaacggccattacctttgcttat

SEQ ID NO: 45957 - DNA, 471 bp, Zea mays
  Clone ID: MRT4577_14191C.1
cccaattcaagggccaaggatcacgtctgaatgaatccatgacggtggcgcggcgaactcctatcataaaacctatgcttcctgccaacggagtgactccatggcctgtcctgggacacctgtgagatgacgtgatagagctagtagtacaactgccccagcgacccatgcagagacgctcacgttgccacaggcgggggcatattacgcgatgcccagcagcagatgtactactggctgcttgtaatttggaactacacgcttgtggaagaccttgtaagtttaggacctgatctagtttatgccccttttgtgtatacccatgcttatatttttatttcctgaatccttatgtcatcgatcttgtgtgctggagttgtaaatgattggatactcagtacccatggtactatggtagtgtgatgtatatgactattacccataaatcaatgcacgagtggaagcttgatt

SEQ ID NO: 45958 - DNA, 404 bp, Zea mays
  Clone ID: MRT4577_141920C.1
aacaaaaactggcggtctaacaggcaaaacctgcctaccgtacatgcatgccacctgtgtcaatatgtaaccatccattgttttacgcacttaaataccagcctaacaaacaaacaaagaccataggcctgtcaagtgtagacagactaccaaaggtcacatcagtgacaagattcatggcatgcactgcccaacaagggccggctagccctcgggcacaggtggcaacgcatgagctgaaccaaacggctccaggccaggatcaggatcggacccggctgcctgccattgaaccggactccgagtgccatgcacttgtggatccaccccagggacgacgcttaccgcccgatgagtgggcagcctactacgcctggggaccatgtcgcctgagcgtaccacct

SEQ ID NO: 45959 - DNA, 191 bp, Zea mays
  Clone ID: MRT4577_141921C.1
gccacgcgtacgatccttcatcgtcatccaatgtccgccaccggcctgagcatgagcatcctacgagcgccggcgccctgcttgtctgatcccactcatgctcatggtcgcgagtgccaagccgctggcagtgcccatgcggcgccagctgctgcgcgcgcaggccagctacaacgtgaagctgatcacgc

SEQ ID NO: 45960 - DNA, 480 bp, Zea mays
  Clone ID: MRT4577_141922C.1
ttcccgggctctgatctcgggttcaccgcagcgcacagagcaccctcgactcccgtcccgatccgcgctcttctctacgacgctgcactcatggcaggaatggcacacgcggcttctcagcctgatgctaaacactatgatactacataatgcatgatctgctataccactgatgagactgagctgcactatgctaaaaccgatctattcaaccatagaggctacaacatgcactttcagcaggctacatacctagatcaccctgcattcagcaatcgccagccctatctttggtgcagtcattggtacaaaccatcaaggcacagcacctgcagcaactcgtgctacctgtgatcaaccgagtagctctggcaaacctttctcggtactatcagcaacaacaatttcttccattcaaccaactatctacactgaaccctgctgcttatttgcagtagcaactattaccattcagccagc

SEQ ID NO: 45961 - DNA, 240 bp, Zea mays
  Clone ID: MRT4577_141923C.1
cacaagtgacgaggggctggaaagaattcagattgcaccacatatccccttgagatgtcttcagacccattatccagagagaacagtgttaaaaataccagcaaccagcaacatgttttagcattggtggtaagttataaagatcagttttggtacagggtaatgctcttgtggacactattaccgaaagctttgcatggttcacggtatccacagaattaacagattgaataaaaagga

SEQ ID NO: 45962 - DNA, 258 bp, Zea mays
  Clone ID: MRT4577_141924C.1
aggacccgggggttaactttaaaagatcaaaacttacgaacgcgggcatgcaaaaaaaaaattttttaatagggccaccaaaaacaaaataaagggccggggtttaaaaacggcgtaacgggaaaaaccctggggttaccaaaataaaacgccttgaaaaaaaaccccttttcgccaggtggattaaaaaaaaaaaggccccaaccaatcgcccttacaaaaagatggccaaccttaatggtaaatgggaccccccct

SEQ ID NO: 45963 - DNA, 522 bp, Zea mays
  unsure (1)..(522): unsure at all n locations
  Clone ID: MRT4577_141925C.1
accggttacnnattntnatcttnttaanctncntatactcacccgtttncgaaaaaccaacccgacccactcntncgaanggnaaaaaaaaaaanaaaaaaaaaantttntaaaannaaaaaaangnccnnnnnnnnnnnnnnnnnnnnnnnnnnnnnnnnnnnnnnnnnnnnnnnnnnnnnnnnnnnnnnnnnnnnnnnnnnnnnnnnnnnnnnnnnnnnnnnnnnnnnnnnnnnnnnnnnnnnnnnnnnnnnnnnnnnnnnnnnnnnnnnnnnnnnnnnnnnnnnnnnnnnnnnnnnnnnnnnnnnnnnnnnnnnnnnnnnnnnnnnnnnnnnnnnnnnnnnnnnnnnnnnnnnnnnacntaaattcacccaccctgtancatnnnnattangctcatnatttacaanancnacactcacaacaaccactacacttatccagatnctcctaacntcctntcttttcnnntcanttaacattactttntctntnanaattctcacncttnacctanacnna

SEQ ID NO: 45964 - DNA, 711 bp, Zea mays
  Clone ID: MRT4577_141926C.1
aataacatagtatatagagataaatgtcataaataacataaatgtacttattacatagcggaagtcttacaaaataaatgataaatataaaacgaactaactattatttccctggagccacaaagttgactgggagacgccatctagatcaagtcgaactcctcgttatgtgcctcctcttcgaccacctgctcttcaccttcaacgagctcctgctcagcagtctccaccagctgaacccctggatcctttgtggcttgctcgtcggcggtcaagcgacgaagaagtccgaccacgagaaggtgcggcccggtggtgaagcaatctctcctgcgagcaattcagtggtggtgaggcctgcaccgtgtgtgcactcctcccggaacgatccatggcccccagacacctcacccgaggaactcgtcagggcccaagtccaagcaattttgtggagcgccacctcacccgtttgtgcttggcgcagatggtgagtttgaaggttggcttcgcgagaagggaggacggcgctattttaatgaagagcaggggtgtggcgctgggtcaaacgccacgcgcttcggggagtccgccccccatagctcctgggaatctcgacatccgttgctcgtgcgcgatttctgcagggaataaggtcctaaccggccgggcccatgcacagtggctccccggccggcctcgaggtacccaatg

SEQ ID NO: 45965 - DNA, 414 bp, Zea mays
  Clone ID: MRT4577_141927C.1
ggacctcgaggcggcgggatcgttcacagaagccgctagctcgtgggcttttccagaagatgaccagcagcgcgcaaacggaggatcgatcagcttcgtgttttttttcccctccacatcatcatttgcgccacgtacgaaaatcggctgctgcgagagagacgaccggacggcggggacgccgacatgaccaagcaaaaggcagagatcagggtgggagtaaagaaggacgagaaccgcgctaaggggatggagctggcgaccagatatcacggaacggaccagctggagggggcaggagaagacacgacatcccctgccgcgacaaatcgctgcgcaagaaggcgtgccgctccggcagcatcggcgcggcggaggaacccaaggacaaggcgaaggcggaggacgagaaga

SEQ ID NO: 45966 - DNA, 765 bp, Zea mays
  unsure (1)..(765): unsure at all n locations
  Clone ID: MRT4577_141928C.1
gggtacctcgaggccggccgcagcctttcgtgcggcctctccgactccaagtcggcggcggggcgaaagtccgaagcgcccgccgcctcaggtggccgtccccttttccccgttaagtccgagaggctggcttcgtcgaccagttcggactcggacgcgctgcccctgcttgttgaggaggctgccacctccggtgctcgcaaacgcattggcgtcatttcttctggaagctactccggagagcttgggattttctctaaccagacaagcgagatggactccgacctgctgtctgagtctcagtcggggcacaagtcactggcctcgcgctcgcagcatggccgtgggcgtcatcgtagcctgacacagaagttcgcaccaaagacgttcaaagacgttgttggccagagcttggtggtgcaggcgctgtccaacgccatcctgaggaggaagattgggttggtgtatgtattctatggtccgcacggcacgggcaagacttcgtgcgcccgtgtctttgccaaggcgctcaattgcctctcctctgagcaccccaggccctgtgactcatgcacgtcgtgcattgctcacaatctcggcaagagcaggagcctgatggagattgngccggttggcaacatcgacatggagggcattgtggacgtcctcgataatgtgatgctttcacctgcaccatcacactacaggggtgtttatatttgatgactgtgatactctgccagctgacacttggagtgctatctc

SEQ ID NO: 45967 - DNA, 236 bp, Zea mays
  unsure (1)..(236): unsure at all n locations
  Clone ID: MRT4577_141929C.1
acctgnacagaataaatcaatccctggcttcgccactgagagagaatatctcccgaaaatcatagggccaggaaaaactttccagtcaactaaagttggcgacatcatgactggagaggacaaactgatcacagtgaatcccgacaccaaagtcctgcaggcaatgcagctcatgacagaaaaccgcgtcagacacatcccggtgatcgacggcacggggatgctggggatggtct

SEQ ID NO: 45968 - DNA, 419 bp, Zea mays
  Clone ID: MRT4577_14192C.1
gagtttactagtcggcggccgccctttcttgatgtttctgttgtttaccctgaccggcccaccctattagtgcaatcgttggggacgctagagccctgcctaagcaccagcatcaaatatagcagctctgactgaaagccaaacggaccgcagaagacatctatgttgagctcatcagggatcccggcggccctgtcggggagatacctaatacttatgacgccccacaccatggcaaacaccccgggtttataaaagaatgaacacttttagacccggccaagatacgccatgggcgacgagccttaaacccttaatcctggcaacagagagacgcatatgcggggcgagaccaacagctggaaaagcaactagctagaacgcgcgcgtggtcacacacacatgcgagcacgcaatgc

SEQ ID NO: 45969 - DNA, 524 bp, Zea mays
  unsure (1)..(524): unsure at all n locations
  Clone ID: MRT4577_141930C.1
acccaacccaacccagccgcgcctctctcttgctacgactctcttcccctgctgccgttgcgtactgctgggtgtttttttcgtccgtgctctgcttcccgctgcctctctctcgcgccgtcccggggtgggaaggaaagtgcatgggaagaagaaagcaccgggccgcctgagtgagcgtcagacggacagacagtgacttcttctgcgagggtgcgagggagctagaggctgccggagagggagcgagggagaagatgaagttcatgaagctgggctccaagccggacgccttccagtccggcggcgccgacgtcagatcggtggtctctgaccttgcaacggatgttattgtgcatattggtgaagtcaaattctacttgcacaagtttccccttctgtccaagagcagcaaacttcagaagctagtccttaaggctactgagaaagggacagatgacatccacatagatgatttacccggnggagcaaaagggtttgaaatatgtgcaaaattctgctat

SEQ ID NO: 45970 - DNA, 510 bp, Zea mays
  unsure (1)..(510): unsure at all n locations
  Clone ID: MRT4577_141931C.1
gttcactggggaggaccaactagataattcatcatggctatcatactttacaagcagccaatgccgatccttatggacatatgttacaccaccaagaggcaagagcctctcgctcgctaccaatgcgcacgtcacaccggggtctccttcgccgccgccgccgcgtcgtcatccacccacttggcgtgccacagcgccgaccgcctccggggcagcatggacccgacacagctggcgagagtggcgcggaacttggcgtccccggggcggagcatggcgggcagtggcagcctgctgaccccgcgcgcggcgcaggcctcgtaacgcggcacgatgcgcgtggccagcgcgtaggagaagtactcggggaagtcgtacagctcgtcggcgcggcgggccatggcgcccaagaggtagtccgccttgggccgcatgttccccttcacgccgtagccnaagagcgcggggaaacggagcgccatggagcgggcggtgcgcgccggnaggccc

SEQ ID NO: 45971 - DNA, 158 bp, Zea mays
  Clone ID: MRT4577_141932C.1
acgcgttcgagctccaccaaattgagaatatcccatagggtatgaaaatccatgaggacccgaacagtgatggcaccctgaatatccagtacctaggaagtattagtaagggtatcctccaccgtcctattagctctttgtataggagctggaaccta

SEQ ID NO: 45972 - DNA, 400 bp, Zea mays
  Clone ID: MRT4577_141933C.1
gagctcactagtcggttgccgcccttttttttttttttttttgcagtacttataagcaccatttttttcttaagattaacttataataaagcctttttgaagggaaatcaaaggttttagcaacgtggatgattaaaactgaatgggtttcaggctcctaccaatccgcaccagaatatgaaccgtgacagaccggcctcacccaaccaaaaacaaaactgggatatcaaccacaacaggggccaaaaaaacttattggaacccgaaaattcctccctaagcttgctacactaaaccggggatttttgccagaaacggtaactttttcaattcccgtaactcaaaccctaatcagatccgggggcggcggcgacaacggaaagcttgtccgcagctgggg

SEQ ID NO: 45973 - DNA, 119 bp, Zea mays
  Clone ID: MRT4577_141934C.1
ttcacacgtacgctctcctaacataggttgggaaacatatggagatggccacctattctcaactaacggctaaaaaaaccagcgagcactatttctactttctctgaaagcgcgaggcg

SEQ ID NO: 45974 - DNA, 233 bp, Zea mays
  Clone ID: MRT4577_141935C.1
cggacttggtccgcctcctgtacgccggcatgtgcagcgaggatgacgatgacaacatggaggagcacgcggtgcatgtgctggtgctggcgcacgcgtaccatgtgccgtagctgacacgggcgtgctagaggcgccatcggcgcgcgcctgacggtggactcggtggtgtacttgctgcagatggccgcgctctgcaacgcgccgcgcctgaacctgcactactccagact

SEQ ID NO: 45975 - DNA, 315 bp, Zea mays
  Clone ID: MRT4577_141936C.1
tcccggggtcggaactgcgaccgtcgggacctgggaaacagcgcacttcgagtttcgggggcggcccccccgcctcgccggcagccacctgagcaggaatgtttaaattgcaacgacgaccaccagcagccacgggatgcaatctgccctgagttcaatgacagtggcgacccataattgtgccatatcctacaggtgtacaagatagtaccatagttttgtgcccgggacctcaacaacaatgatgaaaacgggcctagcatttgctcgcattcgtgaacattctacaggctgttcacacctggactttcagtg

SEQ ID NO: 45976 - DNA, 517 bp, Zea mays
  Clone ID: MRT4577_141937C.1
gtcccttcctcagacttacacagctctcattgctaacggcaaaggcaaagaacccactcttgaacaattccctcttcccacaccaggcaaaaatcaacttcttgtcgaaattgcctttgctcctattaacccagctgatatcctcaatatcactgaagattatcctctccctgtgaggcctcctaacccagttggtttagaaggatctggtactgtagttgctattggagaagacctgaaagtgccttatcaaattggtgatcgagtgcatgtgcgtgcacttggtacttatggacagtatgtcttagctaactctgagtcactcaagaagatacaagatggtttatcgtttgaagaggctgcttctcactttgtcaatcctgctacaatagtttctatgggagactatgccatcaagaacggccataaggcagttattcatacagcaggatcatcgactcttggacgtctgttgatcagatatctcaaacacaaaggtatcaagactatcaatatt

SEQ ID NO: 45977 - DNA, 812 bp, Zea mays
  Clone ID: MRT4577_141938C.1
aataccacagttcccctatcttaccccaaaatctgttggtcccgcatctgagccccgacgccccgcaatttttcgcgttgccattttctccccaatctgtcggctcccgcgcgtcgctgctgtttcccgcgttgttttgcccacgcactcggtttagttggcagcggagtggaaagcgacgacggtgaaagagaaagtggaggcggcggatgaaccatcgaagacagtacgctgtcaacgacggcagtgacaagcagctgatgcgggagatcctgtccttcaccggtgggatgccgcaatggcagatggccgcacccgaggaacacgacgtcgacggcggaagggagcagcgaggtgcgttcgaaggagcaggtccacaccatcgtccaattgacgtcgacgaatcagatccacttgttgcttccgtgtttccttgcaacgacgacctatctgcaacaatggagctcgcgcccaatagtacgtgattatttttctcatccttaaactaagtggatctgaagcagagttggcctccgccaccggccgcgctgtcagccagcctcattgtggaggatgtcgcgttagaggtcgacgacgggagtgtcgtgtgctgggtcaccgccgcggccttcgggagctccttctccttcgcatccgtggccacatctgtgagggcatggacccaacggtcccaacctgttccttcttcactattcagatccatcttttttccttcgccctcctcaaatcgcaccttcgtttctgtgtgtaaaacagaaaatgaatccgttggaaacaccacccaggcggca

SEQ ID NO: 45978 - DNA, 484 bp, Zea mays
  Clone ID: MRT4577_141939C.1
catttccggaacaatagaatcttcaaagacatcataataataatatttagcaatagcataaatactaagcaaagctttaatctcaagttaaacaaggaatatggttggtatttctaagtaacatatttaggcaaatcccatttaattatgcaaatattcaaaagtaaacattgttatatatattatttgggtatcaacagaaattgagagggagaatccacttgacttgctcaaatttgtcttgcgggtcgtcttcgaacgtatttgattcctataccacacaatcagcttctaatataggttcgcatatcgtacatacaaaaaaaaacttacaccaataaataaacatacaccaatcaaacaataaaacacacattatacaaattaaaaaaagagaacatccgatcatatagcttggtttgtaacttataataatataaattaaaatactgtggtgggtactctattcgcatagtacataaat

SEQ ID NO: 45979 - DNA, 330 bp, Zea mays
  unsure (1)..(330): unsure at all n locations
  Clone ID: MRT4577_14193C.1
gagggccgcttttnttttctttttttggtgttttttttttttttttttttttttttttttttttttttttttttttatttttttttttttttatatctctatataaatagtttcctttattgtacaatacatcgacttggtccagtcatatgctcaagatacttgacacttcaaccttgctggaaagcttacgatgggtcacatattgacctcagaggacctttcctggtgccacaggatactttggcggaaggcagtgagcaaggcattgaaagcctgcacatgaatcaaccatggggtcccaattgatgacctccttcgctatattga

SEQ ID NO: 45980 - DNA, 433 bp, Zea mays
  Clone ID: MRT4577_141940C.1
ctcgagtttttttttctttttttttttttttttttttttttttttttttttttttttttttttttttttttttttaaaaaacacatccaagggtccttgttaccctcttttttaagggttaaaaaggtttccctaactataattttttcttcctcaaggaagataaaacccataaaaacattttgttattgttggcttttcatgacaccccaaccctagagaccctgcccgggccctcacattgtcttctcgatgggggggctgggtttacccaaaaatgtcggatggggggccccaaacttcaaaagcctggcgggggggtctttgatcttgaaaagtttttaggggggccaccgatgctgatggcctcggcgaacctgaaaaggggccccgcggcccctttgatggccttggcaaaccctcgggccaaatt

SEQ ID NO: 45981 - DNA, 1554 bp, Zea mays
  Clone ID: MRT4577_141941C.1
tgcaactatacggctcgcgcaactccgacgtcatcgtccagatgctccagccctaaccgcgcataaaccccgcgccgccgctgccgcctcctgtcccggtcggatcctccgcgccgctcgcgccgccctcatcttcccagccccaacgcgacgcaccacaagggccctcgccatgtcgaagaaagtaggacgagcgaagaaagcagcgggcggcggcgagctgtcccgcttcctggagtcgcatctccagaccattagcgacaccttccagatgatggcggagtcggctccgggggccttggagcggacggagtggtctgaggtcgttaagctcggcgaccaggtctccaggcaggccaccgtcgctggaatgctctggagcggtgacttgcctgatgtagagaccctcaaagagaacatcgttgcttatttcaacatcctacagggatttcttttggtttgccacggaagcatggtcggtgctgggcctactctacacaagtccatctttgggtctgcaaaagacgtggttgactctagcttctcattgttcaagcatgctgtctctgcttatgaatctcgcagctctgaccgcaacacaactataccccaggtcacaggaactgtatgggaagcttgtgctgctctcaagaaggtgcctgcatcaaactgcattgccataggacgagccatgaccaggataggtgtgtgtctgaaagatgttctccgagaaatgaatgagctccctattggtggttctggtgatagtactgctgagaagtcttccaatggtgttgtcgacacaacgagttgttctgatagagatgagaggtctgatcttgatttagatgatgatgacgacgacgacgacgatgagttcactgaagaagaggttgctgttgccaagttggttattaacgtggtatctgattccttggttgtagtgaaagaggcaattcgtttcattactggtttgctcaggagctctggtaacaaagacaaagatggtgctaagaggacagagttgagccaatggagaaattgctgagccactgcaaggagatcgcagaccaggtcaatgatcttggggcttctgtatacccaccacaagactcgtctgagatggagctcgctataaaaagactgtacaatggcatcaacgggatgcgcaaggaaatagggaacctcggtggcgcacctgagagcacctttgccgcccttgaaggattcgaaaagtgccttggatctctgcgggccaggttagctgatgatgtggtgaacgagatggaaggtcttaatattagccattagcacgtactgttcagatttttccatagcagtgttatgccagtatatcttctggttttgcacgatggaaggagcttctgtggtttcagtaaatgaggcgtccggtctctgtactgatggcgttgttgcgggtcatcgattgtaaaggaagtgggcctggatttctgtaacttctctggttagtgatgccactgtttgcgggtcattcattgcgcgaataagattgtttgcattaaaaaagagctc

SEQ ID NO: 45982 - DNA, 617 bp, Zea mays
  Clone ID: MRT4577_141942C.1
gatcgtgcagagaattttctctatatattatatatatcaacgatgctgtggatcattgatgtccacgtagcttacatattttcaccattatcgtagcggtgaagcaggcaaagaaaacgaaagagagaaagctgccgtttcttctcctccaacgcaatttgatccaggaggaagaggcgagcaaagaagaatttcaaaggggaaaaaaaacttctctagctagcttggggttaaattcatgcctaactcaagagtcaaactaaataaatatcctctccacatgatcgtcgtcggtctcacgcccctttctgtcgaccggattgttttgtctccataatctgacaggcaagccgtgcttgggcacagggaacgggctgtactcgacctcgtcactggatccaacgatttgccacagacaggaggagatttggagcatgcacggagagagatcagagccggagccccatggagagcggcagcagccagccatgtgtcatcctggtccacaagctataggacaagcgggaattatggagaggatctgagaggagatggacgcacctgtagccggtgacccagtggtggatgaggacgagcatctcgagcttgccagctcg

SEQ ID NO: 45983 - DNA, 190 bp, Zea mays
  Clone ID: MRT4577_141943C.1
gtaatgaaaattaatttgctttaagcgtgcgttgcttatttaataacaaacaaattggcccgaaactggggtctgaatccatggaccttgtacttattcaattacaagcatgccgcatagcttattacaatggcagctcttattgattcattaaataaacctggtgccaattacgcatccttgacttaaa

SEQ ID NO: 45984 - DNA, 1664 bp, Zea mays
  Clone ID: MRT4577_141945C.1
gtccgcaaatagttgcaaaggccactgaccatacacacaagcatgatggatcaacaatgattgcagcattgcctgcctttgataactgaatagcagccttcatgcaattaaatattgatggtaattcctcctcttgaaatccacggacaataccaaggtcatgtgcaggatgagatcttcaagacgcaccttctgggttgcccgtgcgtgatgctggcgagcccggaggcggcgcggttcgtgctggtgacgcaggcgcacctgttcaagccgacctacccgcggagcaaggagcgcatgatcgggccgtcggctctttttttccaccagggcgactaccacctccgcctccgcaagctcgtccagggcgcgctcggccccgacgcgctgcgcgcgctcgttcctgaggtggaggccgccgtgcggtccactctcgcttcctgggacgccggccacgtcagaagcacgttccacgccatgaagacgctgtcgtttgatgtgggcatcgtgacgatcttcggcggccggctggacgagcggcgcaaggcggagctgaggaagaattactccgtcgtggagaaggggtacaactccttccccaacagcctgccggggacgctccattacaaggcgatgcaggcgcggcggcggctgcacggcgtgctgtgcgacatcatgcgggagcgtcgtggccaggcccaggcggcgggcaccggcctgctgggctgcctgatgcggtcccggggcgacgacggcgcgccgctcctgagcgacgagcagatcgccgacaacgtcatcggcgtgctgttcgcggcgcaggacacgacggccagcgcgctcacctggatcgtcaagtacctccacgaccaccccaagctgctcgaggccgtccgggcggagcaggcggcggtccgcgtgggcgcacacgaagagcatggcgctaacgcatagggtgattttggagagcttaaggatggcgagcatcatctcgttcacgttcagggaggccgtggccgacgtggagtacaaagggttccttatccccaaggggtggaaggtgatgccgctcttcaggaacatccaccacagcccggactacttccaggatccacacaagttcgacccttctagattccaggtggcgccgcgtccgagcacgttcctgccgtttgggcacggcgtgcacgcgtgccccgggaacgagctggccaagctcgagatgctcgtcctcatccaccacctggtcaccggctacaggtggcaaatcgttggatccagtgacgaggtcgagtacagcccgttccctgtgcccaagcacggcttgcctgtcagattatggagacaaaacaatccggtcgacagaaaggggcgtgagaccgacgacgatcatgtggagaggatatttatttagtttgactcttgagttaggcatgaatttaaccccaagctagctagagaagttttttttcccctttgaaattcttctttgctcgcctcttcctcctggatcaaattgcgttggaggagaagaaacggcagctttctctctttcgttttctttgcctgcttcaccgctacgataatggtgaaaatatgtaagctacgtggacatcaatgatccacagcatcgttgatatatataatatatagagaaaattctctgc

SEQ ID NO: 45985 - DNA, 765 bp, Zea mays
  unsure (1)..(765): unsure at all n locations
  Clone ID: MRT4577_141946C.1
ggccgcttttttttttttttttttatgcagagaattttctctatatattatatatatcaacgatgctgtggatcattgatgtccacgtagcttacatattttcaccattatcgtagcggtgaagcaggcaaagaaaacgaaagagagaaagctgccgtttcttctcctccaacgcaatttgatccaggaggaagaggcgagcaaagaagaatttcaaaggggaaaaaaaacttctctagctagcttggggttaaattcatgcctaactcaagagtcaaactaaataaatatcctctccacatgatcgtcgtcggtctcacgcccctttctgtcgaccggattgttttgtctccataatctgacaggcaagccgtgcttgggcacagggaacgggctgtactcgacctcgtcactggatccaacgatttgccacctgcaaatttaaaaataaagcatgcagagacgccaatcagtgtctcagtgtaagatcagtaaactgtcgttatagcagtcgatcaccacagtttatataggagggagagcacagcggggctagtgaagacgtacatttcgaggaccccacagattatggtacaggagtatatacatgatcgatacaggcatacatacagacaggaggagatttggagcatgcacggagagagatcagagccggagccccatggagagcggcagcagccagccatgtgtcatcctggtccacaagctataggacaagcggnaatatatggagaggatctgaga

SEQ ID NO: 45986 - DNA, 2229 bp, Zea mays
  unsure (1)..(2229): unsure at all n locations
  Clone ID: MRT4577_141947C.1
cattgggtacctcgaggccggccgcgaaagcgcaagccgggcaagaaaactccgcaggccagtctgcgagttggatggccttcttcttggccctcgtgtgcatcctcatcttgctagccatcgcctcctacgtccagtacactcgctggcagaaggggaaaggccgcttcggcggccatgggaggtctgctcccttgaagctgcctcctggctccatgggctggccttaccttggcgagaccctccagctttactcccaggaccccagcttcttcttcgcttccaaacagaagaggtacggcgagatcttcaagacgcaccttctgggctgcccgtgcgtgatgctggcgagcccggaggcggcgcggttcgtgctggtgacgcaggcgcacctgttcaagccgacctacccgcggagcaaggagcgcatgatcgggccgtcggctctcttcttccaccagggcgactaccacctccgcctccgcaagctcgtccagggcgcgctcggccccgacgcgctgcgcgcgctcgttcctgaggtggaggccgccgtgcggtccactctcgcttcctgggacgccggccacgtcagaagcacgttccacgccatgaagacgctgtcgtttgatgtgggcatcgtgacgatcttcggcggccggctggacgagtggcgcaggcggagctgaggaagaattactccgtcgtggagaaggggtacaactccttccccaacagcctgccggggacgctccattacaaggcgatgcaggtgagcacgcacacgcgacggcatttacacaacccatccaacgcattacacgtacggtacgtcttgggcaatggcactgcccctggcacgcacgcatgcatgtgacgaaatcgctggacaccgtaccgtacgtacaccgtaggcgcggcggcggctgcacggcgtgctgtgcgacatcatgcgggagcgtcgtggccaggcccaggcgggcaccaccggcctgctgggctgcctgatgcggtcccggggcgacgacggcgcgccgctgctgagcgacgagcagatcgccgacaacgtcatcggcgtgctgttcgcggcgcaggacacgacggccagcgcgctcacctggatcgtcaagtacctccacgaccaccccaagctcctcgaggccgtccgggcggagcaggcggcggtccgcgaggccaccggcggcgggaggcagccgctggcgtgggcgcacacgaagagcatggcgctaacgcatagggtgattttggagagcttaaggatggcgagcatcatctcgttcacgttcagggtagccgtggncgacccggggtacaagggttccttatccccaagggctggaaggtgatgccggggcttcaggtaacatccaccacagccctgactacttccaggatccacacaagttcgacccttctagattccaggtggcgccgcgtccgagcacgttcctgccgtttgggcacggcgtgcacgcgtgccccgggaacgagctggccaagctcgagatgctcgtcctcatccaccacctggtcaccggctacaggtgcgtccatctcctctcagatcctctccatatattccccgcttgtcctatagcttgtggaccagggatgacacatggctggctgctgccgctctccatggggctccggctctctctctccgtgcatgctccaaatctcctcctgtctgtatgtatgcctgtatcgatcatgtatatactcctgtaccataatctgtggggtcctcgaaatgtacgtcttcactagccccgctgtgctctccttcctcctatatatactatatatatgatgagcatggcgatcgactgctataacgacggtttactgatcttacactgaggcactgattggcgtccctgcatgctttatttttaaatttgcaggtggcaaatcgttggatccagtgacgaggtcgagtacagcccgttccctgtgcccaagcacggcttgcctgtcagattatggagacaaaacaatccggtcgtcgacagaaaggggcgtgagaccgacgacgatgatgtggaggatattttagtttgactcttgagttaggcatgaatttaaccccaagctagctagagaagttttttttccctttgaaattcttctttgctcgccttcctcctggatcaaattacgttggaggacaagaaacggcagctttctctttcgttttctttgcctgct

SEQ ID NO: 45987 - DNA, 237 bp, Zea mays
  Clone ID: MRT4577_141948C.1
gtccttatgaacacgcaacggtacaccggtgggccgccggtgtgttctgtggaacgccaccctactcgaccgttctatgacgttgagtcaccgggaacgggctcgttggacttcggtgtccgccgtcgccgtcaacagtatacctatcaagcctttgtgaaccgtctgggcccttgatggtaatcaacttggttccgggttactggggatgaactctttttggtcaaaagggccctt

SEQ ID NO: 45988 - DNA, 360 bp, Zea mays
  Clone ID: MRT4577_14194C.1
gggaaaaaaaccagtccagcaatccctgggcaaaacagttaaccagccaacaaaagaaacaccaaggggacaaggggaggggcgacattcgggacccaacggggaaaaaaaaagcccaaaaccaaaggggccaacacaagaggtttcggggggcttttagccaacgttaaagcggaacatgtcaatcgggacgaagaagggccccccccccgggagaaaagggaaagcctacagagacagagaaacacggaccccgggggggacccgggaaaacccgaccgggacccggaggggaaccacacttcccttaaggggggggtattaaagccgggcgcaaaaaggggcaaagctgccccctgg

SEQ ID NO: 45989 - DNA, 329 bp, Zea mays
  unsure (1)..(329): unsure at all n locations
  Clone ID: MRT4577_141950C.1
atctacaatcgtgtggctttattgttgatgctacaggtggcagattagagtatggggagtgctcaaaaaaaaanctctctaacaaactacataatctcacgtgttcatttctaaataataaaaaggatataaaaaaaatttctctcttctactaataaacataaaaacactagtattaataccctatccatttcataaatatataacaaaatatactaattattaattatatataatattttaaataataactataaatgcttattatttttataaaatgttatatccatatataattttttacaataatataacccttaaaatatata

SEQ ID NO: 45990 - DNA, 325 bp, Zea mays
  Clone ID: MRT4577_141951C.1
tgtggggaaaattgagggacgaagcgagaaacacagagatggggagggcggattttgttgcgagggcattacaagaagcaaaccgagcgacggctgccgaaaaaggacccccattacgctagctgcctgaaaggccaaagccagccatgggaaacattctatgacaaggaaaatcttcatgcgtgctaagtggtgcactttgaagtctttgcagacgaccctattgtgatacgtcgccaccacgagctccatgggcctgattctgggtctagatgaaagcgtgagacccgactggaccgggctcaacttgggcacgtgcgccacc

SEQ ID NO: 45991 - DNA, 455 bp, Zea mays
  Clone ID: MRT4577_141952C.1
cacacggacttttacttatcccacctcactttccaccacacgtgcgtataagaggcatttcgaaaccttgagcatacttttcatgctaagaaactggatggcgcatacaaacgggatatctctgtcgatacccaatacgctcatatcactctatttgagaaaaagctagcattaaatgccacaccaatacatcacttttgctgggcttgcataccccaagtaccatccatgcttattgcatcagcacgtgactactctcctctgctcactcggggcaagcataatgtcttttaccgataccagaacgaaaccttgttgcagatgatcagaaagcccactgagccatgcgctgttcgtcaaggaaaagaacttattcccatgcaagaagtctccagtgcatgtaaagaattgtattcatgtgcctaccaccaagactataatccatatgtttgcct

SEQ ID NO: 45992 - DNA, 161 bp, Zea mays
  Clone ID: MRT4577_141953C.1
ttatgtgattgtgatttgggccgcataactcatgttgcagggacacccttgtgcactcaacatcacttatccaccccttaacacattcactgttctcgcgccgaaaaaagagctaacatacacggccgcccacacctagagagcctttacagccttacatt

SEQ ID NO: 45993 - DNA, 372 bp, Zea mays
  Clone ID: MRT4577_141954C.1
atcctgaggaaggatgatttctacctgcaagaatgtttttattgggagcatggtgggatcttactgcaaagttccttataatgctctttgaaagggaattaggcttacacctagttcctaaataattttggtggttgaattgcccaacacaaatctttggactaactagtttgctctagtgtataagttatacaggtgcaaaaggttcacacttagccaataaaaagaccatgtgttgggttcaaattaaggagaaaacatcaaccgaaggctcctctggtctggtgcacccagctgtccggtgtgccaccggacatgtccggtgctccaaggaagagtggcctcaggaactcgccagcctcgggtttttca

SEQ ID NO: 45994 - DNA, 309 bp, Zea mays
  Clone ID: MRT4577_141955C.1
ctctcactaatacgttcatgttttgattagtgtcgctcgaatattaaaatttacaatattgatttattcttcatcagcctttgggtaagcatcatcgagttgcttgttgacgttgtggatccaagccttggaagccctctttctttttttggaatcaagtcttttggtccttaaaaaggggcctggaaaaaccctttttttgggccattaccggggcttttttcttcctggtggtttcttgggcctcaacttggatttttcttaccaccggggggtttggggtcaaaggttcaagaaccagcctggtct

SEQ ID NO: 45995 - DNA, 382 bp, Zea mays
  Clone ID: MRT4577_141956C.1
ccgtaaatggccgaagatctcgctctctttttgaaggatgtaggttttcttcatctgttggacaatttgatacaaaacgacattacttctctggcacaattatctaccaaaacaagtgcagacctgcaatcaagttgtggaatagcgtcgatggcagcaaagaaaattcttaaaggtttgtccgagcacacgtctagtgtacccatacagcaaccattgcaatcggagcttccacccttgtcggcggagctgccaccatccgacccaaatgtgctctctaatgaagattatggcttcttgctagagatacgagaaaaagcaccagacatttataaattgtggcagattcctcgcaatgcatccgctgaagagatcagcaaaa

SEQ ID NO: 45996 - DNA, 398 bp, Zea mays
  Clone ID: MRT4577_141957C.1
gatgcatatccaacacaacggcgagatcaagactcaaatattgacacacgaaactatagaacagcaaaacacttcaggtgccccaaagcacgctcatatagcaccaaaaagctacagctttgtttccatacttaacttctttgcttcctttggcaccccacctaaaggagcctggggctgcaaccagtcctgatggtcctcctggaccccctgggccaaccttttcctccctcctagcaacctttcttccacgagcatgacttaacccctttgcaccccttggacctaaaaccgcaacaaaaaggggtataccctcttggccccttctagccctcggaccttaggggactccctacacaaagaaccccccccgtggccttaaaacataatacccccct

SEQ ID NO: 45997 - DNA, 1399 bp, Zea mays
  Clone ID: MRT4577_141958C.1
ccactgcatgcaatgagatcaagaaatccgtgcagatcaagaaattgtgagcctgtggtactgccggaaatcaaggaatgtgagacagtgcaggcagtacagaccaagcaattgccgtccacgctggagatcaaaaagtctgagccagttgaatcagtggagatcaagaaaaatgagccggtgaaaccacgttctttgattgctcagcgcatcaagctatgggaagcacaagtatctggcaatgtcaagccaattgttggggataaggaggaaaactcagaggaattcagtttgagaaataactcaaacaaggacgcaaagaaatgcgtgcggtttgaggctgcagatccttgtgtcgcacaacagcaagaccaagaagttaaggatgtcaaagagccacgtttctgcgagactgaaacagaagccgaagaatgcagcgcagaggctgaacaagagcagctgctggagcaaggctgcaacgatgtgcaacctgagccagatttgcacgagctagagaacgagattgcgcaacctgaacaagaacctgaaggagtccaggtgtacaacgacaatgacgtggcacaatctccagccatgtggaatgacgagagggagagcccactcaagtcgacatcgatcgcaagcagagtgcactcgcggacctcgtcggggaacctcgccagcgaggggtcgtcgccgtcgcggaaggacaaggagtggaagaggacgctggcctgcaagctctacgaggagcgcatgcagctcaggctgtgccgcgaccgtgccgtggtggggggcagcgacaacatggacatgctctgggaggcctacgaggtgggcggcggcggcagcaagggcagaggcgggaagcgcagcggcagcggcagcagcagcatggtgaaaggcagcaccggcaaggtagaagatgccgctgaggaaggcgaggaagaaggcgacgaggaagacggggacggggacgaaagttcagtgaggcatctttgctgcctgcaggccctcaagttctcccccaggaagatgaacttcggaggtggcaagcctagcctgtccaagatctccaaggtcctaaagaggatgaccgcgttgtcgaggatgggatcgcggcgcaaacagtctgaatgaaggtcagctggtgtgatcaatggatggatcctttttcttgaatgtagaaccgctgtactgtcaccgtacttgttatgctgtttttttttcgattgtatttctttttttttctagcctgtatatatatgtgatgtatacccaatggtttcagtgaggttgggggtaattacagggctgtcacttggcctgcagaatgtaataaaccttgatctggtgtgtgtaattttcgtgctttcagtcaaaaaaaaaaaaaaaaaaa

SEQ ID NO: 45998 - DNA, 225 bp, Zea mays
  unsure (1)..(225): unsure at all n locations
  Clone ID: MRT4577_141959C.1
ctgtatagcgtacggccttcgttctttttttttttttttttttttttntttttttttttggtttttttatcgagaagcaataatgtagtgtaaacaaccatccataacggcgtttttaataacccagtggcaaagcggggcggacataaccagaaagtcttacaacatcaggtgttgcaaaccacaacggggacaagagcatcacacaagcctgtcgattaccgc

SEQ ID NO: 45999 - DNA, 449 bp, Zea mays
  Clone ID: MRT4577_14195C.1
aacgctatataaagatccaagcccgattgattacccattttaggaaaaataaggtttggccgttccaaatgctgggacagtagacagttaatatagctgaaactatctcatagtttggtttggccaaattatgtattaaaaggtcttcaagtgtgaccgatgtatcagctaactgggccatattatgcagatggttgataacattaaatgaaagcgggacaataaaaccacgttcattcttcatatacatcactgtgccttgcgcttgataggttcaagatacaatgggagctactatttatcaaaacgaaaaaaaacttggaggaggagtcataaaagggcctgggagctccagcatacagcaggatgctccatgttcgcatttatgggagagggcacacttacggttacaagtggtactacaaaagaaaggcactgctgtagtagag

SEQ ID NO: 46000 - DNA, 554 bp, Zea mays
  Clone ID: MRT4577_141960C.1
gccgggccgggacctacccgagttctctctcattcctcgcactctctccctcaccgttcgccaccggagttcgccggagttcgccgttagtcgccggagtttaccgttcatcgccggagccacgcacccgccatccgaagccaaatccctgctcttctccacccggtcgaaacccgtcgagccgtcctcgtcacacgcacgatcccaagaagctgattgtgtggtggacaattcgaatacgttcgaggacgacccgcaagacgcttttgagcaagcgcgaggacacgtgtcatctgaaaggcaagttggtacctggaatctcaagtgccaggagaagagcaggtggttcaggaggagccgcctaacactgaggagttcgatctgatctaggtggcgtttcccagtcgacattggcgccgacgatccttagttcattttatgtttattcttttattttgtaataagtcttccgctatgtaataagtactctgatgttttatgacatttatctctatacactctgttattaaaaaaaaaaaaaaaaaaggccccta

SEQ ID NO: 46001 - DNA, 218 bp, Zea mays
  Clone ID: MRT4577_141961C.1
gaggctcggaattcggctcgaggccaattccttaacccctgttttttaccccgcccccgcaccccaaaccctgggcggtttctataaagagtggggcaggacatccaagcccagccaggactataggtggcccgtgcgcaaaatcgttgtgcgctcacactactacacacgatgcgcccaagtctcatacttgaaagaccctgccgcccccagtgagc

SEQ ID NO: 46002 - DNA, 159 bp, Zea mays
  Clone ID: MRT4577_141962C.1
attcggctcgagccgcagttcacccgcgcccgagacgcaaccccgcgccaggagtaagcctgctctttcatcgatattatcgatatggcgccggaggagaatgtctacatggccaagctggctgagcaggccgaaaggtctgaagagatggttgagtat

SEQ ID NO: 46003 - DNA, 841 bp, Zea mays
  unsure (1)..(841): unsure at all n locations
  Clone ID: MRT4577_141963C.1
gccggccgggttggggttctcttcttcgcctcgtcaaggttcaagactagcgccacctagtaatcagtagtcatgggtatttctagggattcgcgccacaagcgctcggctaccggagcgcaacgagctcattacaggaagaagcgccagtttgaagccggtcgccaacccgccatgaccaaacttggtgccaagcgtatccacaccgttcgcacccgtggaggcaacaccaagcaccgcgcgctccgcctcgagtccggtaacttcgcctgggcttccgagcactcgacccgcaagacccgcgtcatcggtgtcgtttacaacgcctcgaacaacgagttggtccgcaccaacacgctcgtcaagtcgtgcattgtccaaatcgacgctgcccccttccgtcaatggtacgaggcccactacggacaacccgtcgtcaagaagggtcgcaccaaggaggctctcgctgccgttgccgaggacgccgacaagaagtccgcccacgtcaagcgcaccatcgccgagcgtcaaaaggagtccaagctcgaccccctcctcgagtcgcaattctcggccggtcgcctctacgccgccatctcgtcgcgccccggacaatccggtcgctgcgacggttacatcctcgaaggcaaggagctcgagttctacgtcaggaagctccgcgctggaaaggccaagcacgcccaataaacgtctagaagagaatcgatccccccctcccccctcgttccctttctgtcgtttttcttcgttggctactgtnaaacgttgggtttacccgaaagtcttgaaccaccataaaaaaaaaaaaaaaaagccccta

SEQ ID NO: 46004 - DNA, 479 bp, Zea mays
  Clone ID: MRT4577_141964C.1
cattgggtacctcgaggccggccgggaacgacttctctcccccgcgtgagaacatgccccgcgtccttctctaggcaccattgccgccggccgctgcctcccttgcaccatcggcctctacagatgaagctcaaaggtagtgacttcaaattatcactcaagaatctcaagagcatttggtgaagagtgttctcctgattttgtggatgtccagtatgcagtgaacttctagaagtttttatttatgtatgcatgttttaaatactttgatcaatggatgcttataaagattctatggaatttctggaggagttatctgtctttgatctgttttttatcaacagattatgtgctacaatattctgtgaaaaatctgttgttacttgactcatccatttttctattgtgttacttgatacatagttgttacgcgaggaaagcaaacagtgtaaaggaaaaaaaaaaaaaaaaaagcggcc

SEQ ID NO: 46005 - DNA, 255 bp, Zea mays
  Clone ID: MRT4577_141965C.1
gggggtttttatcaatgggtataagagtgaacaggggcttcaaaataatctgaaacaaaagacagaaaagagaactctaatgaatctgatggtgtaacatagacccctgcacacagaaaatggtccatttgattataagacatagtgaatgaaggcaagatatctgaccattaataagaataattctgggtccttttgagcgggccattgctacatcataagactagcagtcaaagacgtctgagatgaaagggg

SEQ ID NO: 46006 - DNA, 286 bp, Zea mays
  unsure (1)..(286): unsure at all n locations
  Clone ID: MRT4577_141966C.1
aagctgacaagaacaagaaacaaactgaggctgatggcagtggtgctacagaattggaaaaagaaaaagaagaaagtcgaagcagaagaagctgacaagaacaagaaacaaactgaggctgatggcagtggtgctacagaattggaaaaagaaaaagaagaaagtcgaagcagaagaagctgacaagaacaagaaacaaactgaggctgatggcagtggtgctacagaattggaagaagaaaaaaatgcagtcgnacagaagaagctgaaagaacaagaacaaact

SEQ ID NO: 46007 - DNA, 290 bp, Zea mays
  unsure (1)..(290): unsure at all n locations
  Clone ID: MRT4577_141967C.1
aaccccatccttgnactagctccgntnnctggtaccgagaatggcccggcaagaatgaaaggggagttagnnacggcgccccagccctttgccaagnnatcttcatnntggcgnnggctctccaagggatacccaagcatgnnagtacattttcaaagnaacccattttgggnnaagtattggggtattttaatnntgatgggctgtctattaatggaaggggaccggtttcacacccataaagcccagnagggcctttggcgtttnnttgnacttttgcnntgatccca

SEQ ID NO: 46008 - DNA, 840 bp, Zea mays
  Clone ID: MRT4577_141968C.1
gcgattgggtacctcgaggcccggccgggatttccccgccgcctccagatcacgactctgtccttcccaattctcaggcaaccccgtcgtcttccgccatgatccggttcatcctgctgcagaaccggcaggggaaaacacggctggccaagtactatgtcgctctcgaggactccgagaagcacaaggttgagtacgaggtgcatcggctcgtggtcaaccgggaccccaagttcaccaacttcgtcgagttccgcacgcacaaagttatatataggagatatgcaggactttttttctctatatgtgtggacatcaccgacaacgaattggcatacttggaatgtatccatctgtttgttgagatattggaccatttcttcagcaatgtgtgtgaacttgatttagtatttaatttccacaaggtttacttgatattggatgagttcattcttgctggagagcttcaagaaacaagcaaaagggcaattatagagaggatgggcgagcttgagaagctggaatgaaaagaaacaatggtgtagtgtacattagcaatttagcataggtccggagctagttctgcccaatcgacaaattacctccatatttttcacaattctttgtacctgttgtgcatcatctttgcttcacttaaacctttatcaagccgtgaatcggtgtatgtctttttaacgtttcctgaggttactgagggtttttgaactgcatgtgaggattttagtttgatggcaaagcgaaagatccaccgcatgaagaaaaaaaaaaaaaaaaaaggccgcctaaggaccaagctacgacgcggcaggacgtcatagt

SEQ ID NO: 46009 - DNA, 334 bp, Zea mays
  Clone ID: MRT4577_141969C.1
agttattccagtcagtgcagttcttgcagacaaggatgtcatgctgtgtatcagaccatgggaacatggtagtatgaccaaatctctatacttttctctgctctcttttcttctttccaacttttctccgcttcaaggttttccaatcaaggaaaaaaaatgcttacgtgctgacgtcaaaacttagaattaggggcatgttgatgttcaaattgaagcatcaaagaaccatatagtgccgccggccaacagcagcatcaaagaacaatattgattgtcttgcaaagtgccgccggccaacagcatcatccaagattctcttcttctatttttt

SEQ ID NO: 46010 - DNA, 162 bp, Zea mays
  Clone ID: MRT4577_14196C.1
aatgcaaactacaaaaggctgtcaagctgaaactgcaggtcagggatcggcaacataccgacggattgcatttcttcactagagcactccgacttcagaagggaatgcagttggatatgaacctcaactatatttgtcttgatagggttgaataagatcatc

SEQ ID NO: 46011 - DNA, 485 bp, Zea mays
  Clone ID: MRT4577_141970C.1
gcaccagcaagcccaagtgccgtgcggcatcctgctcttctccaaacatcacgggcgagcgtcgctcgtggaatgggcctgatcggacgatctacctgccggcatggggtgccgcagcgccacggaggttgccggagtaccgacaccggagaggtgcctggacactatggctacgaaccttctgggctgggtgagacagcagaggacttcgccaagtaccggggctaccaactggctcatggcagacgaggcatgctcgacgccgctggacgcgtgcatcccagacggccgcatcaatgttcgcgctaattgcgggcctgtggctgttctggctcagagcgaagtccatgatcttggagggcaacaccttcaactacttcggcaacagcgtcgccatctagctggagcagcgcgggatcgtggaggtcattctccgacgaggcgcccatgactaccggatcatgaacggagtggatctagaggat

SEQ ID NO: 46012 - DNA, 266 bp, Zea mays
  unsure (1)..(266): unsure at all n locations
  Clone ID: MRT4577_141971C.1
tgaccactgaattcactccagtcaacagattcagaatgagaatggacgtttggtttttttttgtttttgtttttgttttttcctttataaggttgtctgtttttttttttttaaataattgcatcagttcattgacctcatcattaataagtgaagaatacatcagaaaataaaatattcactctccattagaaaattttgtaaaacaatgccatgaacaaattctttagtactcaatgtttctggacattctctttgataacana

SEQ ID NO: 46013 - DNA, 762 bp, Zea mays
  Clone ID: MRT4577_141972C.1
attctctcctcgccggttcctcctctacctctagctagttacctccgcggcgagatctaggatccgcttctcgctgcaggatgaatcttctctccacccatcctgcgattacgaggcacctacgactaccctcccatgagagcgtctcaccgccccccccgccgtgtacgtctccactgagatctccgcaggacgaggaacctcagcttcactacacagatctgccatacaacgctccgaaatgaaggacagagattcatcccctcgaaaatcccgctcaggcactgaataccctctgacttcacctgtcggggcctccacgtcaacgtaccatgatcggagtgcttcaacgaacaggaaacgcgaaaaaactcgaatcacttctgccgcaatcatcctgagaagatagtgtacgacagcaagtcagacatcgccatccaattcgcaccatatgtacaagaatgcacgccacatagctcattgagatgggaatgcacgcatataggctctctatctcttgtaccctaatactgccgaagggaaccattcagagaggtacttacccgttatgaatcaagtactactgaaagctcatcaacgtgttgctagaatgcggcatatagacgtatgcaagaatcttccactcggatgtacctcgagcactacaagagaagtacgagtggtttgctagataatcagctgtacagcattagtagaagatatacatactttgcgtatgtgtgctatgataactgccgcaac

SEQ ID NO: 46014 - DNA, 2160 bp, Zea mays
  Clone ID: MRT4577_141973C.1
gttggaatctttgagagcaaaatttgttgaactacagtcagagatggaagaaagagacaaggagattatatttgcacaaaggaatatgagcttgctatatgaagcatgcgcaagttcagttgctgagattgaaggaattagtgatatatatcctggtaaacacagctatgctgttgaacattctgcagatgaatgtataaaatcaatcgttgaacagttagttatggctgtaaaaacttctcagaacagtaacgaaggtagcacaaaggagctgaaggctattgttcttgagttgcagcaggagcttcaagctaaagatgtccaaattagcacaatcagttctgatctatcatatcagttaagggtggctgaatcttctgcaaagcagttctcagttgatcttgaagatgcaagaatggagctccaaaatttggagaaacaagttgatgtgttgcagaatcagaagaaggatttagagactcaattaaatgagcttaaaaatatggaatcaatggcaagtgaacaacatggaagaattgagaaattgactgatgaattaagcagaaaagatcaagaaattgaaggtttggtgcaagcactcgatgaagaagaaaaagagcttgaaatcttggagaataaaagccttcagttggagcaaatgctgcaagagaaagaatttgccttgaagacctcagaagtttctaggaccaaagctttggcaaaacttgcaacgactgttgacaaatttgatgagctgcatagcttgtctgagaaccttcttgctgaagtggaaaaccttcagttgcaattgcaagaaagagattctgagatctcatttctgcgaaaagaagttacaaaaagcactaatgaactgctaaccactgaagagagcaacaaaaattattcatctcagctaaatggtttcatgaagtggttagaaagagaactgttgcagttcggcttccattctgagagtgccaatgattatgattacactcaatttcctgtctatatggatatgttggacaaaaaaataggatctctgatagccgaatcagatgatttaagggttacagttcaaagcaaagattctttactacaggttgagagggccaaaattgaggagttgatgcgtaaatcagatggtctagaagcttcattgagccaaaaggattcccagatagggttacttcgccgggacagagcatccaatcagcagagcagatctataaatttgcctggcacttcagagattgagcaaatgaatgacaaagtaagcccagctgcagttgtcactcagattcgaggcgcacgaaaagtcatcaatgaccaagttgctattgatgtagagatggagaaggacaagccttttgatgatgaagatgatgacaaagcccatggtttcaagtcattgactatgtcacgctttgttcctaaattcactcgaccggtatcagacagaattgatgggatgtgggtctcaggcgatagattgctcatgaggcaaccgaccttaagactcggcgtcttgatatattggattgcactgcatgctttgcttgctagttttatttgaactctgtaaagatgtagccatctcctggcgagtgactgtacagtactctgtgtctatagcaagttatatctaaacagaagcagtttgcactgataccgtgattcctttcgaaaatgttaccgaatacttgagccgtattggcagctgcagaaatcttcatgatgcattttcacccttcatcctggtgcaaatcctgtctagcttagtttgtgttcaattgatacaaatggatggaagagaactgaaggaagcagcagcaaagaaccccctgtacatacatttttgtttgctctattctttgcttttagaaaaaagatggagggcattctacatgctagcgactacttactacactatatgatacaggattacagggaagtgacatgtagttttggaagttagggttttgggatggtagcaggtcatcccctcccttgagttggccccctcaatcccatcatgccttctaatctttttcgtttacatgtataacacagtgattatatcatttattgtaatccacatagtgtgcaatgggggagcttgcacattttatttccgtcaaaaaaaaaaaaaggccccta

SEQ ID NO: 46015 - DNA, 599 bp, Zea mays
  unsure (1)..(599): unsure at all n locations
  Clone ID: MRT4577_141974C.1
ccggnngtcgacccacgccgtccnngcgtcttctcccttcccttagtcgnnctccccaaatcggnnatctccagnngccggcagnaagnnttgagcggacctgacnntggtcacctggtagtttcgatcggaatcccgaggtaggggctggataccaagttccgatatcgggcggggagggcatgggcggttcccgaaaagcaccttcaaggtaccgtcattccttcgggcgggcgggcgtccgcgggcgggggtaccgccggcgccgggagattcgccccaacaggggagttatagacctgtgggagacttgcgaatcactctctcaagggaggcgcgctgggtctctctacagagcgctcctgcgcctcaagcacaaggtgtatcctcctttctctacgcaatgcgtgtcaaggactctccagggattttatagtattgtgtgggaaagtgggtggaggagaagctatatgcctcgagtggtgctcactagaaaggcgattgagactgatctcttagtacatgaaattgtcacaaactgtatctttttcaccaaagactcttgactaagtgcagcctggtaggcaaacttttacata

SEQ ID NO: 46016 - DNA, 224 bp, Zea mays
  Clone ID: MRT4577_141975C.1
acaaacgggaatttcagttctcatagccttattatgaatctcaaaacataaccggggaaacacgaatcaacccggggcgccctggggttcacaaatccacacctaaacccgttaattaaactgggggccattcatggtaaactaagacccccccttaaatcccccccttttttttcaaatccaaaagaaccgcccccggggggggtccccattaccgggggggg

SEQ ID NO: 46017 - DNA, 503 bp, Zea mays
  Clone ID: MRT4577_141976C.1
cggctcgcaacgcgcaaacacatgcagtcaaaaaggcgactctttgcgacacctatgcatacaaacatttgcggccgggctttgctcctaggcccagacaaagacttaagtaatgccatgtgaggactatcacccggactatggggtccacacacttctcctaagcttgcagggtgaactctcttggtcatctggggagggaaggggccccaatacgcatgctacaaacttccttgccctggctgttggatcaagcaatctaaatcctaatatccttgaagctttccatgaaccatagagctatggccagataacccacttactagaggatcggccactgtttcccctgtaagccgcatatccttctccaggtgcccgggagccaccataactctggtagctcccctaaggaatcatgaatatggcgatgtgcaaaaaacactagaatatgggcactgggcaacaggcttaaagacgctgtttaaatattttggcccatccaa

SEQ ID NO: 46018 - DNA, 244 bp, Zea mays
  Clone ID: MRT4577_141977C.1
aaagaacaagaaactgatccttgggccagcaagatgtcttctactgtgtgtgctgatgacatgaaaggtagctggaacactgcatcaaaggtcattccatctaaggaaaaggctgatgatccatggaatagtaaggggggtaatgatgacagcatgaaaactgacacctggggtgcttgctcgacaggttgggatcagcaactatcttggagcatacttaatttctagactgagggaccaggaa

SEQ ID NO: 46019 - DNA, 265 bp, Zea mays
  unsure (1)..(265): unsure at all n locations
  Clone ID: MRT4577_141978C.1
gggccccaccctcggggggccgctggaaaattcggccttaatggccccgcggtttcaccgccggggataatactttttggggggggaaaaaatattccctccggttcctggggcccccgccccctgctggggtggtggcggggggggnttttttccccttccgccgggggcccggctggcgtggcgggtccctgcctgctgggcccccgtgtgccgcgggcgcgcccccgctttgggcgggttttgggccttgtccggaggcggg

SEQ ID NO: 46020 - DNA, 770 bp, Zea mays
  Clone ID: MRT4577_141979C.1
cctcgaggccggcctggccgggaatttctttttttaaaaaaaatattacttgtaactgcttcaaaaaatggaaactatggacactctccaaaagatcatccagcctcaatacctcgatcatttcgctgattgggagaagttcgcaaatgacagagaaaagaaaggactcaagcttatctccgctatctacaaacataaaggccttaagaaattcagagccgatccaccttcaaaacaacttgaagaattccagaaatcaaacactattgactataagaaggctgaagagttatacagaaaaaatcaagttacttcatactattctagtgaattcggtgctcaaaaagagtctaaacctcaaactaacatcttcaaataccaaaagtgttctgagactgagttcaaggatgtgttgaataagcttgctgtgcaatttttggataattggatcgaacttcaagatgaagccgaattccaggatttggtcttgatatgcttgagatctcttcttgctagatataagtctattctagttgccaagacagaagccaagagtcaatataactggaatgttgattggaagttgtgcaagccaattagaattgacaaggttggagctgattatagatcaattaagacagattacaataccatttttaaagatactttgaagaaggaagaagaggctcagaacttggaaaagaacaagaagaaataacagtaaaactcaaacatggaatcaatagagggcactaagcgttagtgttatt

SEQ ID NO: 46021 - DNA, 457 bp, Zea mays
  Clone ID: MRT4577_14197C.1
gggagggggtttaaggggggtacccccgcccttgggaaaagggggggccaaaatttaaccccccaattgggttcagaaccccggcaggaaaaaattcctcaaagggggcggccccctttctataaaaggggccgaccccaaaaaggggggggttttggggattctaaaaaccggcctccttgggggcggggtttccccctttaaaaaaggggaagcctaagccgtttaacccccccagggggcatcttcaacgccccggatttcgaccccagttaaaaaaaggccccccccccttgaacagcacaaaaaggccccccggggggaggtcaacacccctaaaaagggccccaaccggggggggcaggaacctaccaggcccccccaaaaccccaggggggagagggggagaaaccaaaaccccccgaagttcgggggggggatatctggaaaccccgaa

SEQ ID NO: 46022 - DNA, 722 bp, Zea mays
  unsure (1)..(722): unsure at all n locations
  Clone ID: MRT4577_141980C.1
ccggccggggtcggcctcaagtagtcacgcccattgtctcaggtcctgctcctctcccctcccctgcccgccgccaccgccagttggcagaccgcctatcggccaccgctgcacatcgcccgtctggctgttagcaccggcacgcagcgcccgacgtcctgtgcgtagcagccaggcacacgacgaccaagcgtatagtggttgacatggaagcaatggtgacaacaccagttgaggatggagaatagcagaagtctcctatggaagttgtttctgaagtgctaggggctccaatttgtttctacataatgttggtctgcaagataactccaagaaaagctccacaacaattgtttctgcaaaggtgcaagaacttcataatcaattggagtctgagaggctagaaaaagatggacttcaggaagaagtagaaaccttaaaggctcaggcacaggcctcaaaggagaccatggacaatatgaagagatcgagggaagaaaataatagtctcctctgtcagccgttgagcttcaatcgaagccaagcgcccccatcttaagtctgttatagtataatgttatattagttctagattcatgttttataaatttggaatatgtttanactttcatactttgagttgaagttataggatttcctttggattttaagttacatgaactataatcgtatggntttgaagtataaattatcccttggac

SEQ ID NO: 46023 - DNA, 1037 bp, Zea mays
  Clone ID: MRT4577_141981C.1
ggtggagaagtggctacccaaaacacaaggatagttgtatgaagaataaacttaatcgtgaaaaagtacagtatcaacaatgcataggatcccaatcatatattgcaaaagcttatttactcaaaggggcccattgtctcaggtcctgctcctctcccctcccctgcccgccgccaccgccagttggcagaccgcctatcggccaccgctgcacatcgcccgtctggctgttagcaccggcacgcagcgcccgacgtcctgtgcgtagcagccaggcacacgacgaccaagcgtatagtggatggtaggatgccagtagagattgatgcatccaaagattggagtgtcttaggataattaaacaaagaaatataaggatgctgaaccgagtgcaataaatcttttcaaggacatgcattgcagcaagaagaaaggtttttctgaaaatgtaaagaaagcaattgttgacatggaagcaagggtgacaacaccagttgaggatggacaacaacaaaagtctcctatagaagttgtttctgaagtgctatggggctccagtttatttctacagaatgttggtctgcaagataactccaagaaaagctccacaacaactgtttttgctaaggttcaagaacttcataatcaattggagtctgagaggctagaaaaagatgggcttcaagaagaagtagaaaccttaaaggctcaggcacaggcctcaaaggagaccatggacaatatgaagagatcgatggaagaaaataacagtctcctccgtcaactgttgagcttcaatcgaagccaaacgtccccatcttaagtctgctatagtatcatgttatattagttctggattcaggttttataaatttggaatatgtttaaaactttcatactttgagttgaagttataggatttcctttgtattttaagttacatgatctacaatcatatgatttgaagttataaaagtatctcttgtatgaattgtgtgaatgttgaactaaataattcaatgttttggttattagcg

SEQ ID NO: 46024 - DNA, 1439 bp, Zea mays
  Clone ID: MRT4577_141982C.1
tgtgcggcgcccggccgggactccaagatggaacccaaaatgcagggagggattgtcatggctggcggcggcaagccgtcgtggtctgcctcgcccatcgtcgccactgtcgcgagtgggtaccacatcctcaggatcgatggctactcccacaccatggggacccccacaggagagtacatcgcgtccctcccgttcaccgtgggcggccatcgctggcacattcgctactaccccaacggcaggagctcggagaccaaagagtacgtctcgctttctctctatctccacgactgggtcgctgagacagtgaaggcgcggttcaagttccgtttcgtcggtgacgtggcggagcagccgttgatactgggaggactgcatagctttgataatattgacaacaattgggggcgccccgagttcatcaaaaggaaagatttggaagagtcgaagcatctcctagacgattctttttccattcggtgcgatgtggtcgtgcccaccaacgaagtccgcgtggtagccactgctgcggctgctatggtttccgtgcccccatctgacctgcaccagcatctcggcattctcctgctgaccgagaagggcgccgatgtggtgttcgacgtcgccggtgagacgttcgccgcacaccggtgcgtgctcgcagcccgttcgcctgtcttcagtgcagatctctttggtgcgatggaagaggggggccacaccggaggcgtggtgcgcatagaggacatggaacctctggtgttcaaggcattgctctacttcctttacaccgacttgttagagacagagacgatgaaacaaggtgaagacggagacgatgaagacgttttgtgtcagcacctactggtcgctgcggacaaatacaacttggagaggctgaaattgctatgtgaaaagaagctgtgtgagtgcatccatgtgggcacgatagcaaccatcctggcgctcgctgagcaacaccgctgccatgcactgaagaaggtctgcttccattttctcagctctcctgcaaatttgagggcagtcgccgccactgacggctttgagcatctgagcagaagctgcccctctgttatggaggagttggttgtcatgctcagcaacttggtgtagaaaactgcacagtagttgtgcatcctaggagattctcaatcttttggtgcttttgccagttgacttgactgcgtatgtgccgctctccaccaattcgcagcgggtgattttgttagctgctagctttgaatatccacaacaagtccgtctatgtgcttaatgtttaattctcagaagttggaatgcactatagctcttgctttcttatttagttgtagaattcgtttacttctagttctctagccgtcaatctagatgcatatataaaaaaaaaaaaaaaaaaaactcgagagtcttctaga

SEQ ID NO: 46025 - DNA, 287 bp, Zea mays
  Clone ID: MRT4577_141983C.1
gtgtttgtttttttttttttttttttttttggttattttttttttttttttttatcaaaagaagcttacagatgatagttcgaataagattataatgttatttcttctcatctttctcatctgatgtctaggggacacgacatttttgggggggggggggattgttgattttacaaccaccacagctacacgactcgactgatgtttagggagttttacacaggggaacgaacagtcactcccacattgcatttggaagttcatcacttgcaaagcatttttttttt

SEQ ID NO: 46026 - DNA, 490 bp, Zea mays
  Clone ID: MRT4577_141984C.1
caaaaaacagggaaaacaacataggttaattttttggcctaattcaatttaacaaacaagccgacggggtaaacccctacttatatacccaaaactttaatttatcccggggcctcgggaaacccatcaaaggaccccaaaaggggccgggggggggggaaagggggggggggacccaaaaaagaaaggaaaccaaaagaaaccaaaaaaaaaaaaggggaaaaattcctttaggggaaaaactttatacaggggccctaaaagcatccttttaatagggggccccacagcattttaagggacactataagctaagggggggggctttggttttgccccagggggggtcccaaccgaggtcaaaaaacggaaaaccggccacttaagggaccgacccccgtacgggaacatgaccagaaggcggaattccccgaagttaacaggcccaactggatttgcttccatacccaggttcacaggggggaagaaa

SEQ ID NO: 46027 - DNA, 191 bp, Zea mays
  Clone ID: MRT4577_141985C.1
ggacaaaatacttgggagcttaaaacactgacttgagaaaaactgcttgggggaatgactgatcacaagggcttaggttggtttggggggggggggcaggggcccaccacatggtaatggttgccaaaggctcagggaacagagatccttacagcacaggggggtccctgcaaaaaaaaaccgagcggccc

SEQ ID NO: 46028 - DNA, 258 bp, Zea mays
  Clone ID: MRT4577_141986C.1
ctaaaagattattcagagaatatcgagatgattctggctgaaaaaggccagtggaaattcaggtgaaaatgttcatcaattcccattgcatcacctctgtaatttttcagctctctgtataaacattaaatgtcttatatagcagcaaagatataaaatagttgtccatattttcacaggtgtggtgtaatttataaaattagaaagcaacttatcagctacttaagagaaatggcaagttttgatatgagtatacaa

SEQ ID NO: 46029 - DNA, 314 bp, Zea mays
  Clone ID: MRT4577_141987C.1
ttttttttttttttttttttttttttttttttttttggtttttttttttttttttttttttttttagagaaccccggaaagaaagaattttttttagattacacaaatgggggttaacccccctagagaggacaacgggcgccttccaaaaggaaacaagcttggcaaaaccaatttggttgggacagggtacaaacttttgggtacacactatgcttggtttttacaaaaatgcccaaaaacaatatgggaaccccattttatgccccccttaaccagggacggggacccattaggcctgtttggttattccg

SEQ ID NO: 46030 - DNA, 349 bp, Zea mays
  Clone ID: MRT4577_141988C.1
attttgagcattcagaaacacaccaagcgaaacgcacttaccaccaacttaccaccatgggttgcgaaaaatttacccttccttgccctcttggcccttttgggaaccgcaccaaatgcgtccattattcaacaatgctaactggctcctagggccataattccaaagttcctccaaccagttacttcaatgggcttggaacacctagctgggcaagccaacatgcaacaacaagcgctggcgggagggggttacaacaaccaattgcccaatggcaacaacaatccttgccacatctaacaatacaagccatcacaacgcaacagcaacaacagttcctaccagcact

SEQ ID NO: 46031 - DNA, 755 bp, Zea mays
  unsure (1)..(755): unsure at all n locations
  Clone ID: MRT4577_141989C.1
cattgggtacctcgaggccggccgctctcgttctctgccacatctcctccgacatcttctcctactgcctcgaggaacggaactccccgcgcgggtgagatgtccagttatcagaatctcccatctagggacgaactgcggccgcatctcttcacgctacaaccacgcacaaaaaccttctacgaggtagggctagcgaaaatgtctcagccaaggcactggttgtgcataccttgctgccacttcatcctgcaagccaggtgaggatcaaagcgttgatatacacggacttgcgaaagcggctgagattggtgtcccattccgcgtatacgaggagctcccttatgacaacaaacaatgtgcgccgtacatgccccatacctccagaatgtcactgctgtgcaggagccacaaacagccgaagagtacaaaaagggaggcgagcgtgcagccaatgttctccttagcaagctgaaggacctccaatgttttgttggaagataccatgaacgatgatgcgtctgtggtattcaccgtattacaaggatggtgccactaatccgacatgcctctatttctctcatggccttaaggagatcaagtgctaagcgtgcggccaaattagttacccatgttgggcactatctatgaacgattattatatccaanactatactggccctggctgaatgaactcagaaggggtatgtttgagaaaaattggcccaagattggattgcttgttagagctctga

SEQ ID NO: 46032 - DNA, 314 bp, Zea mays
  Clone ID: MRT4577_14198C.1
tcccctccctggctccctctctcctccgcccccttttttatcgcccgatctcacaattttggaaggagagagagagagacagagggagagattggagggaggcccctgcccaaggcaagagaaaccgcgccgcgcggagagggaggaaggctatacgcatacgggcgtagcgacatgagggagaccctcggcatccgcatcagccacatcgccgagcaagtgatagccgcccgaacgagagatgtactgccgcgatcgcggcctctggcccgatggccccctgaccagcggatcggacccgagggcggcgcccc

SEQ ID NO: 46033 - DNA, 162 bp, Zea mays
  unsure (1)..(162): unsure at all n locations
  Clone ID: MRT4577_141990C.1
ccggtccggaaanaaaccccgggtcgacgagcccactatttattcggccgcccacccaaaaccacaacggggggccacagagaggggcaagggcggccacccgccaagacagcacgaggggaacaacgcacacacggcaacgaccaaccccgcggccaggcg

SEQ ID NO: 46034 - DNA, 149 bp, Zea mays
  unsure (1)..(149): unsure at all n locations
  Clone ID: MRT4577_141991C.1
gcagctcagtctcgttgccgtgctgagaatttaaattccgctgttggcaaggcagcctgaaaccccctcagctgccgcaggggagggggcctcctgggctcacgaggtcaagcaggccctccgtgagaaactccggcgctccntcggcg

SEQ ID NO: 46035 - DNA, 175 bp, Zea mays
  Clone ID: MRT4577_141992C.1
cctcgctaacaccccgaacacccattccctactgagtgggcattttgtctcatgcaccacactaacacgacgaaaaacgaagcatgaaatgagctcttctgacagcttctaaggcatccttcctccccctggaccacctaaagctcacagcccaagcactaatcatgacctgcct

SEQ ID NO: 46036 - DNA, 106 bp, Zea mays
  Clone ID: MRT4577_141993C.1
cgtgctgtcggaggcgtccgcgaacccggcgtccgagagcatggcggcgagcgtcttctgcgtctgcgacgacacgagcgtgaagctggacatgcggcgcgccgcg

SEQ ID NO: 46037 - DNA, 759 bp, Zea mays
  Clone ID: MRT4577_141994C.1
gcacgagcagactgctaatatatttgtgctcccagtttttgacaattttttagggttctggtgaggaatttagacattaagtggaccagaataccaaatttctaatatgctgatcttcaatattcttgcaactttgcaaacgtagttaccacatccacaaatgtagtctgtgttgatgcacagaactgcataggaaaatgaaatccttgataaactttattctttcaccgtggctgttgaaaagggcagcaatcttcacctcactgcactatgcaaaaaggttatttaacctatgtaatcaagttttcatagatatttttttgataaaatattacggattcttagaagctttctttctcttcattttgatagttgtcttctggtctcagctcttcatgttgttcatgtaacacttgtcaccttctgctatttgtttgcctcttaggctcttatttttgtgtacatatgtgatgtaatccattgtgctttcttcactggcactccttaatgtgctcaataaggtttagaacgtgttgaggattaaaaagatagtttgcacgaaaattgggtacaagcatccaatagtaagttgcgtgctgctttttttttttagattattgtcgccttgagtgggaaacagtccaaaccttggatgaagatccctagctcgaaatgctgcccataggacagccatttcatgtattttggaacatatggatggcagacgttttaaatttttacttctatctggattcagtt

SEQ ID NO: 46038 - DNA, 1934 bp, Zea mays
  Clone ID: MRT4577_141995C.1
tcgcggtgcggtctccacgagcgctccagctccactcctcgcacccgaatcagccgctcagatccccaggcccgcctctccctccggcggcagttcctcgccggggtcctgcccgcctctcccttcatcccctcctcagaacttatggatggacaggtggagacctttgtcggagatgaggaaggcgggtcgcctcaagttccttacgatggggagcagccaacgctgtatgatagtgtcgcgaagcagtacagtgaagagctaggtgaccagtacaacgagcaacctcgtgcccaatatgatgaagggtctgggaatccgtataatgattatgaagagcaagcaaacctgtacagtgaggaaactgggaatcggtacaacgaggacccagcagattcttaccaggaagagcaggagaatgcattcagtgggggcataaaccaacaggacaacttgcaggtcaacaatgttgacgataacaaatggcctggatggcctggagagagtgttttccgcatactcgttccagctcagaaggttggagctatcattggccgcaaaggggagtttatcaagaagatgtgcgaggagactaaagcgcgcatcaaaatacttgatggcccacctggtgtaccagaaagagcagtaatgatttcagcaaaggatgaaccagatgcacctctctctccagctatggatggcttacttagagttcataaaagaataactgatagttcagatggtgaatctagtcaacctcaacgaagtgctggtaatataggaccaacacgacttctagtgccatcttcgcaagctggcagccttattggcaagcagggagcaactattaaatcaatacaagattcttcaaaatctattgtccgtattgttgagaatgtgcctcctgttgcactaaatgatgatagagttgtggagatacaaggcgagcctcttggtgtccaggaagcagtggaattaatatcgagtcacctgagaaaatttcttgttgaccgcagtgttctaccattgtttgaagcgcatatgaaaatgcatggtatgccgagggagcaaccagtgccacctccccagcattggggccctcctcaaacctggatccgccctccaaacattcctccaggtggtcctggttttggaggaaatccacagttcatgcatccaaggccgcaagacagttactatccttctcctgatgtcccccatatggaaaagcagccgcactacggtatttctgcatacggccgggaggccccaccaagtggtgcttctgctacagggaatcaaccaccctctcatgcaggttctcaggtggctcatgacatgcacattccccttgcctacgctgatgctgtgattggggcagctggtgctagtatcagttatatccgtagacacagcggcgcaacagtaactattcaagagagcagaggtgcacccggagagatgaccgtggagataactgggactgcagcccaagttcaaactgcgcagcagctgatccagaatttcatggcagaagctgccccaccaccaccaggcccggcgccagcttccaaccctcccgcaccaccagttgatccaagctatggctcttacccaccaccatatggagcagctccttcttatggttcttccgcagctgctgggcctccgcagtacaatggtgggaactacggtggcccgacctaccctcccagctatggctattagtagacaagtgtagcataccaaggatttgcccccccccccccctctttttttccgaataacgacagtgttgggcttgacatccccctgcccctggttgggagtgcagtttttaaaaccacaatttttcaataccagtctgataattgctatgatataactatggtctttttatattcgtcaataaaaaccccgtttggtgtccaacc

SEQ ID NO: 46039 - DNA, 370 bp, Zea mays
  Clone ID: MRT4577_141996C.1
cacgaagagcgacatttgaacatcctggctttttggattatcgaatcaagaaacccccaaactttctccatggggagaaagcaaaaaccaaaaaaccgtttttacaaagcctccgtgtcccatttctcaccccaaccctattccatgaaggcccgggggagggcagaaacccacccatttggatttcccccgatcaatccatttggggagggagggggagccaaatcacagcgcgatgttgaaggcactatgagaccacgccacctatcccgaaccaagaagccgggttgaccttataccactattcaaatgggaatgggcggccttaaggggcaccccccacaaggggggccttgctcttggcacaaaa

SEQ ID NO: 46040 - DNA, 419 bp, Zea mays
  Clone ID: MRT4577_141997C.1
cccgccctttttgggtttggttgagaaaaaaaccgggccccaccccgcccaaggaagggcgcaaaaaacacagcaaacactaaactaggggaaaacaccaacaagcaacggaaaaaagggcacaaaaaaacaaaaaaggccggaaaaacaaaggcgaacacgcaacagaacgctcaaaaaaggagcgcacccccagcggccgagagaccggggcacccaaaaaatcaaccggcggccaaaaagggaagaaccaaaaacgcgaacagaaagccccccagaacagggcccgaaaaaaaacaaacggccatggaaaaaactggggcacccccacagggaaaagaaacgcccccaggggaaaaaaaggacgggaaccccaacctcagggcgggagaaggagaccgaccggaaaacctgggccc

SEQ ID NO: 46041 - DNA, 353 bp, Zea mays
  Clone ID: MRT4577_141998C.1
cacacttgtagcgcgacgcagcaactggaggtaatatacaaattagctccgcgttttgattaacgtagggagggagcacaggcgtattttgttaaatataagaataccgaacagcttctagaaaggggggggatgcggcggaactgcctacctggtcctgatagagggggccggcatttttaggtgatgtaggccagtgcgaccatgaactgagcaacaaaagcttggcggtgacccccttggtgctcggcaccgaccgaggcgtacttgtggcggctggcgggatgaaccacaaccacccggtcctcgggggtggcttcctagtaccagcggaggtcttgttgcaacaatga

SEQ ID NO: 46042 - DNA, 313 bp, Zea mays
  Clone ID: MRT4577_141999C.1
agcttttcctactactcagctagaacatcgtgagagccagccctagcgcatgatgaatacccataaacatggtaaggtcaaccgtgtccaccacatgcacgtcagaacaacaggtttatgaaagacgcacgaacgatcaagaacaacaatgaaagaggatacagttccttccctcctcccacccattgcatgaaaatatttcggaaataggaaaaaacgccagctctccatgaatccggtctgcgccctcacactcatctggaaccgatcaatcaaccaagcgttggagaatgctcatcgttttcctatgagg

SEQ ID NO: 46043 - DNA, 503 bp, Zea mays
  Clone ID: MRT4577_14199C.1
ccggccgggaagcccgcccgtcgttttcgtcacccctgacgctcgacgcctctcctcctctcctcccccacccgtacatcgcccctccctccgatgtgtattcccacagcctcacccctgcgcccccgccgattgcggtctccctttgttgcaactgacgatgacatacacctctcttcatgatcaagactcgactgcaccctacggcgacatgatatgggacatcatacagtcgcttcgacaaaaaaggactctacctcaatgcgatgaaattcatgaacgcggacacgccccttctagcatgagcactacgcgtgaccttttccactatcctttcttccccgggttggtggagcacgtcatttcaccacccgcgatggccatggtgaggcaccggaaagacctcgtggtggctgatcgcaggattgttgtatgcacctatccttgcgaaccactccccgttaccattcacggcgactacgcgccatgaacaagaatggaat

SEQ ID NO: 46044 - DNA, 662 bp, Zea mays
  Clone ID: MRT4577_1419C.1
attttctctcatctaattgcggatgggagcactggagtagccacttgtgtttggacgggagcgcaacctgctcgcccgcatggcctgctggcttacggcggctgcggctcgcctgtcatagcggcggcggtccttgcccgcgcgcttgtgcctgctcgcggtggcatcggcggtccggccgggatgctcgcctgcggggcagcggcggccggcacggtgcccgcactctccttcggtggcgagacggcggcggcgagcccgcgctcgcacgcttgcgcgaccgtgttgcgacggcggcgccctgcgcccgcgctccaacgacggcgaggcagcgcgctttgctgtggaccgtggagcggcagcgactgagcttgcgcacgcgcgtgaccacgagtatgcactgccttggagtgggttgggttcacgcgttggcgttttggcggtggtgccagcgcccgcacccgtgctgcggcggcagcgaggtggcagcctggcaggtgtgcgtctcgctcctgcactacgagttaaggtcgtagtttgcttgctagtgcggcaacgacgtcaaccttagcactgtgttgccattcttttttttttctttctttcgatgatgcagtaaaatcaatgagcgtattcaaagttccaacagcttcgtgccggtg

SEQ ID NO: 46045 - DNA, 266 bp, Zea mays
  Clone ID: MRT4577_141C.1
tcccgagcagcagcgttacttactcactagtcactactgcttggctctagcctctagctagtcaactcctgcttggcccggcatggggagggcgccgagcggtgcgtggaacatggcgcttctggggctggccgtcgcggtggttcttgcggtggccgctgaggcgcggtccttggagaagcagaacctgtgcggtggttgcgggcttggtggcgggggagggtatggcagtggcggtggctttggacacggtgtagggtttggag

SEQ ID NO: 46046 - DNA, 233 bp, Zea mays
  Clone ID: MRT4577_142000C.1
gtgcggcgctcgaggcggccgggccgggctggtacagatgagcagtgctcttttacggatttcgatttggagcagaagtcgtgaactgcaacgtttttgaagtagggttattttggccttgttttgctgttaaatgttgccagtgccgaaattgtggtctcgttttaataaacaaatcaatcggtcccattggtcagctgctaagaaaaaaaaaaaaaaaaaaaaggccccta

SEQ ID NO: 46047 - DNA, 392 bp, Zea mays
  Clone ID: MRT4577_142001C.1
gtcattcgtacacatgaatcctgtcattgatagccgatctaactgaagacggccaaggttgatggcgactgtaggcagtggagggtcgtgctgcatttgcgaactggttaaaacgcccagattgttcagcacatatgctctcagatattgactggtgctgtcaggataaaccgtggcgctggtgctatatgatgtgacgtcgattctgtgaactatgtgaagctattgggactgaacccacacggggagacctgatgtgaacttgtgctggggttgtctatggcagaaaagctgacgtgccaataggatcttgtggaaaaggctcatgatgatgcttattattcagcacataacttggaaccgagcatatactgtcatgctgcaatggatta

SEQ ID NO: 46048 - DNA, 189 bp, Zea mays
  Clone ID: MRT4577_142002C.1
agtggggggaggggtgtttatatatcttcaagaaaaaaaaacagggtgcaagctggaataaaacctgacatgccactagtgtcaacccatcatcggctgaggcgggatatgtgtgggccttctgggcaaaatctcgttccacgggtttgcagggccggccaggcaccaaagcaagtagtttctggcgtt

SEQ ID NO: 46049 - DNA, 611 bp, Zea mays
  Clone ID: MRT4577_142003C.1
tttttttttttgttgtttttttttttttttttttttttttttttttttttttttttttttggttttttggttcggtccgggggggcgggccgggttcccggaggcgggcccggttggccgcccgggggtcccttgggagggggggggggggggggggggaggtgatgggcgggggaggtcgctgggggaaaacggtgcccgcctacatcgccccccaagcataacccgggaagcagggggggcaaaacgagggggccaaacaaaaggaataacgtcgaggaaagaaaccgggctcaaggccggaaaccaggagggcaacccggcttggcgaatgggccaacgcaaagggagaggcgggggggggagggggctcccggggggggcgcgcgggaaggggtgggacgggccagaggggcggggactgcctcgctgggccctgacgcaggggcctggggcgagccacgcgggctgcccccgcgcggcggacccccggggtgaagaacgtgagcggtggggggtaccggggggtgtcaccggggggggggttgcccgttgcgggttccggcccgaaatgccgcccaagcgcaaacggcccattggggcagccacag

SEQ ID NO: 46050 - DNA, 397 bp, Zea mays
  Clone ID: MRT4577_142004C.1
gtaagctcggaattcggctcgagcgacctaacccctttcttatccgcttcttggcaggagttgtacacacggactcgtctcctatgggggggtgagctcgagccacacgcactagggttcagacggggccagatcaccgcgtactacgagcagggagagcgggacacgtgctgcaactgacgagctaaaagcgtacacaatgccctgcaccatggtgcgacctatcctaaaggacgctggacgacacgcggctctggacgagaactgcgggctggccctcgtgctcaatctgcctgacccgtgcgtacactgccccagatccaccatgatgctaaggatgggcctacagacccgcctccagcacaagatccgcggcatgatgtaggccattcaaagc

SEQ ID NO: 46051 - DNA, 369 bp, Zea mays
  Clone ID: MRT4577_142005C.1
accggatttgcggccacagtcacacgttgtcgggcgggatctaagtggaaaccggcgtgcactagttactacactgccgcaggtgcgctccatctctcggcctccatttcgtgcacgaggggtgatacagggcccggtgtgccgtgcacaggtgtatatcgatgcctcggacatattctccggcccttctgcaccgtcaagctcctccagctactgaagagacaagagcaaagaggtaacaggagatgaatacccctgaccagattgagcgggtactcatgccagagggcccctagaaagtggcctatgcaaaggatacaaagattgtgaatgctgcatcattgactgtcgtacgcgacgatcacactg

SEQ ID NO: 46052 - DNA, 362 bp, Zea mays
  unsure (1)..(362): unsure at all n locations
  Clone ID: MRT4577_142006C.1
gaaatattgttcagaaaggggatacggngggggatggcacatgcgggaatggttgtgacacgctcgctctgctgaagatggtggctgatgaaacaggccgtggacgtgtttatgggatggacattcaagattctgcgatagagaatacttcctcttttctgaaaatggccgtggatgatgaacgtcaggtgtgcgtttgcactatgaggtttttacctaatttcccataaagaatgcaataaaaaatgaataaaatagaaactaggcattctgattggacattagcatttactgtacagagacagaggatacttcatcttctcactgaatacttaatatatttgtacttgtcgctatatttg

SEQ ID NO: 46053 - DNA, 502 bp, Zea mays
  Clone ID: MRT4577_142007C.1
cgggcgcgtgccgccacacatccgatcgatatgctgagccaacgatcaaagaatcgcacggggaggcgagacatggaacctaggcttgcgagcgtttgaccaacccgagtatactgatgtcttcagagattgtcacatgcgtgtttgaaagagaaactggcatcagatcttaacctacttacatacattcaatacgcatcacaagcttcctgatttaataagacttagggatcctaatgatcaagtaactcttgaaccacattgactaaactactcattgattaacaaggacatatgtctgtacgtgtgcacccaggttccaaactatagaaacaacacctttacggaaccagctctatagaacgacactatgatagaacagagcattcactgcggatgcttataacttgacaccctccaacttcgaactagtgttacagattgagtatgctcctcacctcacttatctgggccttcacaatgaccatgacacatacggcga

SEQ ID NO: 46054 - DNA, 336 bp, Zea mays
  Clone ID: MRT4577_142008C.1
caacacagttcgaaatctccagccggggggaactttgtttacacaataaaacatagcccctaataaatcgctgccttggttttaacagggagggttcggaataattgtttccgggaaacacgtataccatcgttttccccctttttttggggcggttgccaacgggggtaaaccttaccccactgagggaaaaattcccactgtcccagttgggtgggcaggaccagcatcgtttgaataaaacccgccatctgtataaagggggggggggttcccaagcaaatgtgtaaccttttaaaatgcttgggggggaccaactggggacaagttgggaaa

SEQ ID NO: 46055 - DNA, 342 bp, Zea mays
  Clone ID: MRT4577_142009C.1
actcctatgggcgattgggttcctcgaggccggccgccatgttctgctcctgctaaatctctgctagtcatctcgcatcaactcctcctctcacactagggccaactccgctgagtacttcccggaggacgccgccgtccggatgaacgagggcaaggagcacgaggtggttagacgaccagatccccgaggatagccatcgtgtagatcgataggtgctgctacgtcgcgagctggtgcatcctgaatgtgtaatgcgaccggccgaccatgatgatcgccaagcaggatctggacagggtggctgatgcctctatgccgacgatcccgaaacggattcac

SEQ ID NO: 46056 - DNA, 727 bp, Zea mays
  Clone ID: MRT4577_14200C.1
ataatcacgggcctacgtgcacgagcggcccgataggaggagagagcactgactcgtctcccttctcgtctccagcgacggcgaaggcgaagcggaggagcgggagcagaaacagaagaggcagccatggccgtgatggagaagctcaagatcttcgttgtgaaggagcctgttgtcgcagcttcctgtctcatcgccggattcggtctctttcttccagcagttgtccggccaatcctggattcatgggagaccgcagaaaaagttcctccaccacctctaaatgatgtggttgcgggtgtcaccggcaagaaaaagtagtgaacttgcattgttttctcatgtcgatgctgtcccacattttcttccccatgtttttctggcgtccagattggaaggctctccaaagtcacggtctccaaagtgacagcttgcttgattttaaacagtatcgacagtgttttgtctctacacagattgcagatatagcggtttaaacagttcgctttaatccgaaacgaacaggctattttacctgaatcatatactgcaatgtgtcagttttagaattttccccctaaaacaaaggttgatagaatgtcatcagcaccttttgaattgtgttcttcgttaccaacttaccataattctcagaagctattaaggggtgattgtttcaacttaaatttggatataacgaatgaaaacagaaaaatgctttcttcgc

SEQ ID NO: 46057 - DNA, 369 bp, Zea mays
  Clone ID: MRT4577_142010C.1
cccccattctcagaggcttttctctctcctcgcctcctctccttagtctccacgacccaagggatagtgacggtaagcgacgcggctcgagcgaagagggccagggcgaagaggggaagcaccgcagcatgacccttgttcgacgccgtcgtctctgatctccgcgaggatgtcaggatctaatatgggcgaccagagcattctctgcttcctgcacgctgttgtgcagtgttagaacaacccaggcctcccagacagcggtgagcagcccttggtctcttagctatttcaggcaggttacgaatgttccaagcgtgaccacctacagcatactggatgtcttcgccatgggtgtatacaaggtgaagc

SEQ ID NO: 46058 - DNA, 290 bp, Zea mays
  unsure (1)..(290): unsure at all n locations
  Clone ID: MRT4577_142011C.1
cccacgcatccgggatcttgttaaggggaggtctggtggacctccgccggcgatctttcttgtatgatatggccggcggtaacgagctgatcgaggtcatgttccggctcttcgactgcactgacatcattcccaccaattacgatccgggcagcacggtctcctcgctcaaggatttcatcctcactcggcgnccccaaaataacnatataactccaaaaactgttaatgactctaaccttatcaatgctttaatgatattgtaaaataatctgacactttcaaagtcc

SEQ ID NO: 46059 - DNA, 312 bp, Zea mays
  Clone ID: MRT4577_142012C.1
cccagcggcggcttagcgtaggggacggggtgctgtcaggataagaaagctcttgaacatacaggactgaatctcatacctgatatacgcgaagctagtaccaattgggactctcgagcgatacgccggtgatgttaacaaaatctccgacaatgctgatcacggtgcacaacacaaggactgagtagatgctgttaccgcgaacacattgtgtagtaataaaaaacgggcgcgagatgtcacacaccactatggtacgggggcgatctattccggggtaggtacacaagcagagaatcacatgaggtcaaa

SEQ ID NO: 46060 - DNA, 540 bp, Zea mays
  Clone ID: MRT4577_142013C.1
agaggaagaagtcagtaaagtaaattctgtcgctccaattcggacgaggagatgccgcggatccctctgatcaggttccccaagcggaatctcaaagccccatctccatccgcgccagcggcgtcgcaacccgcagaccagcacgcgaccctcatgttccggaggtccagcttcactccttcctaagcgcaaacccctgactgaagaagagattgaggctattatgctggggggctccatttgatatcacctcatatgaattggaaattctaggaacatcaataagattgtatacccgaacttattgcctttgacctctgaaagagtgttattgaagccatgtcgatatggaagtgtgtgttttttttaattcagtctggaagttggctgttgagacatccatttccagtactccgcacatgtaactgagcaaaccgtgaacacatttagttccttgcagaagtgttgagcatggaatggttttgcttttgcataccaggttattttgttgcggatgttttgcattcttgcccccaccat

SEQ ID NO: 46061 - DNA, 354 bp, Zea mays
  unsure (1)..(354): unsure at all n locations
  Clone ID: MRT4577_142014C.1
aatanggggggtggggggtgtaccgggtatttctcattatcaaaactggaacacacggaaagcaaagaaaggcaggagaaaacaaaacatcttttttaatcccttcctatacacagacgacgaccctggggtttttcatgtatgggcaatttctttcggtggcttttctctctttttttccccctggacacaccgacaggccaccgaggttacaggcacatcccccacccacctgacctggttcatcattattctcaatgatgaacataagaaagaaaggaactcagtgataatggggacgggtccctctggctgtccagggcaggcccaggccaccaggtcaattcggtcggc

SEQ ID NO: 46062 - DNA, 598 bp, Zea mays
  Clone ID: MRT4577_142015C.1
ttttcacaagagggcggccggggcagccatcgtcgggcgagcatgaggatcccgtctcctcggcccgacgcggcgccgcggcccccggtttttttaccctttcctttcggtcggcgacgcatacattcggcgagggagaggaagaagtcagtaaagtaaattctgtcgctccaatccggacgaggaaatatgccgcggatccctctgatcaggttccccaagcggaatctcaaagccccatctccatccgcgccagcggcgtcgcaacctgcagaccagcacgcgaccctcatgtcccggttagctggggggctccatctgatatcacctcatatgaattggaaattctaggaacatcaataagattgtatgcctgagcttattgcctttgacctctgaaagagtgttattgaagccatgtcgatatggaagtgttttttttttttaattcagtctggaagttggctgttgagacatccatttccagtactccgcacatgtaactgagcaaaccgtgaacacatttagttccttgcagaagtgttgagcatggaatggttttgcttttccgaaaaaaaaaaaaaaaaaaggggcggcc

SEQ ID NO: 46063 - DNA, 179 bp, Zea mays
  Clone ID: MRT4577_142016C.1
gtgcacttgtatagactgatcacccttgcgctgaagaggctcattctcctctatagaaacgattgcctatctagggctgatcgcccaccttatcctcctcgtgtcgacgactggaagggaccgtctccttaggatgtggtggcgccaccggctgctgcgtcgccatagttcgactattc

SEQ ID NO: 46064 - DNA, 678 bp, Zea mays
  Clone ID: MRT4577_142017C.1
ttgggtacctcgaggccggccgtgccgtcttctcggcgccgcggcccccggtttttttatgctttcctttcggtcggcgacgcatacattcggcgagggagaggaagaagtcagtaaagtaaattctgttgctccaattcggacgaggagatgccgcggatccctctgatcaggttccccaagcggaatctcaaagccccatctccatccgcgccaggtgctcccttttggttaccccccaatatcctcctcttctctacggtccgctagtccagttcgtcaggggatttctctcggtgtttctagtttttctcgatttgatattcgttcatcccgttgttacagcggcgtcgcaacccgcagaccagcacgcgaccctcatgttccggttagctggggggctccatctgatatcacctcatatgaattggaaattctaggaacatcaataagattgtatgcctgagcttattgcctttgacctctgaaagagtgttattgaagccatgtcgatatggaagtgttttttttaattcagtctggaagttggctgttgagacatccatttccagtactccgcacatgtaactgagcaaaccgtgaacacatttagttccttgcagaagtgttgagcatggaatggttttgctttcgaaaaaaaaaaaaaaaaaagcggcc

SEQ ID NO: 46065 - DNA, 786 bp, Zea mays
  Clone ID: MRT4577_142018C.1
ggccggccgggattcgtccagggagaggaagaagtcagtaaagtaaattctgtcgctccaatccggacgaggagatgccgcgaatccctctgatcaggttccccaagcggaatctcaaagccccatctccatccgcgccaggtgctcccttttggttacccccaatattctcctcttctctacggttcgctagtccagttcgtcaggggatttctctcggtgtttctagtttttctcgatttgatattcgttcatcccgttgttacagcggcgtcgcaacccgcagaccagcacgcgaccctcatgtcccggttaggggctaaagcagaggcaccatcttctggagagattaaaaattaccgctttagatctgatgtgccttgcccaccttctcatactgccgtaggaggtccagcttcactccttcctaagcgcaaacccctgactgaagaagagattgaggctattatgctggggggctccatctgatatcacctcatatgaattggaaattctaggaacatcaataagattgtatacccgagcttattgcctttgacctctgaaagagtgttattgaagccatgtcgatatggaagtgtgtttttttttaattcagtctggaagttggctgttgagacatccatttccagtactccgcacatgtaactgagcaaaccgtgaacacatttagttccttgcagaagtgttgagcatggaatggttttgcttttgcatataccaggttattttgttgcggatgttttgcattcttgcccccaccat

SEQ ID NO: 46066 - DNA, 423 bp, Zea mays
  Clone ID: MRT4577_142019C.1
gggcaattaaagcaacgccaggtgctccacccttagttatgccgaagaacacgagggacagaggtcagcccacagtatgggcagcaggggcacagggggaaacacgggggcaacagcacgcccgaatcggaacagcattcaatcaaccaataatattgcacaaacaccaaagaaaactatctgcaccgggacgggggggggggccccaagccaacaaaactggaatatctggggtgggggaaacccaccccaaccgccaaaaaaagaaaaaaaaaaacgggcaaaaagaagcaacgagcgaaaaaaagaggggatccaaggatttcctccttctgaacgagaaaaggacgggggtaattgggggaagctggccgccgacactgcaaaactttggagggaacccccaaaaaagcgaccgggggg

SEQ ID NO: 46067 - DNA, 263 bp, Zea mays
  Clone ID: MRT4577_14201C.1
gaggtagatcctgcgtgtttgcaagatccggtcattctttacgggcccgttaccgccaccgcctaactccaggatccggctgcctaaacctaattcaatctgcgtggcggtacaaagcgcccaccaaaaatacccccgggttcaaccgcttgaacccctatgtgcgaattccagaaccctcagctgggtgggtagccaacagggcacaacgactctgactatgggagagaggcacactcactatggttagaggtactgcccct

SEQ ID NO: 46068 - DNA, 779 bp, Zea mays
  Clone ID: MRT4577_142020C.1
gtccgatcgtccagccctatctgcggaccaccgtcgggcgagcccggaaatcccgtctcctcggcgccgcggcccccggtttttttatgctttcctttcggtcggcgacgcatacattcggcgagggagaggaagaagtcagtaaagtaaattctgtcgctccaattcggacgaggagatgccgcggatccctctgatcaggttccccaagcggaatctcaaagccccatctccatccgcgccagcggcgtcgcaacccgcagaccagcacgcgaccctcatgttccggttaggggctaaagcagaggcaccatcttctggagagattaaaaattaccgctttagatctgatgtgccttgcccaccttctcatactgctgtaggaggtccagcttcactccttcctaagcgcaaacccctgactgaagaagagattgaggctattatgctggggggctccatctgatatcacctcatatgaattggaaattctaggaacatcaataagattgtatgcctgagcttattgcctttgacctctgaaagagtgttattgaagccatgtcgatatggaagtgtgtgttttttttaattcagtctggaagttggctgttgagacatccatttccagtactccgcacatgtaactgagcaaaccgtgaacacatttagttccttgcagaagtgttgagcatggaatggttttgcttttgcaaaaaaaaaaaaaaaaaagcggccggcctacaaaaaaaaaaaaaaaaaggccccccctagggccc

SEQ ID NO: 46069 - DNA, 600 bp, Zea mays
  unsure (1)..(600): unsure at all n locations
  Clone ID: MRT4577_142021C.1
tgtatcctaaggcctacagaccttcacatgcagatgcaacttatgacttcaaatacggtgttagagcagtgcagggaggtggaagatcatcagcaagagagaccattggaagggtggctgcaggagctcttgcaaagaaaattcttaagctcaaatctggagtagagatcttggcgtttgtgtccaaggtgcatcaagttgtactaccagaagatgccgttgattatgacactgtaacaatggaacagatagaaagcaacattgttagatgtcctgatccagaatatgcacagaagatgattgatgcaatcgataaagtacgagttagaggtgattcgattggnggtgtggtcacatgcatgcaagaaatgttcctcgtggggattngctctcctgtatttgancaacttgaggctgaaatngcgaaactatgctttccacctcctgcagcaagggntgagatcggcagtggattgcaggtaccggactaccactggaagtgagcctaatggagagttcccatatggangaggcnggaatgtgaggannagganctaatcgtccaggcggtnttccaggnaggganatccaaaagggnag

SEQ ID NO: 46070 - DNA, 429 bp, Zea mays
  Clone ID: MRT4577_142022C.1
cgctaccaacataggggtctttggtcactgcgaagctgcttttgaaaaggaatctttatctactcttgactagttcttgtctcgcccttttattttccagccttgctgctattgaatggctctccctgccaatggaattgccctctactgatgtctttgctatgggtaaggtgatactggagcgcttttctcatgcaaccctctaaccatgcatgattgaccccgcgttcacaccgggaccagcatttggggtcaatgttgcccctcagctcgagacacctgactctgatgatccagaggagaaacctggctctgatgacgaatttcaagaggaatctgggccctcagagtaggatgaaatgcatataggcctgatgcatttatcaaccttcttcatgtgccattccctatgaatgaatgccctgattg

SEQ ID NO: 46071 - DNA, 318 bp, Zea mays
  Clone ID: MRT4577_142023C.1
acctcgcatgcgcattttacaaggcactgggctattctgttggaaaatctctcgtgcaagaggataaacttcgatctcgcatgcttaccttattcgcaagagcgaacgcatccgggggtcctcctactgcttgccactgatattcttaagcggacaggttgcaacttatgctgacagcatgattgtccctgcgactgctatgcccgatgactatacgagtctagatgttaagcctgatgcctccaacacgttcaccttcaccttggactaccccatgactgacacttagatcgacctgacgccagtgtttgaggctga

SEQ ID NO: 46072 - DNA, 310 bp, Zea mays
  Clone ID: MRT4577_142024C.1
accatcatcatcgagaaacaaattaagccttttacatgacctacaacctaccagcaatgggtgccaatacattatgcgtccttgcccttattgcgcttcttgcgagagcaacaaaagcattcattattgaacaatgctcactagctacacgttctaccattacacaggtgccaccactagtaacttcaacgggttgagaacaaccacctgttcatgattataggctacaacatgcaatacgagcgagcgtgttacaataactaatttcgcaactgcatcaacaactgcttgtagaactaaaattacaaac

SEQ ID NO: 46073 - DNA, 1992 bp, Zea mays
  Clone ID: MRT4577_142025C.1
ttggccgggcgcttattagatgacacaaagatattgaatctagagaagcttacttgggattctgcgcctcctaaagtttgcccatcaccaaacggatgttcgatgaagttgccagcctgcaaaggttccttggggaaatagtgtcatccttgtcggaggtaaaactgagcctgcttctgatcatttatcagtatggtcggccaatacagaaacagagctttggtcacttattgaagccaagggtgatatccctgcagctcgaagcggacacacggtgattagagctggtgctacattgatactttttggcggtgaggacacaaaaggaaagaaacggcatgaccttcacatgtttgatctgaagtcatcaacatggcttccattgaactataaaggcactggaccttctccaagatccaatcatattgctacactgtatgatgatagggtccttttaatttttggaggccactcaaaatctaagacacttaatgacttgtattctttggatttcgatacaatggtttggtcaagagtgaagacccatggtcctcacccatcacctcgagctggttgcagcggaactctctgtggaactaagtggtacatagctggcggcgcaagcaagaaaaaacgacatgctgaaacttgggtttttgatgttctacaatgtaaatggtctgtttgtgtagtgccccctagttcatcgattactacaaaaaaaggttttagcatggttcctttctaccacaaggacaagattgctcttattgcatttggaggaaacaaaaaagagccatgcaacaaggttgaagtattagtggtactgcaaaatgagcattcttttagttggcgctcagccccagaagtggacaccatggtgtatgagtattctccaagcaataaggagcttgctgatcatctccacaaatgtgcccccttgtactctaatagttccatcgcaaggcatagtctcacttctgtgatagaacaccctcctagaagggaacccctctctgagtcattgttgaagcagtccagtttgggcacttcactccatacgcagttggatcacgcagaagagtgcagcctaggtcagaaactgcagaaaccaatcgatgatgacagatatgatgacgtagatgactcttcttcatgccaagatagcactccaaaagggccctacagcaaaaggacagggcctggttttcagaatggcgcggaaaacatggtgactggaggatcaaaagtgagaaggatagctagatgctcttcagatgttggccagagccacttgtacaacacaaaaatagcagacttgatcagaagaaacaccacgctcgaagaccagcttgcgaccgcactggcaagcaaagatcagctagacaagagcttagcatcggtcattcacagcagaggacagctggagaagatgcttgccaacaaagataaggaggctgagatgctgaaagagaagatagcatgcttagagctggcgcaagaagagtcgaacagcctctcgaacacagtgcacgctgataatgtgcgcctggagcgtgaagtggcgttcctgaaggccgtcacaggcgaaacccagaaggagctgcattccactcgtagagttttagcaggggaacagtcgcgcgcgttccagctccaggttgaagtgttccatctcaagcagaggctgcagatactggagggaagatcaggaacacccaacaaacaaccgctataggctatagtggtcacatttctacatttctgcacatcgatcgttgcaagtttgcaaccccccaccccccaatgtaaatgattgtgtggcgagctttatggtaccatgttagtacatgcgctgatgttgatctgtaatttgcagggtatggtaaaactataaatagctgacggattgaaccatgctaatatgtgtagatattgatctgtaatttgcagggacatggtaaaaaaataaaaatgtgcaagctcttcctg

SEQ ID NO: 46074 - DNA, 344 bp, Zea mays
  Clone ID: MRT4577_142026C.1
gggttggaattttttttttttttttttcgaccgacaactgaatgacctaactttaagggtggccttacatgtatgatttcgcccaagcagggggactggaaaaatttctgtaacatgatggccgaactcccactgaatcaccttggagtgtgcctttggactttacaattccacttttaatgttaccaggacaacagcttgaaaaggcattactttcacacagggaccccaattgaaacacacgagttcctggctgaaggaccttctattaccaaccgggggtttgttatttacccacaccctaacccttagaagaagtttagtgggaaccccaaacacacaaa

SEQ ID NO: 46075 - DNA, 194 bp, Zea mays
  Clone ID: MRT4577_142027C.1
ttaatccaaaccaaccaggcactgaacagtcaggatttcaaactgcccatggacgggcagaggtccatcgccgagcatgatgaacatgtactacaacaacatttagccaaacaagaacccaagcagcgacagcgtcgccgacatggataggccaagctctatgccccagcaaaggatccagatggactagggtt

SEQ ID NO: 46076 - DNA, 521 bp, Zea mays
  Clone ID: MRT4577_142028C.1
gggggggggggcccggtttttttatatttaaaacccacaggggggcaaaaccaaacaaaaattggtggattaaaaaaaaacggggaacccccctggggccccaaaacgggcaaaagcccagggtggcggggccaaaaacgacttccaaaaagatcaaggtttgtttggcgggtccccgggggggggcttttggccttttgggtccccggcgcccgtgggtttttggggtttggtcgaggggtccccccccaaccccccgggttttggggggggattggtactatttggggggggaccgctcccttttttgggggagaaaccccccccccccccgttcacgggagggttgatgggattagggcccaacaaaaagacggggttggtcgggaatttccgggccggtttgacctttgggccccaaggcccctttgggtttggaaggaaatgttttcttttctttgccccaaaattggccgggggaaaaactggtctggaaaaggttggtttttactttggggaat

SEQ ID NO: 46077 - DNA, 365 bp, Zea mays
  Clone ID: MRT4577_142029C.1
ccttcttttttttttttttttggttttataagaagaactgttttttataacatgaaacacgttttattcacccccacagggaggggttatattgcacatcgagtttgaaagaagcaacttttcaaggctcatttccaaatgaatcaacccgtgaacaaagcgtttggaaaaccagcgcaccaggggttctgtgtttgcaaaaacaccgaccgagctataaattcgtttgtttaaaaagcaccttaaaagcccgataaaaaccacacatttttgggtcatctacattgtaggtgttaccaaaggggaatgagttttgacaaaaaatgcccagtgctggagtgcaaagctctaacaaaaattggggg

SEQ ID NO: 46078 - DNA, 129 bp, Zea mays
  unsure (1)..(129): unsure at all n locations
  Clone ID: MRT4577_14202C.1
aagagatcaaatcctctcgaaattccacacaacttatgaggtggnnnnntagtntnngncagattanangnntactanntgnnaaagttaggctgaattttaggatattcggaatgaaggtatacttga

SEQ ID NO: 46079 - DNA, 315 bp, Zea mays
  Clone ID: MRT4577_142030C.1
acccccctgaggccccggcccgaaacccaggcgcgcccacgccccggagcacagacccgggccggcgcggggggagcagctgcgcacgacccaaagcacccaggagccccaagccagacagacaggcaccacgcgcccaccagacgagccacgaacccgcgcgagcgccagaagcccaagaccgacgcagcgcacaagcccaggaacaaggccggcggggccgcggagcacgaagacgagccggaggacagagcacgagccagaggcgccggaagcagcccagaggaagcaggcacaagaagaacgaggaccagg

SEQ ID NO: 46080 - DNA, 1000 bp, Zea mays
  Clone ID: MRT4577_142031C.1
gaaaaaaaaggaaacagtaaaaaagcgtggtccccggggataggtacttcgtccggcgcggtatcattgctgagcgatcgctcgctatctggaaatggagtgttagtttcaaatagagattgtgtgggtgtgaagtgtactgaagatcgaggaaaaaaaaattcacacccacccacacacccaaagaaagacacgcaaacatgccggccaccgcctcgccgccaccgctgctcctcgccgccgcgctcctcctctccgccgcgttgctctgctcggcctgccccgtgccgctgccgaagcagacggccgacaacagcccgcggctgcagcgcgcgtacgtggcgctgcaggccctcaagcgcgccatcaccgacgaccccaagaacctgacgggcaactggtgcggcccggacgtgtgcgcctacttcggcgtcttctgcgcgccgtcccttgacgacccgtgcgcgcgcgccgtggccggcgtcgacctcaatcacggcgacctcgccggcacgctgccgttcgagctcggccacctcactgacctcgccgtcctccacctcaactccaaccgcttcgcaggggggctcccggactccctccccaagctctccctcctccacgagctggacgtcagcaacaacctcctctccggcggcttcccgcagcacatcctctgcctccccaacgtcaagtacgtggacatcaggttcaacaacctgtgcggccccgtgcccccggccatcttcgacaagaagatcgacgcgctcttcatcaacgacaaccacttcgacttcgagctgccggaaaactttggcaactcccccgcctcggtcatcgtgctcgccaacctccgcctccgtggctgcatccccgccagcgtggggcgcatggggggcacgctcaacgagctcgtcatgctcaactccggcatccggtcctgcatcccgccgggagatcgggtggctgcgcgagctccccgtgctggacgtgagcttta

SEQ ID NO: 46081 - DNA, 310 bp, Zea mays
  unsure (1)..(310): unsure at all n locations
  Clone ID: MRT4577_142032C.1
ggccgccctggggggggggggggggggcaagaaaaaangcgccagggggggggccaaccccagaaaaaccaccaaaaaaggaagcaaccgaacaagcccccacaagacggcccgaaacgaaacccancgggaaggcacccacgacggcagcgcggccaacccaaaggaggggggggggggagccagccccaggccagnggaagccgggggcaaggccgaagggcgacaaaaaaaacgaaaggcgcaccaccccacaggagaaagggccgggagcacaaggcaacgcgagcngccagcccccagcgacagg

SEQ ID NO: 46082 - DNA, 410 bp, Zea mays
  Clone ID: MRT4577_142033C.1
ccccggggaccggggggtccccccggaaatttcggaccggtccctggaggggtaccattttttcttttagggaggcgttttaaagtttggggaaatcatgggcatagttttttcctggggaaaattgttttcccttaaaaattccacaaaaattacaagccggaagattaaagggtaaagcctggggggcctaaggagggagctaactcactttttttgggttgggctcactgcccgttttccaaggggaaaacctgtggggccatttgttttaataaatcggcccaccccgggggaaagggggtttgctttttgggccccaggggggttttttttttccccagggaaacgggcaaaagttgtttgccctttaccgcctggccctaaaaaagattgaaaaaggggccccc

SEQ ID NO: 46083 - DNA, 239 bp, Zea mays
  Clone ID: MRT4577_142034C.1
ggcacaaaagaaaacgaggcagactctactgcaactatctttttcagctgtcttggttacttgcactcgattttttataatttgagacaataatagcaacacacaactaatatctctgaagctagcgatgatccaatccattattatggtctcgaaactaagatctatgtccgctcccagtgaacgaggggcagattgaacaatttagagaccaaacacctgagcccccacccattgcc

SEQ ID NO: 46084 - DNA, 498 bp, Zea mays
  Clone ID: MRT4577_142035C.1
atgaacaagacatcagcgttcaagatgccatcacgaacggagctctggttccgcctccgcgggtatgaacaaccccccacatcggggggcccgcggagcaacgaggcccccacagggcggacgccgctgcaaccttgtcttcgcccacgccggcgctcgaggggcgaagacaagtacaaagagccggaggcccggagcgcggatggtggcggtgatcccatcggcgacggggacttctcgagccgcctccacctcggcaccaacgacaggggccgtcagcccatcggcagatccccactcggatcctcctggacgagtggagcaccaacctccgcgcggaggcgttgtaccggggcaaaggcaggacagccccagaacacgaacgccgcccttgccgcgcgcggcgtcttgagcggacctccggtgcgcacggcgcgacaatcgccctcgcgccgagagggggcaccgcgccccgagccaacgagcccaacacgctga

SEQ ID NO: 46085 - DNA, 2334 bp, Zea mays
  Clone ID: MRT4577_142036C.1
caaaactattgttgatctccgggaagaagatgttaaagatgatttgtacctttcagcagttcaggaggctgtctcatctgggaagatagaggtggtgaatatgctggttgagatcggaactgcaccatcagctgaacaggttaaacaatttgcagctcttgtgtcagatggcgcaaagaagcccatttatctccatagcaaagaaggtgtttctaggacgtctgcaatggtctcaagatggaaacaatatgttactcgttcagagagattggctgtccaaaatcactatataaatgggaatggtaaggtcctgacaagtgacaagaccaagcagcacacgggcagcccaagctcctctatgaatcgaactgaaattggtatggtaacggaatctgataggaccatgaacaatggagaatcatgtgagatagacatagagatggctttgcataatctggaggtcactaatgcccttaaatatgatcaaaggactcaacaagctgaaatgcttgggaccgaggcagaacgcttgtcaaactgcaaactcgagaggaacccccttaaagcacaatttactagtggggacatttgctctagaaaagagatgaccaagttttttagaagcaaaacagtttatccaaaatctgttctgaactctaggagacgatcaagtagcttggttataaggagaaaacaaaatctctgcacggagcgtagtggaaccaatgactatgaagcagcagagtttgcagttctcagaagttcaaatggaaaatcatttgacagtgattatattctatcagttgcttcaggtatcactgatggaaaaccttcaaacaatgaagcctcattaattgaggaaaaggaaagggaagtttcagttgccactattgacactagagcatctgccaacagttctaatagaaaggttcaggttggatcacaagaatctgctgaaaagaatagtaccccttatcttgagagaaacaaatcagataatgttgatagaaatatgtgtgcatctgcaactggtgttgttagactccagtcaagaagaaaagcagagatgtttctagtacgtactgatggattttcttgtactagagaaaaagtaacagaatcatctctggcttttacgcatcctagtacccagcaacagatgcttatgtggaaatcacctccaaagactgtcttacttttgaagaaattaggagatgagctcatggaagaagctaaagaggttgcttcatttctgcatcatcaagaaaagatgaatgttcttgtggaacctgatgttcatgatacatttgctagaattccaggttatggttttgtgcaaaccttctatactcaagataccagtgaccttcatgagcgaattgattttgttacatgcttgggtggtgatggactcattttgcatgcatcaaacttatttagaacttctgtaccacctgttgtctccttcaatctcggatctcttgggttcttaacttcacataatttcgaaggtttcagacaagatttgagagatttaatccatgggaacaacacacttggaatttatataactcttagaatgcgtctaagatgtgagatctttcgcaaaggaaaatcaatgcctggtaaagtgtttgatgtgctgaatgaagttgttgttgatcgaggttccaatccatacctatcaaaaattgagtgttatgagcataaccaccttatcactaaggtgcaagctgacggggtgatagttgcaacaccaactggcagcacagcatattctactgcagcagggggatcaatggttcatccaaacgtcccatgcatgctgtttactccaatctgccctcactcactgtcatttagacctgtcatccttccggattctgcccggcttgaattaaagataccagatgaggcaagaagcaatgcatgggtttcgtttgatggcaaaaggaggcagcaactgtcaagaggagattctgttcgtatatccatgagtcagcacccactcccaactgttaataaatctgaccaaacgggtgattggttccgcagcctgatcaggtgtctcaactggaacgagagattggaccagaaggcattataggcactagaaaattttttattgtttctgtacatatgtaaatttatacacatatagttttgtttttctgccaacatgtacaacgtgtaacatcaaagaatcttgcacgtaaggagctccgtagcttactttatccatgtattcacgtgcttcacaaatcaacttatatattatatgcccgtacgttgctacgagagcttaaaatataaaaaaaaaaaaaaaaaaaaaaa

SEQ ID NO: 46086 - DNA, 1344 bp, Zea mays
  Clone ID: MRT4577_142037C.1
gaggactggaggcggtgggcgcggcgggtccagccaccgcgcggttcacggcgcgggcgaatgccggccgtttcaacggcgggcggatcggcctgttcccctggcgctgctggcccccctgggcggtgactgcgaggcccgatcctgaggcgggcggcgactccgagagggcggttggctggttttcttgccaagtgccagtcagtctctctcgtctcggcgacgccgcgcgaaggtcggaactcggaatcctcttcccggcgtcgtcatcccacccccgtcggttcccttctaactcctggctcctggggccgccgccgagccgaggagaggcgcacgcgcctcgggaatggagctggcgcctccgctccgcctacgggatccgagcctgggatggcttcctgcaacttgcgcaggactcaagtgtgatgaactgatggggactcttggactataactggtttcctcttattcttccagccaatcctgacaaatgtggcatctcaagctgacagctttaatttatggctctcttttctttatgcacattccatatgctagaggttctgacctaaacaccgataagcaggcccttcttgcatttgctgcatcactgcctcatggcagaaaggtcaactggacctctacaacccaagtctgcacgtcctgggttggcattacatgcacaccggacatgaagcgtgtgcgtgaagtcaggttacctgcaatagggctctttggtcctatcccatcaggcacacttagcaagctcgatgccttggaggtgttgagccttaggtcaaaccgtcttactattaatctccctcctgatgtaccatctattccctcacttcgctctctttatcttcaacacaataacctgtctggaatcataccaagttcactttcttccagtctaacattcttagacctgtcctataactcgttcaatggagaaataccatcgaaggtgcaagacatcactgaactgacagcattgcttctccagaacaactctctttctggacccatccctgaccttcgcctccccaagttgagacatttggatttgagcaacaataacctgagtggacctataccaccctccctgcagaagttcccagctacttcttttctgggaaatgcctttctgtgtggatttccattggaaccatgtccagggacaccacctgcttctccatcgtcgccatcgtcccaaaatgccaaaagaagcttctggaaaaagctcagccttggtatcataattgcaatagttgctggaggaggggttgtattcatattgatcctgatcctcttggtatgtatcttcaacccccccccccc

SEQ ID NO: 46087 - DNA, 471 bp, Zea mays
  Clone ID: MRT4577_142038C.1
tgacactatagaagagctatgacgtcgcatgcacgcgtacgtaagctcggaattcggctcgagaagataccagatgaggcaagacgcaatgcatggctctcgtttgatggcaaaaggaggcagcaactgccaagaggagattctgttcgtatattcatgagtcagcacccactcccaactgttaataaatctgaccaaacgggtgattggttccgcagcctgatcaggtgtctcaactggaacgagagattggaccagaaggcattataggcactagaaaaccttttattgcttctgtacatatgtaaatttatacacatataggtctgtttctctgccaacatgtacaacgtgtgacatcaaacaatcttgcacgtaaggagctccgtagcttactttatccatgtattcacgtgcttcacaaatcaacttatatattatatgcccgtacgttgctacgagagcttaaaa

SEQ ID NO: 46088 - DNA, 1047 bp, Zea mays
  Clone ID: MRT4577_142039C.1
ccggccgggatttgctagaattccggttatggttttgtgcaaaccttctatactcaagataccaggtacaattaaacatttatgtttgtgataagtgcgaatgtgcatatattttcatgatactatttactaatgtttgtgtttcagtgaccttcatgagagagttgattttgttacatgcttgggtggtgatggactcattttgcatgcatcaaacttatttagaacttctgtaccacctgttgtctccttcaatctcggatctcttgggttcttaacttcacataatttcaaagatttcagacaagacttgagagatttaatccatgggaacaacacacttggagtttatataacccttagaatgcgcctaagatgtgagatctttcgtagtggaaaagcaatgcctgataaagtgtttgatgtgctgaatgaagttgttgttgatcgaggttccaatccatacctatcaaaaattgagtgttatgagcataaccaccttatcactaaggtgcaaggtgatggggtgatagttgcaacaccaacaggcagcacggcatattctactgcagctgggggatcaatggttcatccaaatgtcccatgcatgctgtttactccaatctgccctcactcactgtcatttagacctgtcatccttccggattccgcacggcttgaattaaagataccagatgaggcaagaagcaatgcatgggtttcatttgatggcaaaaggaggcagcaactatcaagaggagactctgttcgtatatccatgagtcagcacccgctaccaactgttaataaatctgaccaaacgggtgattggttccgcagcctgatcaggtgcctcaactggaacgagagattagaccagaaggcactatagacactagaatctttttttattttttgatgtacatatgtagattcacgcacaaatatagttttgttttttctgccaacatgtacagtgcgtagcatcaaagaactttgcatatcagggatctaatcaggtggctagagggataaatgagagttaat

SEQ ID NO: 46089 - DNA, 3243 bp, Zea mays
  Clone ID: MRT4577_14203C.1
tgaaagatgaatttcagaaagctagagactgggtggcagagtcgttagactttgacaaggattatgatgcgagtgtttttgaaacgaccataagggttgttggaggtttgcttagtgcatatgatctatctggtgataaagtatttcttgataaggctaaagatattacagatcgactattacctgcttgggatacaacatctggcatcccctataatagaataaacctagctcatggacgagcccataatcctggatggaccaacggcgatagtatccttgcagattctggtacggagcaacttgaattcatagctctgtcacagaggactggggatcccaaataccagcagaaggcagagaacgtcatcacacagcttcagaagatatatcccagtgatggtttgcttcctatttacataaatcctcattctgggacagcgtcatactccactatcacgtttggtgctatgggagatagcttctatgaatatttgctcaaggtctggatccaggggaataaaactgagcatgtaaaacactacagacaaatgtgggagacatcaacggaaggtctattaagtttaacaaagaaaactacaccatctaattactactacatttgtgaaaagaatggtggctcattgtctgacaagatggatgaacttgcttgctttgcccctggtatgctggcattaggagcctctggttatgggccagaaaaatcagagcaaattatgaatatggcaaaagagcttgctaggacctgctataatttctaccaaaccactcccacgaagttggctggcgaaaattattttttccacgctggacaggacatgagtgtgggcacatcgtggaacatcttgagaccggagactgttgaatcacttatgtacctatggcgcatgacggggaatacaacataccaagattgggggtgggacatattccaggcatttgagaagaagtcccgtgtagaatctggatatgtgggactgagagatgtgaacactggtgaaaaagataacatgatgcagagcttcttcctggcagagacgctcaagtacctctacctacttttctcccctccatcagtcatatcctttgacgagtgggttttcaatactgaagctcacccattgagaattgctccagtaaattataacaaaggcattggaacaccggtccgtccattcgggagaaaacagggaaagcctgagtaaccttggataaagagcagtggatttttttttgaatccgacgtctgattctggcctccctgatgaagatgtgttctgacacgagggaactttctgcctgaagcagcaagggttagaaatcacggcaatagattgtttagagagaaaaatcataggtagatcatgatgctatatgcggggcagtgacctccatggggtggtatggtcggagctcaagagcccccatagaagcttttatctttggacttgcttacgcaccctgatgtgcgttgttgatgtgtagcatacatctaactcactgttcatatgttgttgctttcctgggacctctgcggagctgtattgtcattatttggcccatagttattactttataatgggcctgaaagatgaatttcagaaagctagagactgggtggcggagtcattagactttgacaaggattatgatgcgagtgtttttgaaacgaccataagggttgttggaggtctgcttagttcatacgatctatctggtgataaagtatttcttgataaggctaaagatattacagatcgactcttacctgcttgggatacaacatctggcatcccttataatagaataaacctagctcatggacgagcccataatcctggatggactaacggtgatagtatccttgcagattctggtacggagcaacttgaattcatagctctgtcacagaggactggagatcccaaataccagcagaaggcggagaacgtcattaaacagcttcaaaagatatatccaagtgatggtttactgcctatttacataaatcctcattctgggacagcatcatactcaactatcacatttggtgctatgggagacagcttctacgaatatttgctcaaggtctggatccaggggaataaaactgagcatgtaaaacactacagacaaatgtgggagacatcaatggaaggtctattaagtttaaccaagaaaactacaccatctaattactactacatttgtgaaaagaatggtggctcgttgtctgacaagatggatgaacttgcttgctttgctcctggtatgctggccttaggtgcctctggttacgggccagaaaaatcagagcaaattatgaatcttgcaaaagagcttgctaggacctgctataatttctaccaaaccactcccacgaagttggctggagaaaattattttttccatactggacaggacatgggtgtgggcacgtcgtggaacatcttgagaccggagactgttgaatcactgatgtacctgtggcgtttgacggggaataaaacataccaagattggggatgggacatattccaggcatttgagaagaactcccgcatagaatctggatatgtgggactgagagatgtgaacactggtgaaaaagacaacatgatgcagagtttcttcctggcagagacgctgaagtacctgtacctacttttctcccctccatcagtcatatccttcgacgagtgggttttcaacactgaagctcacccattgagaattgttccagtaaatgataacaaaggcattggaacaccggtccgacaattcgggagaaaacagggaaagcctgagtaaccttggatatagagcagtggattttttttttaatccgccgtctgattctggcctccctgttgaatgtgttctgacacgagggaactttctgcctgaagcagtaagggttagaaattacggcaatagattgtttagagcaaaaatcataggtagaggatgatgttatatgcggggcagtgacctccgtgaggtcaagagccccatagaagcttttatctttggatttgcttacgcaccctgaggtgcattgttgatgtgtagcatacatctaactcactgtccatatgttgttgctttcctgggggctctgcgagctgtattgtcattatgtaccccctagttattacttcttttcagatatgattcatataaatataaaacgtaaagtatctacgttattagttgggtttt

SEQ ID NO: 46090 - DNA, 516 bp, Zea mays
  Clone ID: MRT4577_142040C.1
ccggccgggtttgccatcttacccgtacacttcaactactgggcctatatctttccggctatgatttgcgctacgctcggtattgacatcacctacaacgttagcaacatcttcatcacgacttcgttaccgaaagcgcgtcagggactggcgggctcattcatgaattcgctgttgttcctaggtatcgctgtatttctctcctttgccgatctagcggtgagtgaaacggaagagagaggccaaagaggaagctacaaagttgctttctggctcgctactgcgcttgctggagcgggtgtaattatcatgttcttgggtgtcaagattggcaaggcgaagagcgatttaacaatcgaggaaagggaagaattggagaatgagttggtgagaaggaacacgaatgagtgaagagatcttgtggtcatcgcgcgtcattactggatgtatagtccagttagattctattctcgtatatatcttatgatgcctaaaaaaaaaaaaaaaaaagcggcc

SEQ ID NO: 46091 - DNA, 335 bp, Zea mays
  Clone ID: MRT4577_142041C.1
gaattcttcttgagaagagggtgatccaaatatctgagttgtgttgactgggattctgtccgcagtggggaaggggtctgattacttcacaagctctctccccaactcgaaagctggcaagaagttcttcaacaccgttgtctgtagagatcgaccttgctccgcattccccactaatcattacctgcaacatccaagtaagtagacataaagaacgtttccaaactggcacaacccaaaaagtatcccgagataatctaacaagtacggaaacatacccctcgtcgcaaccaacgaacggctgaactgctgaggcaactcatgtaactcctaca

SEQ ID NO: 46092 - DNA, 561 bp, Zea mays
  Clone ID: MRT4577_142042C.1
ggccgcttttttttttttttttttgcttttttttttttttttttgtctagttttatttgaatgcttcatattgccacagcctcggtgtggaacactccgggcgtcatatttgatcactaccatatgcttgctccgttacacatgcagactagcacccactcaaatattgcccaaaaacaacaggccgacacaatactgactatgaaacagatagctaagtgaaaggtgcttcgccaattgtgatctccaggtttggatgaggcgaagtggcttcggccaagcggaccatatccagggttgagcattcggagatctctgttccgtgaagtcctttatgagaatacctggaggagactacaatcctgggcatgctctaggagcatggggcccagatgataatgcgacgaagggaaaaccaccactgaatgcacttctgagaagaaaggttcgaaacggatgggttggcacatgctgtggactgggtggacagaggagatgcgtcgctgaagtcggctcagtcatggcggtccaggcacgttggatcgggactttttaacaacg

SEQ ID NO: 46093 - DNA, 220 bp, Zea mays
  unsure (1)..(220): unsure at all n locations
  Clone ID: MRT4577_142043C.1
gcgagagaggctgcgttactagttttgtttcacatgtgtcttggatcattcttgttcgttcaagctaagggggccaaccagatcccgtttaatataaaagcttctgccccngattttttggttatataaaaaggagaaggggcccgtgggcaccctcccccctagattttcagggggaggtgattgaattttcattcggggaaaaggcggccaacaaaaa

SEQ ID NO: 46094 - DNA, 162 bp, Zea mays
  Clone ID: MRT4577_142044C.1
actctgaagaaaaccaagctgctcacaacgtggctaaatattaaggatcacagggctcctacggtgctgcaatacccaagtctaacacaggtatctgggtgcaatgaggtaagactatccttggaacatgtttaactctcttattatctacaaattttctgg

SEQ ID NO: 46095 - DNA, 113 bp, Zea mays
  Clone ID: MRT4577_142045C.1
gcggaggctacattagcaagctcctatctctgctagccgagcgcgagcaggtgtcacctacgctctacagctagcgcaactaacgaccatccacctgaaagaggcagtgcagt

SEQ ID NO: 46096 - DNA, 598 bp, Zea mays
  Clone ID: MRT4577_142046C.1
gggtacctcgaggccggccgggatttttttagtttccttctcttaccgagaacccggacttttcactcttccgcggacggaatgcctagctgtcgcggcaaaatcatatctctgttcacgctcgcgaattttgcggttcttccttgccgcgtatcgatcgattccgagctgattcgagtgatattgatcgatttccttcgcttcgcgattgattatgccggcctaggcgccaatccttgagatctctctaaggggtagagcgcgggcgaccgtcggtcatgtcgaggtgcttcccctacccgtcgactgtgtacttgtcaaactccagtggccgtgagcgaggcggagtcgaccgctaagaaagaaaggtaaagggctcacaagaagaaagataaaaggagtgacaagaaagctccccaactgggtgagacgtccaaacattcgaagcacaaccataagaagagaaagctcgaagatgtcagcacaggtgatcgggagcccaaaaaagaaaaagattccacctccaagctcccagtcccagccatggcgtctcatgatcatcaccactcccactcccacgacgaccaccaccaccatt

SEQ ID NO: 46097 - DNA, 304 bp, Zea mays
  Clone ID: MRT4577_142047C.1
tcggtctcaaggactaggaggacactgttattagtcaccgcgaggttgccagatgttgagagcagaggccagcagatactacagcattctactgacacggagatagcattggaacagtgttcttgagccatggttaaggcgaagactgagatgatcagtgtggtgattggccatgtcctctgtcgcaagggaaggaatgctggccagcaggagtacgagatcggaagagtggacaaggaagggattgacagggtccagactgaggatgtcgatgagaacatgcggaaagctaaggctgccttga

SEQ ID NO: 46098 - DNA, 501 bp, Zea mays
  Clone ID: MRT4577_142048C.1
ctgtccgcaacacatggacgaaattaaaatcgtctccaacatgtggctctctcagctgttactactctatggttccgtgcgcaaactttatcagctgatcgttgaagctttcctctcatcacagatctcaaccataccgtactcggacctggttatcacttttcaactctctcaaaaatgtggatgaacgagtcctaatggaccaatgatatacaaaggaatataccatcttttttaccaatataacccatacggtgccgtttgggatgtgagaatcgtgtggggacactccacgtcagttgacttagtcaactggatttcacaacctccagctgttaatccatctcagccgtcagatatcaacggttgttggtcaggctccgtcacgattctaccaaacggcaaacctgtgatcctctacaccggcattgaccaaaacaaaggtcaagtccaaaacgtcgccgctccggttaacatctctgatccttatctccgagaatg

SEQ ID NO: 46099 - DNA, 387 bp, Zea mays
  unsure (1)..(387): unsure at all n locations
  Clone ID: MRT4577_142049C.1
gctatcggnntatcctctccctntatnnttttcttcnnttcgntccgncccccacacattgtcantggcagnctccccttcgcttcgcttagntcggcgnnnnnatggcganctccnccttctctccgngnnccgncnnnctnnagncnntgggggngcgcgccnggcccgcccggccccctgctccccctcctccccttcccgcgcctccgcgccccctgcgccccccgccggcggggaggcgccgcccgccgcgcagcggggcccagggggagccgcnctccgncgccgcntcccgcggccctgcccgccgggnccaggngcccgcccgccgcgcccgcgnccccgcccgngcccgccnccgcgcccgcgccggccccgcccctc

SEQ ID NO: 46100 - DNA, 321 bp, Zea mays
  Clone ID: MRT4577_14204C.1
gaccggccgattccgggtcgaccgaccgtccgacctggggagccaagaccgcgcgccacgaagaccatcctgaacggtccccaacgggttgggtcctgtcgcactcccctcgcgttccttccccacccgtgcgggcccccgtcgcgctcacgtgggctcacactacagccgctgcgagctgacttagcgcgatggacatgttggcaccggggagtgggagcggtcggacccacctacctcattgcgtgcggcaccgagcacaggatccgcgcccgggtccccggcgccccgctcgtcccaaggcaggcgcgcgcgcatccc

SEQ ID NO: 46101 - DNA, 394 bp, Zea mays
  Clone ID: MRT4577_142050C.1
gggtgagaaaaccagaatgcgtgtgcctaaaacatgctaatcacagcccaaatgtggtcaacaaatctatacaaacgccctctcaaaggcttctttcgcaaaaaccaaagaacctctcctacatgaagatcacgatcaccaaggcgtagaggcatgtgcctctcgttcgggaaaaggaggatatcatagggcttggcctctgccattagcgcgttaatgagccttgccctgtgcctgaaatgctcgtcttcgtcaatgatccgatggatagaggagcattctctcctacgaggttcttggcgtggaccagtattgacccgaactggtaagcatcctgatgctccgtgggcagacctaagcactcttatgtgtctggaaaccttgctaggaacat

SEQ ID NO: 46102 - DNA, 3099 bp, Zea mays
  Clone ID: MRT4577_142051C.1
gaatggccgcctggccatcggattcggccccttcgtcagtttcagtttggcacctccgaagcttccgtccgaatctctgctgcctccttcctcggccaggcttgcgggcgatggcggcggagcagaccgccgagcagttccggggccaggcgcggctgccccacttcgcgtccccgcggcgctacgacctgcgcctcacgcccgacctccccgcctgcgtcttcactggctcggtggcggtttccatcggcgtggccgcgcccacccgcttcctcgtactcaacgcagccgagctcgacgtcgcgaccgggggcgtcagcttcgcgcctcagggctccgaccaggtgctacaacctttggaggttaccaacgtgccagaagatgagatcctgattattcgcttcaatgaggtgctttctatcggggagggaactttgacgattgcattcaaggggactttgaatgataagatgcatggattctacagaagtgtgtatgagcttaatggagagaagaaaaacatggctgtaacacagtttgaaccagctgatgcaaggcgctgcttcccttgttgggatgagcctgctttcaaggctgttttcaaaattactctagaagttccttctgagacgattgctctgtcaaatatgccagtaattgaagagaaggtcaatggccctaccaaaatagtctacttccaagaatctccgataatgtctacatacttagtggctgttattgttggcaattttgactatgtggaagatttcaccacagatggtactagggtccgtgtttacacacaagtcggtaagagtgcgcaggggaggtttgctctagaggttgccttgaagacattggtcctgtttaaggagtattttgctgtgccataccccctccccaaaatggacatggttgctattccagattttgcagctggagccatggagaactatggcttggttacataccgtgaaacagcattgctatttgatgagatgcactctgcagctgccaataagcaacgggttgcagttgttgtagctcatgaattagctcatcaatggtttggaaatcttgtcacaatggaatggtggacacatctgtggcttaatgagggctttgcgacttgggtgtcttacttagctgcagatcagttctttcctgaatggaatgtttggactcagtttctagaggaatctacaataggtttcaagttggatgctcttgcaggttcacatccaattgaggtggacataaatcatgttgatgaaatagatgagatatttgatgctataagctataggaaaggagcttctgtcattcggatgctgcaaaactatcttggggctgaggtctttcagaattctttggctgcatacatcaaaagatttgcgtattcaaatgcaaagactgaggacttatgggctgcccttgaagaggggtctggtgaaccagttagaacattaatgcattcatggaccaaacagcaaggttatcctgtcattactgtgaaactcaaggatggaaagttccaactggagcagacacaatttctttcaagtggatctacaggagttgggcaatgggttgttcccatcacactatgttgttgttcctactcgcgccaagcgaagttcctttttcatgggaaacaagaagattttgatttgtcagcgtccgggtttacggactgccaaaagaaagatggcttctggattaaacttaatgtcaaccagaccagcttctatagggtgagctatgatgaggaacttgcagcccgacttcgatatgcaattgaaaccaacaaactgggtgcagcagacagatatggtgtacttgatgatgcctatgccctctgtatggctggcaaacaaaagctagtctccttgctgcatttgatttctgtgtacaaggatgagactgagtatactgtgcttgcacacataatcacgacaagtctgcacattgccgagatgatggttattgctgctccagaggagttggttcatctgaagaagttcctaattgatttcctggagccatttgcgctgaaacttggctgggatgctaagagtgacgagggccatctgaacgctttgttaagaggtacactcttaaccgctctggcagaacttggccatgaggctaccataaatgaagctgttcgtcgatttaatgtctttctggaagacagagagacaccactccttcctcccgatgttcgaaaggcagcatatattgctttgatgcagacagtgagcaaatcaaacaaaactggctatgaatcactactgagggtatatagggaaaccgatctaagccaggagaaagttcgtgtgttaggttctttggcatcatcccctgaccatgatgttgtccgtgaagtattgaatttcatattgtcacctgaggtgaggaatcaggacgcaatatttttgctaagaggggtgagttcaggggcacacgaggtagcatggcaatggctgaaggaaaactgggattacatattgggagcctactctggaactctgctcacctatttcgtcaacataactgtctcgccactggccaccgatgaacatggtgatgaggcggaggagtttttcaagagcagaaccaaggcgaacatcgcgaggactgtgaggcagagcatcgagagggtgaggatcaatgcccaatgggtcaagaacatcaaggccgaggctgacctcggcaatgttctcaagaagctggcttacaagcactgatcagagacggtccactttcatttctgtgttagtcctagtaccgagatgtaactttgttctctggaataagtggattaataaagggcactttcgtttgtgtgtcgtcctgagctgccttgtccgtagattcttacaaactgttctgtgcgaaagctaccatgatagatatgcgtcgaattgattgattctatatcctgataattgattgtgtatcgcccatgtcgcacaggagaacgataaatttgttccaatgattgactgactgcgtgttggctttcaaaaaaaaaaaaaaaaaaaaaaaaaaaaaaaaaaaacaaagattttagccaaattccccgttgtagaacga

SEQ ID NO: 46103 - DNA, 248 bp, Zea mays
  Clone ID: MRT4577_142052C.1
tatgctcctgccaatgttcgttgtcacactcgcgccctccctcgctttagctgcgctggtttctgctgtatccattactgtattaattcttcttgtcgtctctcccacgcctcgcttcctcgcgttcgtccacattctcctctccgctctcttcatcaccgcaccctctccaggcaactccgtagccatccccaacatccttgtaactgtacccactaccgcaacaactgtacccctatatgtcacct

SEQ ID NO: 46104 - DNA, 300 bp, Zea mays
  unsure (1)..(300): unsure at all n locations
  Clone ID: MRT4577_142053C.1
cagagaccgaaaggcgcgagaagagcaacgcgaggccggacagggcacggaaaaaggagcgacaggaggaagacaagacacaacacccagcagaccaccaagaaggcaagccggaggcaagcaaggaggaggaagagcgaagggagaccccgacaccaccaacgaggagacccgcggcgcgacgaagagagggaggagagaacgagacacgcgacgccgcgacccacacggaagacgcccgccgcaagaccgggagcggcccggaggnagaagacgcgcccaagcgacagggaccgcacc

SEQ ID NO: 46105 - DNA, 334 bp, Zea mays
  Clone ID: MRT4577_142054C.1
aaaaaaaaaaaaaaataaattgttttttttgacccgaattaaagtcctttttgggggggcgaaaaaaaaaaatacagttgcggagtttgaaaaaaaaaacatttccaaaacaaaagaaaaggaaaattctactattcgtgcattgggcccctatcccccccaatcttaaatcatttttactttattggcaagggggacccaatttgggctgggggaggtaataaaaaaccatttttaccgttttggctggccgggtaacaagccaaaaaaaaatttttgtttaaaaagcttgcctgaaggaacatcccgggtttagttttttctccgagggctt

SEQ ID NO: 46106 - DNA, 478 bp, Zea mays
  Clone ID: MRT4577_142055C.1
tgccctcagctgtgagagtctctgtatcagtcgtgagcagcggagcgggcgcccttgaggttggcggcgacggaggccgggacggagacgtcgcgggtgggctgatccagctcccagggggagcgcaccatgccctgcacgcggcggtggtcggggttgtacactgactgtacacttggtatggggcatactggcaactgccatcagtaaaagaaatgttactagagcttgcagaaacaaggctattcattatcgaacaagatatgagctcatggaagtaagaggattgcgaggcattcgcctttttagatgctactggagcatatgggcttttgcccgccaatgagtatgatttgtccagcaagcgccacaagaaaggggcaccctctgggtgcctaatttgattgccaagaatctcaattggtttggaagtttctccagcttttattagaacagtgtaccaaacttgattgaagac

SEQ ID NO: 46107 - DNA, 298 bp, Zea mays
  Clone ID: MRT4577_142056C.1
cgagtgagaccgttagcactcgtctgctggaccgcaggatgagtcgaggcagctgcggatcgctcgagcaagtggatcctccgtccagggctgggatgccaagtgcatgcaagttggcggaggccacacgctgttgctgtcgtacgttcgcttcacttgccgaggtcttcgttcaacgccgcagccgtgaaacgcttgtgattttctttacacaagccgggaaggttgctcagtgcgtagtgggaggcggggaaggtggctccgtggtgggagggcgtggtgacttttcttcatccgc

SEQ ID NO: 46108 - DNA, 2821 bp, Zea mays
  Clone ID: MRT4577_142057C.1
tccaactggccctggtcctgctggtgagcgcgtgcccgtgcgcactagggctgtcgacgccggtgggcaggttgggcgctctcctgacggccgcgaggacggggctcctcatcaaaggaggggacgtcctcgaaaccctggccaggatcaagattgccgcctttgataagacaggtacgatcactcgaggggagttcagcgtcgaggagttccaggcggttggcgagcgcgtcactacgccacagctactatatcggcacgagggcattgagagcagatcgagccacccaatggcgtctgtgctggttgattatgcccagtcgaagtcagttggacccaaatctgataatgtcgccgagttccaaatcttccccggtgaggggatttacggtgagatcgatggggaaggtgtgtatattgggaacaagaggattttgtcaagggcctcatgtgaaacagttcctgacatgaaagatatgaaaggagttaccgtcggatacgttgcctgcaaagggcagttaatcggagtattcactctctcggattcctgccgaactggatcagatgaggccatcagggagctgaggtcgctgggcatcaagtcagtgatgcttactggggatagttctgcagcagcttcatatgcacagaaccagcttgggaacatacttgatgaggttcactctgagcttcttccagaggacaaggtgaggatcgtcgacgagctcaaggcaaagcatggcccgactctgatgatcggaaacggcgtgaacgatgccccagcgctggccaaggccgacgtcggagtctcgatgggggtatctgggtcagcggttgcgatggagacgagccacataaccctgatgtcaaacgacatccgccggatcccgatggccgtccagctggcgcggaggacgcaccggacgatcgtcgtcaacatcgtcttctcggtgatcaccaagcttgcgatcgtcgggctcgcgctcgccgggcatccgctcatctgggcagccgtcctcgcggacgtcggcacatgcatgctggtgatcatgtacagcatgctgctgctgagatcggaatcgaacggcggccggaaggtgaagaagtgctgtgcctcgtcgcagcatgggtcacactcacacgccaggaagaagcattgtgtctcccaccactgttcagatggcccgtgcaacaagtcgacggcaggctgttccaaggaatcgccgtctgctggtaagcatgcttgcagtgatcatggccatgcccacacccactgcaaagagccgagcaaccaccggccggaaaggcatgcctgtcatgatcacggccacagccataaccactgcaaagagcccagcagccatgtggttacagaaaagcatgtctgccatgaccacggcaacacccatagccactgcgaagaggcaggcaaccagctgctgcttgtagagagccacggttgcaatgaccatggccatgggcatagccatgaccgctgcaaagagctcagcagcccgcgcttcaccagcaagcacgagtgccatgaccatgagcatagccactgcaaagagcccaagactccgtgtgctgacagtgaggctgcttgccatggccatggccatggacacgaacatcggcactgcgaaggggacagccactcacacgctacaggtgagcatggctgccatgaacatgatgcgcacagccactgcgaggagcacggccattcagacaccgctgttgagcatgcttgcgagcatgagtgccatggtgagcaccaaactgtgcacgctgtggaaacacaccactgccatgaccacgaccatgagcacggacagcatgagcttggggagatcgaggaacctgagaaggactgccacgaccacagccaccactgctgccatgagcctcacggcaaggacaaggtcgcggccgagccagttgaagaggtcacgatctcaatcgctgccctgcccaaagacgaaggccaccaccacagcgaggaacaacacaatggggagcactgcaggaaggcgaaagactgcggcggcggcggcggcgctgctcccaccgactgcgctgcgagcaagaactgctgcggcgtcaaaggtggagacgcctgctcgagcgtgcaggccgcgcgtgctagggagaccggcccgtgctgccggagctacgtgaagtgccccaggacggcggcggcgagcaggagcagctgctgcggccacagcatgctgaagctgcccgagatcgtggtagagtagtagtagtactgtagtagggtggaaattccaccgtgggagaagggtgtgcacatatgaacaagcaactgtgaggtgagtgtgactcgccggcgtaaatgtagactaagatcgccggtgcagggtgtttgatctagtagtctagttactatataggtttgctggagaaaaaaatgatgtaggattttgactgagcagagcagggggtctgaaaggtggaaggaagggctctgcttggttttcctgcacactgctcctctgtttgcgtcttctgtggcggcggcggcaatggagactgtcacagacgaaggatgtcatgtgactagtgccggccggggccaacactaatattcaggaactatccatatccatttcggtcccttttaaaaaaaaaaaaaaaaaaagcggcccctacgttttctattttagaataaattgatttatgtgactgcgattgcgttttagaataaattgatttatgtgactgtggctatgaaattactgggttctaaaaaaaaaaaaaaagggcggccgctcgcgatctagaaccggacgcgtgg

SEQ ID NO: 46109 - DNA, 666 bp, Zea mays
  Clone ID: MRT4577_142058C.1
ccggccgggaagtgctgctacatgctactgaagctggccaaaccttttaccaaacccaacagcgaccaatcccggaatccacgtatcccctcccaaccagagcagcccaccaccaccgcccacgccgcgcgcacgcggccccctctccgatgcgcgccgccgagccgactccgccgccgccgctgtcgctgccccagccaaggtagccatgtacacggtgcacccgcacgcggcggcgacgtcagtcaccctcaactgcacggaagcaccgctcgagtgcctccccctctgccccggcggcggcaaggcctgctccgagtacgccctgcccccgccgccccctatcccggtgatcccgcgcgcgccggtcgccgaccgccacgcgcccgtccgcctcctcctcatcatctccctgctctccgccttcctcttcctctcgctcgcgctctccacgctcctcctctaccgccgccgccgcctcatcctgcgacgccgccggcgcctcgccgcggccgccgctgagggtgccgacgacggagggttcggcgacgaggaggagggcggaggcggtggaggggtggtgcaccacgtgtggtacatccggacagtggggctcgacgaggccactattgcgtccatagccgcagtggagtaccgccgcggggt

SEQ ID NO: 46110 - DNA, 646 bp, Zea mays
  unsure (1)..(646): unsure at all n locations
  Clone ID: MRT4577_142059C.1
ctcgaggccggccggngatgagtattataagagtgacattaatcatctaatctatgccgtcgacagtatgatatgcgcatattgacaacaggcatgaaggccactgactccatcccgtgaaggactgtgaaacttgtgaacaacatgggcatgctgacatgcaatgaacagaatggagacaggacacacatccctcctgaatgaaacgaaaatagctatgagtaaggtgcaatcagagccatatgcaggatttgccacaataccaacgtacagactgaaggacactgttcttcaacttagatccagtcgcaactgttgcatctacatcatccatactgtgtgacattcgtgccatagcgctctacctttacaatggtctatacaagggaggcggagtcctcttgccttggaaccgctcatgtcacggaccctttctaaccatgactctacccaactctttgagcgattcctggcttgttccgcctaatatctggatcactaagaagctcaactggaacctctactaagcttgatgaatataactctggccaacatgccatgcaaaagaaaagaactacaagtccgcctccagctccagctaatgtcccccctaatgaggcgtaaatgcgcgcttggactaaacatg

SEQ ID NO: 46111 - DNA, 442 bp, Zea mays
  Clone ID: MRT4577_14205C.1
ggaaaaaccggggccggcccatttgggttttctagggggcataacaggttcattcccgggcaaaaaaaggtttggacccaccccccaaaaaaaaaggaaggcttatcccaaaaaccccttggaaggggcggggggaccaaaccccctttctttggggcccccaaggactaaaattctcccaccaaacatttttattgggggaaacaacaaccccgattccaggtttttattaacattcgaaaacttttgaatccgaggaaaacaaaggggcccacttaaggggccccaaccaaccggggcttctggggaaaaacccccccaattatatcccggaataagggcccaagggggtaacccaaccatttatgggggggaacttttggggggatccaaaatcctttggaaacaaaatttttggttggaccagaaccccaacccaaaa

SEQ ID NO: 46112 - DNA, 285 bp, Zea mays
  Clone ID: MRT4577_142060C.1
acaaaaataaaaagtcgccgggggttcgtttttaaccttcaccctttttatgggaattaagtcccgacccaaaacatcctttttcccctaattttttccatgaaagaaaaaaattgttccttttaggggctactgaacatgacactgttttccaaacagacaaaaagggatggggtccaattttcccaaggggggttctgtgctgcctgtttggaaaaaaaggctttattttttgtccattctagagttcgaaaggcaaatttaagtttctaaaaaattgggaaa

SEQ ID NO: 46113 - DNA, 321 bp, Zea mays
  Clone ID: MRT4577_142061C.1
ggccgcttttttttttttttttttttttttttttttttttttttttttttttttccaagcgccaagctctatgaccaattcatatgcctggcaagcgggaaacgttattaaaccggtcagtaatacggtctataacaaagcagctgttttctcacggtacatgtcgcctccaactacaggataacaaagttccagacccaataacaggccttataatagtagatagactttcatacctgaatggcacatacttttcattcaagaactaaggccatcagtaaggacctgttcggtcacggttgtagcgatcgccaccccaat

SEQ ID NO: 46114 - DNA, 350 bp, Zea mays
  Clone ID: MRT4577_142062C.1
gagttcattagtcggcggccgccctcgatctataacagtgttcctggacacgcacgcagctaccatagctgctcctccaggtctgttctcttgcctctgcagccgcatggcattagtggtacagcagtcgcagcagtagcatcgggcaagatgaatccaaagccgtggggtatatcccccccatctgtgctccaccaggtgcgtgcggcggggagcgatgggagctcggaggcggctgcaagaagacgcgcctccggggcacacacacaggcagggcgcgccggctccggactggagcgccgggcaccttaacgggtggttgccgaagccgacgcccgttttcggcctcc

SEQ ID NO: 46115 - DNA, 218 bp, Zea mays
  Clone ID: MRT4577_142063C.1
aaagcaacagggggggtctcacttaatggcaattccaacactgggtttcgtttcccagttttttaacagtaagaaatccaaaacgtggacgggcaaaagcagtccctttttgtattatttatggggccaggggcgccagagggggactcatgacacctgttgccgtccgtagcgcatcctacggggttcctccagccaaattaaaggggggggctttg

SEQ ID NO: 46116 - DNA, 368 bp, Zea mays
  Clone ID: MRT4577_142064C.1
acggacaaaagtggggacaaaactggcaacaaatctggcacacaatttgccgtggcgggcgccgtgctggtcgtggcactgctgctgacaacctcggagaccaccatcaactgcggcctcacctgctcccacataaactcctgcctctcgtactgcctctgctacaagcgcggcacctgctcctgctgctgtaggtgctgctggaacctcaagagcaacctcaagagcgccgccagcaggggcgccgactggaactgcctctagaactgcctcaagaacgtcagcagggtcaacagcggccacaacgccagcaacgcctccaagatccgcgtcaagatccgctacaacatccgctactccatcgactg

SEQ ID NO: 46117 - DNA, 369 bp, Zea mays
  unsure (1)..(369): unsure at all n locations
  Clone ID: MRT4577_142065C.1
gccagcaggnngactctagaggtgcgactccacgcgtccgcgcacacgatcttgcacaatattattggtgcctacgcgatcatccggacggggggcgctttagagcttttcttaactgaagcatggttaccacgctagagccctaccgggtggtcgaccatcgatacgttccttacctggcggtccgtccatagcagcgctattagggactccatatcagatatatattgagagccctgggctttcaataatagaggaagcccaggctagccaatatgggcatatactatggactgattaacaatatgcaccattacattggaacttatgtcattcatcacttttcccctcaaataccacattaccatc

SEQ ID NO: 46118 - DNA, 363 bp, Zea mays
  Clone ID: MRT4577_142066C.1
atggtggtttggccgtgccccgcgtgcgtggggcgccctattggccccgcctatgttaaggatatcttccggcagcggccccgaggcgacgtgggagcgcgtgcggcggttcaccccgatcactaccagaccgaggaggcgctcgattcggtgtgccgcatgctcggatggggctcgcttgcgttcgccgggaggatccgggccgacactactcccctcggtgatctcgccgccggggagtttgtgctcttcgtctcctacctctcctgcgggttggcgctgccgatttcgctattcttcctgctgctggaggaggagttcggactccaactccaacacctcacgccccactccatcctctag

SEQ ID NO: 46119 - DNA, 181 bp, Zea mays
  Clone ID: MRT4577_142067C.1
tgtcttatcagcgcacgcaggctccaccgaggcccatcactgatgggcccgggccgaactgcagcacccgacctaccggagaagctcgcacggggcgaccatgacggacacggagcgctcagccagaacggaactggaggtctgaggcagcgccatagacgcgaacataaggacgagcccc

SEQ ID NO: 46120 - DNA, 922 bp, Zea mays
  Clone ID: MRT4577_142068C.1
ccggccgggagacgtgctcgcatctttgacaaatggccctgcttcaaccctccacccaaagcaactcccccacgtacagtcgtcctcgctactgcagcccggttgccggttaagcatgccgcccagcccgtctacccctacgccgctgcccagccccgcacggagtcgccccgtagccgttcgccggtcaccgtgccagcacggctgcttcgtcgacgcgtccccgcacaccccgttgttgtgtggaggagccctacagcctcgccgctcatcgtgcccgtgcctcgccatcgtcaagctcgctgatgccttcgccctcttgccgccgagcagatctcgactcgtttctgggcttcgaggaatcgacggtcaagcttcggcgaccaagtggtctagctctttgggttccacgaagttgaagactctgagcatctgtttggtgaaggttgttcacattgcaaccactgctcaggagaagacgaagtcgtggaaggagacttccaggagttccaggactacgacgagttctaggtgtgggttggcggcaacccccagtcagctgcctgtgaaggccctatctttactgcgtttcgcttagcactttgatttacctgttaagttgatgactatgtggatgtctctgactctgtgatgtaataagttaatactcttttatgttattattcgagcactgtgcgatgatgttcatttatgtaatcgttgtgtacgtgaattctgatcctggcacgtacatggttcgcattcggtttgccttctgaaacctggtgtgacatgtactgaagttggatctttgtaatgattgtcaccaaggtgtgggtatcccctgcaacttggtgtagttattaataaagtcagttatttagttgggtaaaccaaaaaaaaaaaaaaaaaatttgcggcc

SEQ ID NO: 46121 - DNA, 218 bp, Zea mays
  Clone ID: MRT4577_142069C.1
gccatgtgcttactcatttactctcatttcgcccgcaagatctggtacgtgcaatttcttcagaggtgcgagggcatctacttgcactacctatactctaacatgaacacacgtcttgtttgtcatcaacatgtagtgtctttactgcattcaatgccacttctacatttggacactttgcctgttccggcgccagtctctctacggctacaaccctt

SEQ ID NO: 46122 - DNA, 294 bp, Zea mays
  Clone ID: MRT4577_14206C.1
gcatcttattattgggatggttaatgaaaacaacatcatggacattgctggtatcctgatcagtcatgttccaaagtcagacccagagttcgcaagtgaccttcttggggctgttctagcagcatgtgggcataatgtgtatgagatggtggtggattttgattggtatgtttcactccttgtggatatggcaagaactctgcattgtgcccagggggatgagattggtcggcagtttgttgatttaggactgagagtgcaggatgcgcggccagagcttgtccgtttagctcg

SEQ ID NO: 46123 - DNA, 554 bp, Zea mays
  Clone ID: MRT4577_142070C.1
aggacgcatcctccactttcttcgtctagatagttcaacctcgcctcctctgttcctcgacgcgcacagcaaccgcaccaagctcgacccgccgcccagccgtctgcactaggagcctgcgcctggagttccgcctgcgccgtgctcgccccaccgtcgacgatcaccgtgagcagatcgcgattcgtttctgagcttcgaggaatcgacgatcaagcatggcgaccaagtgatcgaactcttcgagttctacgagatcgaagaccctgagcatctgtttggtgaaggttgtccacattgcaaccactgctcaggagaagacgaagtcgtggaaggagacttccaggagttccaagactacgacaaattctaggtgtgggttggcggcaacccccagtcagctgcctgtgaaggccttatctttactgtgtttcgctagcactttgatttatcagttaagttgatgactatgtggatgtctatgactctgtgatgtaataagttaatactcttttatgttattattcgaacaaaaaaaaaaaaaaaaagcggcc

SEQ ID NO: 46124 - DNA, 564 bp, Zea mays
  Clone ID: MRT4577_142071C.1
gcgttcgcacatccaattacacacagcagacgcccctccaacggttaccattccccctcctcttcctcgttggacaccattcctcgctgcgcagaactcaccgcgagcgtcttcctccgacaagccttctccccaaattgcgatctgttcccgagtttcgagggatcgaagacaaagcgttggcgaccaagtgacctatctcttcgagttctacaaggttgaagaccctgagcatctgtttggtgaaggttgtccgcattgtaaccactgctcaggagaagacgaagtcgtggaaggagacttccaggagttccaagactacgacgaattctaggtgtgggttggcggcaacccccagtcagctgcctgtgaaggccttatctttactgcgtttcgctagcactttgatttaactgttaagttgatgactatgtggatgtctatgactccgtgatgtaataagttaatacccttttatgttattattcgagcactgtgcgatgatgttcatctatgtaatcgctgtgtacgtgaattctgatcctggcacgtacatagttcgca

SEQ ID NO: 46125 - DNA, 1686 bp, Zea mays
  Clone ID: MRT4577_142072C.1
ctcgagtttttttttttttttttttttttttttttttttgttaagactatatattacatagcatgacaatagtttgttaacatcagactttataaacaactattagggcgctgccacaaaagcaaacgcagtgcagtaaacacatttgacacatctaggaaggaccaaattatagacgttttgggtggaaaccgttgcttaaatacaggcagaatgcaacagtcaattcgatccacatatacatgtacgtaatttgtttccttccatcatgtacaaaaggcatttcatctccctagctctcgagattaagcgccatcttcgatggatcatgaagccgtctcaggggcaagcgacctcttaattattatgttgaactgacatgaagaacatagtcaaaaatgagaacgagaattgaagtaatggagaggtttgactactggaaaatattgcaagggctatatttatttcttgaccagcttcaaaatggagcatgccgctgtattatagccaagttacttgcaaaaaaaaatacagaagttgacctcagcatgccgttgtattatagccaaattacctgatgtaaaaaatatagaagttgacctcttttcctaatagcagattatgagaattcaattttgaactctttggcgctatatttttagggaaataggaggcattgccacctactgaatgtatatttaaaaagagttgtgtgtagccaaaaaggaaaggaaaaaaacccaagaatacgcaaaaacctttatccatcacgctgcagcaaaaaattagtattccacttctcaatagatgatcaagagcatctttatttcttggaggaccatcgtggattctgaaatttgacatatctgtccagaatttctgttgaccactccaattcgtatcctaataccatgttcgacaagttgaaatgatttttccagcagatacaatggccctcgcaatatccttcaaaaatgtcgggcataatatatacacacaaccttgattgttcactttcaagcaagctcctgcagttgtaggttccaggttgcttgtttcctttttcttgtagatttgctctcagttaaagttgttgaactatcaactcttgaacctcttactctgaccatatagcttatttcccagaatgttggctgatgtagtgttaccgcgttatttgcataaaagaatatctagagaagagaaaatgtctgaataaaaaatattgaatctttgaaattcaagttatagataaaaaaaatcaagattaaatatagcgattggtcaacaaacagagaactaaacacaagcatgccattatgcttttactcgttattaaaaagataaatgttctccatccagtattgcttagctcttgctagaaaacaatgggataagctttggagttcatcacctaaattaaacattgcacatggaaaataaaagaaagccatgatccctcccctgcaactgcaagcagtgacacgaagactaccagaaagaatacatgatcacattgtcagcccataaattatgttgttaacaaacaaagcaaacatgtaaaaatacttaagttgactaagtgatgttaagcactccatacttgaccggcttttggaagtttcctcctaaaccttgtcaatcacctgtaaagactgaaggtcgtttccccctcgttgccgaatt

SEQ ID NO: 46126 - DNA, 588 bp, Zea mays
  unsure (1)..(588): unsure at all n locations
  Clone ID: MRT4577_142073C.1
cgcctcctcattcccagcaccacgcagcagcaggaggagcaagagcccggcgaccatggtgtccgtcgtctaccccctggcccggcgtctaggacgactttacctctgcgagcagccgcgctccgaccgcgacgccatcaggccgttccctgctcggttctcggatcgcgatttgtttccgtgcttcgaggaatcgacgatcaagcgttggcaaccaagtgatcaagctctctgagttctaggaggttgaagaccctgagtatctgtttagtgaaggttgtccgcattgtaaccactgctcaggagaaggcggagccgtggaaggagacttccaggagttccaagattacgacgaattctaggtgtgggttggcggcaacccccagtcagctgcctgtggaggccttatctttactgcgtttcgctagtactttgatttacctgttaagacgatgactatgtggatgtctatgactctgtgatgtaataagttattactcttttatgttnggnaaaanngaggagctgccgcaccccggacccttcacatcctcgcccggccccctgctcttcgcgggagtcagatag

SEQ ID NO: 46127 - DNA, 262 bp, Zea mays
  Clone ID: MRT4577_142074C.1
attcggctcgcgagaggctgcgctcctttcttgatcaacgaggtctatgctgatggcagcggcaccattgatttgccagagcttctcaaccttatggctcgcaagatgaaggacaccgactcctatgaagagcttaaggaggccttcccttgcttgtcaaggaccagaaccgcttcatctcttccgccgagcctccccatgtcacgacaaaccttggctagaagcttactgattaggaggtggacgagatgatcctttaggc

SEQ ID NO: 46128 - DNA, 622 bp, Zea mays
  Clone ID: MRT4577_142075C.1
tgggtacctcgaggccggccgggccggggtcctcgggcacgaccagccttttctggcggcgcagctcctcccttggctctcctgcgcgcagctcggcgtggcgtggcccggctccggtgagcagttgaagaaaccccgacgccaagcaccttccccaccggagcttcgctgacctgctgtccatgtttctcctcgccgtgcttcatcgtgatggtctggtgagatcgtgattcgtttctgagcttcgaggaatcaaagatcaagtgttggcgaccaggtgatctagctcttagagttccacaagatcaaagaccctgagcatctgtttggtgaaggttgtccgcattgcaaccactgctcaggagaagatgaagccgtggaaggagacttccaggagttccaagactacgacgagttctaggtgtgggttggcggcaacccccagtcagctgcctgtgaaggctctatctttactgcgtttcgcttagcactttgatttacccgttgagttgatgactatgtggatgtctttgacatcgtgatgtaataagttgatactcttttatgttattattcgagcactatgcgacgaaaaaaaaaaaaaaaaaaggcccctagggcc

SEQ ID NO: 46129 - DNA, 708 bp, Zea mays
  Clone ID: MRT4577_142076C.1
tgggaccctcgaggccggccgggccggggtttctcgtctcgttctcgactaataccgaatccccgcctcaccacaactcgccaagccgctgctcgcctcgctacactgcatctcgccgcaccacgcaggaaccgtcgcgcacgtgcggagcaacccccggagcctcgcggtgtccgcgcttcatcctcgccgacgtcacgccgaagctccaccagatcgctcgccgttcttgtccgtgtggggttcgccttgccaagtcgccgtcgtccatcgcgatggagttctttgtcgccgtccacattctgtcctcgccgtccgagcttcgcgttgagaatgcgatccatttccaagtttcgagggatcgaagatcaagcgttgacgaccatgtgatcaagctctctgagttctatgaggctgaagatcctgagcatctgtttggtgaaggttgtccacattgcaaccactgctcaggaggagacgaagtcgtggaaggagacttccaggagttccaagactacgacgaattctaggtgtgggttggcggcaaccccgagtcagctgcctgtgaaggccttatctttactgcgtttcgctagcactttgatttatctgttaagttgatgaccatgtggatgtctatgactctgtgatgtaataagctaatactcttttatgcgaaaattcgaaaaaaaagcgttgataggccca

SEQ ID NO: 46130 - DNA, 254 bp, Zea mays
  unsure (1)..(254): unsure at all n locations
  Clone ID: MRT4577_142077C.1
gattcttttgcatgttcttgagagacatggagaaaagttatatatagctggcccagcgttcttcatatgttaaggatggttactgatgcatcagaaaaagacctcatctccttaggctttcagagcattcgtgtaataatgaatgaaggactggcaacaatccctatacaatgccttgatgaatgcattttggtaactggagcatatggtactgggggggggcggataaacataantttaacatcanctccact

SEQ ID NO: 46131 - DNA, 489 bp, Zea mays
  Clone ID: MRT4577_142078C.1
ttgggaccctcgaggccggccggggtctccctctttagatccaatcgcgcagaagctgatgtccctgcacatggcggttctagaatgcgatccatctccaagcttcgagggatcgaagatcaagcgttggcgaccatgtgattaagctctctgagttctatgaggctgaagatcctgagcatctgtttggtgaaggttgtctgcactgtaaccactgctcaggagaaggtgaagccgtggaaggagacttccaggagttccaagactacgacgaattctaggtgtgggttggcggcaacccccagtcagctgcctgtgaaggccttatctttactgcgtttcgctagcactttgatttaactgttaagattgatgactatgtggatgtctatgactctgtgatgtaataagttaatactcttttatgttattattcgagcattgtgcgatgatgttcatttatggaaaaaaaaaaaaaaaaaagcggcc

SEQ ID NO: 46132 - DNA, 1105 bp, Zea mays
  Clone ID: MRT4577_142079C.1
ccggccgggattttctctcccccacgtattcttctccctggttcgattcaccaaaaccgctcgtctctcagcctgtctcgccgcgccgtccatctgccggagctcaccgctaccgtacgtgctgattcaagacccaccgtccgtcgtcgcgagggcgagatcgcggttcgtttcagagcttcgaggaatcgacggtcaagcttcggcgaccaaatgatccagttctttgagttctacgagatcgaagaccctgagcatctgtttggtgaaggttgtccgcattgtaaccactgctccggagaagacgaagtcgtggaaggagacttccaggagttccaagactacgacgaattctaggtgtggattggcggcaacccccagtcagctgcctgtgaaggccttatctttactgcgtttcgctagcactttgatttacttgttaagacaatgactatgtggatgtctatgactctatgatgtaataagtactcttttatgttattattcgagcattgtgtgatgatgttcatttatataaaaagctgcctgagaaggccctatctttactgtgtttcgcttagcactttgatttacccgttaagttaacgactatgtggatgtttctgactctgtgatgtaataagttaatactcttttatgttattattcgagcactgtgcgatgatgttcatttatgtaatcgctgtgtacgtgagttctgatcctggcacgtacatagttcgtattcggtttgccttctaaaaccgggtgtgacagaagctatcgactataaagcttcggcacagtgacatgtctcaagacaaaggggtaaaccgacttaaagataaaatgactaaaagacccatgatattctgtgtcattattgtagttcattgtaaagggcataaatgtaattatacacaggctgtgccctgtgcctataaataggtgaacagtacccctgtactgttcgcgcgcccctgtaattacgcattgggcatttgcttttgcttcaccctggtattttttctttccttcaagtcgaaggtacattttgtaatttgtcattatttctataataatgaaatagaaacgagttaataat

SEQ ID NO: 46133 - DNA, 298 bp, Zea mays
  unsure (1)..(298): unsure at all n locations
  Clone ID: MRT4577_14207C.1
tcccctcgctccccccccccccaagatntntaattcggngataggatctagctcgatggagcgtcaggtcgatggtcagtggtcgttcacagacgggtggcggtgcgccgtgttgtgacttcacaggaggaaaatggagtcagagtcttgcagatcccaggggaagaaggcggaattctagtaggtaatgagtgtggtcaactttactgactcgagcacggaatccaacctgatgggcaaaatgcctggagataagagcgagtgacatcaagatgatgccttgagcacgcttgttaat

SEQ ID NO: 46134 - DNA, 246 bp, Zea mays
  Clone ID: MRT4577_142080C.1
ggcaaaaaaatttgaaataggatacaagggggggggttttctaaaaatagcctaaggggctcatgcccatccctatttaaaatataatgttccatggggaaccgggaccaaaattcctccccttttaacacccctctcaagggggtattcctttttaaaggttttccaaaccaactttttatttaccccgggcggaattttcgtaaatcccaacttgctttgcgcgggggggttccactggccccg

SEQ ID NO: 46135 - DNA, 816 bp, Zea mays
  Clone ID: MRT4577_142081C.1
cttgcgcagccaacaaccgctcccgtggacacggcagggctgagcctctgcacacggcagccggccggctgcagccgctagctgtggccattgcggcggccagccctgccccgcagccgacctcggccctccatgtcctgggcgatcggcggatctacgctgctctcgtcgttgccgagattgtgatctgttcctgagcttcgaggaatcgacgatcaagatttggtgaatcactggtcctgagatcaaactcttcgagttctacgagatcaaagaccctgagcatctgtttggtgaaggttgtccacattgcaaccactgctcaggagaagacgaagtcgtggaaggagacttccaggagttccaagactacgacgagttttaggtgtgggttggcggcaacccccagtcagctgcctgtgaaggccttatctttactgcgtttcgctagcactttgatttaactgttaagttgatgactatgtggatgtctatgactctgtgatgtaataagttaatactcttttatgttattattcgagcactgtgcgatgatgttcatttatgtaatcgctgtgtacgtgaattctgatcctggcacgtacatagttcgcattcggtttgccttctgaaaccgggtgtgacattttcgctatcaaagcccgagctgactgtaggaccactgacctagagtagcactgcccgtactaaggactattgaccttgcctatcaccttgacctctgatgttacttcaaaagtcggtcacctcgaccaaccctaggttctactacatatttatactatattatacctt

SEQ ID NO: 46136 - DNA, 416 bp, Zea mays
  Clone ID: MRT4577_142082C.1
gccagaaaaaaggaagactagcgatggcatcatctagcaaggacgcatcacaagatatttgcaagggcaaccggttttcgttctctagttttttcttttgcatcatggacatggaggactccggccagttcatgcagtgggcgatggctacgctgcagcacgatgaggaccaggcagtggactaccccatcgacgacggccgcggcggggctaccttcccctcgctccgagcgctccgcgaggcctcgtcgcaagctgcagaaatgatccaggaacctctcgccgccgcaaacagccgctgcgccggcgacgggggcaccgcagccgcaggcaataatatctcaggaaccgcgccaagaagaagcagcagtggtagtgccgtaatccagcccttgaggtggaattttggcgccggc

SEQ ID NO: 46137 - DNA, 778 bp, Zea mays
  Clone ID: MRT4577_142083C.1
ggggtcatagtgtcgtccacaggcgccaccatctaccagctctactgggatttcgtcatggactggggcttcttagacctcagatctaagaaccgttggctccgagaccagctcatcctcaagaacaagccgatctactatgcttccatgatgctcaaccttgtgctgcgcctggcctgggccgagagcgtgatgaagctccgtctcggtatggtggagtctcgcctgctggatttctcactcgcttcactggaaatcatccggcgagggcactggaacttctacaggctggagaatgaacacttgaacaacgctggaaagttcagggcagtgaagaccgtcccgttaccattccgtgaacttgaaactgattgatcaagtcaaagataagaacttgccagcatgttcccaggaatttaaggaggggggcaagagttccaggaatggacacactgcccctgctagtgcttgcgcaaggattggtgttcaagtgggtaataaaacaaatcagagagcataactgcacaagagcaagacgctgcagatttttaaagatggaattagctcagacggtgccgtgtagttgaggcgccagggtcaggaaagatgatgtgcgtttactctttattggttgattgaggattgttgcatgctaatcgactaacaaatccttgacttcgtcgattcattaacctatgaatgtatctgggaactgatgactgaaaaatattgcatgaaaatacatggtggtcaaacagaatttgaaccatgtttccat

SEQ ID NO: 46138 - DNA, 866 bp, Zea mays
  unsure (1)..(866): unsure at all n locations
  Clone ID: MRT4577_142084C.1
cttggggtaccctcgggtcctgccgggcaaacagccaaatgctcgtatttataagctcccaacgtagttttagaatatgaaatcaggtgatgcttctattatgtttctgtgacgtattacggcagaaggcttttacttatctcttacnnnnnnnnnnnnnnnnnnnnnnnnnnnnnnnnnnnnnnnnnnnnnnnnnnnnnnnnnnnnnnnnnnnnnnnnnnnnnnnnnnnnnnnnnnnnnnnnnnnnnnnnnngnnnnnnnnnnnnnnccaaacttcactcatgtgggagcgtctgacactgagtctattcttaattttctacaattttcaagaaatttattctagacagactaggataaaaatcatgttacatataatgctaaggacttttgtgttattttgggcgtgttatgcataaaatgtagaaattgtagtttggatcagtgataaaaggaactcgttatggttagaaattatatctctacttcttatttttctgcaggtttgatatcaggtaaacatctgctattcgacacttctgtaatagtaagcagaaaggagcaagtcctcattttttatatgtgcaatgttgctttcatgctacacgagaggggtgaatgctaattataaaacaatggattatttgacataatgtagatgagattttcgcaactattcttatgtactgcaatatttgaaataaacagcccttgcaagatgttagggtcctcctaaaacatatgaatgaccattggattagtctaacattactctttaggcttcctataccatgtaagcagtcttttacaagttcacgatgactttatttaaacatggagttagcacacataggtagagatagtaa

SEQ ID NO: 46139 - DNA, 684 bp, Zea mays
  Clone ID: MRT4577_142085C.1
ggaattttgccagcaattgatcttatcagcgtgaatgctttggttggggtaagctgagcacctttttgtttgataaatgagatatatagctttgaaagtattgataaattatcttcatctagtatccttgatgcgaaatataattctctgatttgtttagtaactgagtaatccatacgagtgttctgcagatattctactttgttggatttggattgttttgtctggaatcgttgctcagcatctgggtcatccagcaagtgtacatgtacttccgtggaagtggaaaggctgcagagatgaagcgtgatgcgacaaggggtgcaatgagagccgcattttaagtggtatttttgtgatgatagtccaaagtcccaatcgcatacttccggtggataggttgtgccaacaaacagaggctggcatatgtttcttccttggttgctgactgtgactaaactgccagtataggttatcgtgatgttacaagtccctgttttaactaaaatacatagggaacgtgcagcttgtacttcatcgttttatttttggtagttgaaatatggacttatgaatcatctttagttaagttgtacagtgctgttaactatttatactagtttttgagcggctatttgtacttgttgaaggagtaatacatagtggtgatattggtggaaaaaa

SEQ ID NO: 46140 - DNA, 286 bp, Zea mays
  Clone ID: MRT4577_142086C.1
gggagatgtccattggagacagaagtggagagagggagaagttcatttgtctgcttatttatgtatggtgcacctactgtgtgccaagccatgttagagatacagtgggagcaaaaccagatgtgttttctgccctctgactccagtggttgcagaattagcccaggaactagaattggatggagtcacacaaaccaaggaaggggattgtttgaggggggcactcagtcacatgtggctgaggccaaagagaatgaagatatattttaaaattctggatttggca

SEQ ID NO: 46141 - DNA, 310 bp, Zea mays
  Clone ID: MRT4577_142087C.1
gccaaacctataccatggcttcttttataacggcgcaagcggtgaaacctatgctcctgttgatgcaaacgccaaagacaacttgcctaattgctcacttaaatcgcagacactatctacatcataaatgatgttcgttatatatctaagtacattatatccacctaattgattcactattactcgttacgagacgaccgacgatgctaagatatcaccagcttgtgaacggcttgttagtgatgggatatagtttaagataacactcacacatttaataataaccctaagatcttatcttggctacttg

SEQ ID NO: 46142 - DNA, 205 bp, Zea mays
  Clone ID: MRT4577_142088C.1
attcccggttcgattcacaccttttaatttcatccccccatggcagccgccgcgccggcaagcttcagaaggaagtgcgtgccatctcccctgacctccgcctccgagcccccttctctctttgatggcaccaccaggcctgacgctgccttttatttgccttaacgcgcagcgcgcttggattgccaggaactaccaaggtttt

SEQ ID NO: 46143 - DNA, 1679 bp, Zea mays
  Clone ID: MRT4577_142089C.1
gcccacgtacgtctcgctcggaatttggcttaaagaataaagagagagcagtatcagtactggactcttctacgaggagatcagctattctagatgcccatgctgaaaaaataaagcttcagatagatgagttctcggcagagcttgaagtgatccaatcttccatagaaactcttcgccagaagaaactaaaaatgcaaaggctagaaagcaaacatattgacctggataaggggtgcacatacagccatgccacactgtcaaattgcgcctcaaatgcttttggagatgatttatacggcttcagagaatttacagtgttggatatgcaatctgctacgtgtaaattctcagagagcttcaggatgtggtcgcaaggtcgtgggtgtgtttacaaaggagaaattatgaacagaactgtgatgatctataagctgcactgccatagcattgagagcgtgaggcagttccagcaagaggtttatatcctcagcaatgtgaggcaccctcatctagtgacactggttggggcgtgcccggaagcgctgtgcctcgtttatgaatacctgccaaacgggagccttcacgaccgcctcttcagcagacgcagcagccgtcacttgccgtggagaattcgtgcacgcatcgtcgccgagatctcagacgcgctgctgttcttgcattcctgtaagcctcagacgatcgtacacggcaacttgaaactcgagaacatccttctagataccgaatgccattgcaagatagccgatttcggtatctctcggctattcacaggcgacgtgaaggattacccgtcggggggttctgagccgccgaaagggtcttttccctacgcagatccggagtacaagagaagcaaagtgttgacacccaagtctgacgtatactgcttcggaaccgtgatactccagctactgaccggaagacaggagcctgcacggcggcttgctggtgaagtaaggtgtgccatggcttgtggcaagctatcgtcaattctcgaccctgctgctgggcattggcctatggaggtggccggaaggctagcggaactgggcctgaggtgcagtgaggacagaagccgggatcgcccagacctgactgctgagactgtacgagagctggaacagctacacttgacgagggaggaggaacaagcaccctcctctttcctgtgcccgattatgcaggagataatgcatgatcctcatgtgtgcgctgctgatggggtgacctacgaagggcgggcgatccgtgagcggatggagttggagactgggcaggggacagcgcctctgaaactggagcatctcagtctcacacctaaccacgcccttcggttcgctatccaggattggcttcgtcgctcttgccgatgaaacttttttgcttggcgtttctctttgggttttcgacctgtatagatttcacgtgtaaaggggtatagcatatctgcatatgaataatttgaatagctgttctaaggttttgtctgtagttcatgaaatgtatcaggaagatgcatgtacgcggcaatgcagcttcaggatcgatcgcataaattttaaaataatactgtctatgctatgtccaaccatcaaaaaaaaaaaaaaagggcggctgctcgcgatctagaacccacgcgtccgcggacgcgtggg

SEQ ID NO: 46144 - DNA, 335 bp, Zea mays
  Clone ID: MRT4577_14208C.1
aaacaggtgggtttaatttcaaccacaggggggtattacaacatacaaaaatcaggaaaaaaaggggggaaaaagggaaaaccccccaaaaagatggttttttttcacacacacaggttatccacgggctggctgaacaacctaactgctggtggtggttgggcctggtaaaaaactcaacgctccttttgcacggagcccattttttggacagattttccaagggccttggaaatatctttttttttttggttggagggaggggcgggacaaaaacaattcctttgaaaacccaaaaagaaaaaaaaaaaacctcgttgattgaggaacaaaac

SEQ ID NO: 46145 - DNA, 326 bp, Zea mays
  unsure (1)..(326): unsure at all n locations
  Clone ID: MRT4577_142090C.1
tgtgaactccctcagccgcgtcgcgtcgcatcctacgatccaaagctctctctgctcgcagccatggcgaagaactacccgaccgtgagcgccgagtacagcgaggctgtggagaaggccaggcgcagctccgagccctcatcgccgagaagagctgcgcccgctcatgctccgcctccgtggcactngcggggacgttcgacgtgtctcgaggaccgggtcattcggcagatgagcatagcggaattgtcacggcgtacgcgggcggaatcgcggtcgctgctcgagccatcaagagattccaatctctcttacgccgattctac

SEQ ID NO: 46146 - DNA, 1043 bp, Zea mays
  Clone ID: MRT4577_142091C.1
ttgggtacctcgaggccggccgggtactgcttcggaaccgtgatactccagctactgaccggaagacaagagcctgcacggctgcttgctggtgaagtaaggtgtgccatggcttgtggcaagctatcgtccattctcgaccctgctgctgggcattggcctatggaggtggccggaaggctagcggaactgggcctgaggtgcagtgaggacagaagccgggatcgcccagacctgactgctgagactgtacgagagctggaacagctacacttgacgagggaggaggaacaagcaccctcctctttcctgtgcccgattatgcaggcaagtaccatcgtcttgcaccattgttgactaagtatgggggttggatgtgatgataacaagaaactcggtgcgtttctttgattctttccctcttctgttttggcctgcaggagataatgcatgatcctcaggtgtgcgctgctgatggggtgacctacgaagggcgggcggtccgtgagcggatggagttggagactgggcaggggacagcgcctctgaaactggagcatctcagtctcacacctaaccacgcccttcggtttgctatccaggattggcttcgtcgctctcgccgatgaaactttttttgcttggcgtttctctttcggttttcgacctgtacagatttcacctgtaaagggttatagcatatctgcatatgattagtttgatagcaagttgaagactttgtctggactagcggatctgtatccggaagtctttacgcggcaatgcagccttcggttcgctatccaggattttcttcgtcgctctcgcccatgaaacttgtagccgggcgtttcttttggggtttcaactttcagcctggtcacatttcacgtgtatgaggggtatagcatatctgcatatgaatcattgcatagctgttctaaggtttcgcctgtacttcaggaaatgtatcaggatgcatgtactgggcaatgcagcttccggatcgttcgcatcaatttccaaataattctgtctatgcc

SEQ ID NO: 46147 - DNA, 147 bp, Zea mays
  Clone ID: MRT4577_142092C.1
tacacatatctataaggtcatctcaaagagccgctgcgagaatgagagacaatattggaggagaggctgagcaatcctccctgccatattgaaaacacacgcgatgcaaagaagctcaggggcttgctataccttatcacacctttt

SEQ ID NO: 46148 - DNA, 249 bp, Zea mays
  Clone ID: MRT4577_142093C.1
caggcattggcaagatacacacgaagggaggtaacttacctatcattgacttgttagagtgtctgctgctcttaaaggcattgtgtcgttttctttttgaataatgtaacctcagtatatactgcttgccctgtacgttctaactacactactataggcgaagatgctatgtgctcgtggaacttcaaattcacagctctgctgccggcaattctcattctcatcccagaggagcctgtgcgatgaact

SEQ ID NO: 46149 - DNA, 245 bp, Zea mays
  Clone ID: MRT4577_142094C.1
ccgttgtttcgtgggccgcattcgctgagatgaaaccggctgtagtggcgaaagctgacgagcgagcggcggaggagatggcacctaagaaggcagcggctgctcaagaaagcggccgaggaagttgaagtggccgaggtggtagacggtgacaaggcggtcgatggggagggcgacggtgacgaggactacgatggggaaggcggacacgaggaggatgatgactaggaggtggatggggagga

SEQ ID NO: 46150 - DNA, 200 bp, Zea mays
  Clone ID: MRT4577_142095C.1
tatttacgatattgaattatgtgaaatctgtttccatgatctactactacttacaagggtgattctagaagtcggtttattttagtacctatagaagaataagaagaaatctgtcccatttgttgactgagaattatggaagcaatgaaatccgtcaccatttggttttatccaaaaaaaaaaaaaaaagggggggccgc

SEQ ID NO: 46151 - DNA, 336 bp, Zea mays
  Clone ID: MRT4577_142096C.1
tcgacccactcgtgctatcctttgcgttcaatatccatcttagctttcaccgtcccacttctccattccgagcgtcgggagcccgattcccatgcactgcaaagcgtctacgtgcatatccgccggcgatccactcaccatctatgagatcgtcttcgaccctaccaaagcgtactatatccacatacgattcgtctgcacctcactctgccactccgatatcaccttctggaaagctataatggcaccagtgtttccaagaatactatggcatgaggctttcaggatattggatatcgtgctagagcacttagaaggcttcgcggctaggtacac

SEQ ID NO: 46152 - DNA, 1787 bp, Zea mays
  Clone ID: MRT4577_142097C.1
ttttcgtttttttttaacagaattcatcacttgtatttaatttaccaagccactagctacctctgacggcttgcaattgcatgtcacagagagcatcttcccaatccttttcgatgctattaaaattcattttacgaaaaaaaaggaaaaaaaaaaaaaaaagcgagcaatgaatttacaaagatttttttttttttttttttttttttttttttttttggcgccggcgccgttttttttttgtctttccccaaaccttatgtctgaggaattaatttataaggagtatagaggtcgaatcggatccagtctctagtacgtatgtttctttacaaatcgaggttgtgccaacggcagcagggcatcacagaatccacggtcaaaacatatgcatctcgtgttcaggatggaacaaagccctacatctgctcctgtattatgttataaacagatatcaagatctcaacactgatcaggatgatgataagccattccagaaaatccgacttcctgttctgaaggatctcctgaagaaacctgatgttgtgctcaacaaatttcaacttaaaatcaaggttcccaaatctctgggttagctcgtattcatctcgaaggtattcccagatctgagcatagtttgcattcttccacgctatgtctgacctctcaaagagtccaagcttaagaataacatcagccaagttagagttggccttccctacaagctggaaaagcttcttcctctccatagtgaaggtaccagttttttccattccacggttgatatctgtgaactcagctaccattccatccacttgacggatatagtagtcaagagcaatactctgacccaggacacttccaattgtacggatcccatcaatactcagatcccgaagcacgatatagtcaagaccaccttgcatccatgtctctagggtaggcttttcaacaacagcatagtcatcctttctcatctctggaagtaaaccagatgcatgcttctcaacaattttcaggtatccatctgcttcatgatcagaaacattaaacagcacaatggacccatattggaaaacgaccatgtagtggcaatggctctcatctatgacaccagacttaaaaccctcggggtctcccttgacatcgtagtatctaaggacaacgtagttggtggcacgcgatgtgggtggaatgacattgaaggaattctgggactgcaggctccgcaggtcgatgctggtgcatagaaagaatgccttgacggggacgacccgtgactggttctcctgcgccacttcgagaaggtgctcgtggtagtaggactcgtcttcggaggcgagctcctctggcggtggcggaggcaagggcgcgggcgggggtccctgttccttggagttgaggtggtccctccctggagcaggggcgggggccggggagacggaggcgaaggtgctgtggaaaagaagacgggatgggccgccatggggaaagggaggaggtagacggcgcgttcggaggaggaaggaagatgggatgcgcggaggaggcggcggggagcaaagagctagggtttggagggtcatccctgcggcgcgggagcggcagagtaggaagggtctgaggaggctttggagcctcgacgacacctccatggactgaggaagctctctcactcaggtattagacattgcaagcaaatggcaaagggtggaagacgcagaggcagagcggagggcggaggctgaacggagaagacaggccccggccggcctcgaggtacccaa

SEQ ID NO: 46153 - DNA, 583 bp, Zea mays
  Clone ID: MRT4577_142098C.1
gaagagagagagggtagcttgaggccggttgagctgaggcgagctattcggctcgagggagccggaacgggaaatcgcagcgatctctgtttccacattccagtttgaagtctggtctgtggcggctaccgttgtgctttggcgttccttttgcgacagtttttgccctggtgcaggctggtgcttggtgcccttttggttaataaactgcgctgcaacgaaatgtggtggtatattacttcagttgaaggccggggcttgtttgtcccttgaactctaagagagagagagagagagatgcagtcacgcgagggttcacatgcacgcagtgacgcacgcacgcacagaggacatctccgtgcgcgggagaagcacaggtgcaccgtgcgcaactgtggttcccaccctctcctttattaatactagactagtagtttttttttctggcatggcattggccattgcagcatccatgccatgtagtgggtacggtacgagtacgaccgaccccctcactgctgtacgaggcgtttctgaaacgttggatttcatctcagtatatgtcgaagttgcaaacaaaaaa

SEQ ID NO: 46154 - DNA, 612 bp, Zea mays
  unsure (1)..(612): unsure at all n locations
  Clone ID: MRT4577_142099C.1
ccacgcgtgcgcccacgcgnccgcccacgcgnccgcgcacgcgnccgcccacgcgnccgcaacnagcaacanagaaagcacaanagngnaccaacaanggcagccaaaanannnngccnccnnangcnccnnggncnnnctgcaagngcgggggccgcaaccannnncccacaaggcncacaagcaccnanagcnncccnncnncccccggaccccncaccagcggngncnncggggggggaacccagggggcaacccnacagganccaacaggcaancacaacaggcaccnaacccnnancacccgggggccnccaacaaccgncagcccaaaaacaagagnnaccnngggggcaggnggaggcacaaaacancagggcacaacaacgacaacaacgngngcnagcaaaccgggcggcccacccncagcaacagcaggnncngccaaacaaccaacgggcggcanngaacncngcggcngaagggcaacaacaacnaccangcagccagcgagcggcggcccacccccagcaacnnccnccaagcaaccaaccagcagcagggaaccccgcngcgcaanaacagcagcaacaacgacgaccanncagccag

SEQ ID NO: 46155 - DNA, 586 bp, Zea mays
  Clone ID: MRT4577_14209C.1
tattctcataaaggggaatgaagagacatattgaggtttccagctcaagaagaaagcaaagaaaggctcatttcactgctccttctcatcttaagagaaagatcatgagctcccacttatccaaggatcttaagaagaagtacaatgtcagagctgttcccgtcagaaaggacgacgaagttctcgttgtcagaggtcctttgaagggtaacaagggtaaagtcatccaagtatacagagccagatggtgcatctacattgaaaagctcaccaagcaaaagctcaatggtcaacccatcaacattcccatcgacccatccaaggttgtcatcaccaagctcaagatcgataaagacagaaacgacttgttggcccgtaaggaaagaaccctcagccttaagatgaagggtggcaaatacaccggaaaggacgtcggtatgggtgtcgattaatccagttaaaaaaagcacacttaagtttatgttattatgcttgttatccccttgatcctatgcttaatagtataagaatctaaacttaacctttcctcatcacataaaacccctgcatgaatcgttatccagtg

SEQ ID NO: 46156 - DNA, 593 bp, Zea mays
  unsure (1)..(593): unsure at all n locations
  Clone ID: MRT4577_1420C.1
aactctgctcgacttcgtttaaacccaaaccctaatctcgacagagcctaaaccctagctcgggcggcggcggcggcggtcatggacggcggcggaggcgtcggaggaggcatggggcccgtcggcggcggggtgggaggcatggtgggacccgtcggcgtcggcggcgggggcggcgggagcgacgtggagctcgtcagcaaaacgctgcagttcgagcacaagctcttctacttcgatctgaaggagaacccgcgggggaggtacctcaagatctccgagaagacctccaccacgcgctccaccatcatcgtgcccatcgccggcgtcgcctggttcctcgacctcttcgactattacatccgcaccgacgagcgcgacgtcttcagcaaggagctacgcctcgacaccaaggtgttctacttcgatattggggagaacaagagaggccgctaccttaaggtttcggaggcatctgtcaatagaaaccgtagcacgataattgttccggctggtagctctggcgaagaaggttgngaagcatttaggaatgtactgttagaaatcaatgatgaagcttcccgactctacgt

SEQ ID NO: 46157 - DNA, 453 bp, Zea mays
  Clone ID: MRT4577_142100C.1
ctccctcccgttttccttgggacgctacctggtgactgtggctcccgcgaccagcaaggaggcggtggcggaggacactcgttatggccgcctctaagcctgtggaggcggcaatggtctcagcggctggacccggttccgggagtgggatgggcggcggcagtgcgacttcgggcccgggcaccgggagcctgccgagatggcagctggcgctggcggtcggggcgcccctgctgctaggagcgggtgctctgtacctatggagccggcagcggcggcgccgggagaccggggcccgaggcgactccggcggcctgaagcgcaacagtgaacggaagaccccggagggcagggccagtccggccccgggcagcggacaccccgatggccccggtactcacctggaaatgaactcgcttgatagagcccaagcagccaagaacaaaggcaaca

SEQ ID NO: 46158 - DNA, 231 bp, Zea mays
  Clone ID: MRT4577_142101C.1
ttcacgcgtacgaaaaactaccaaacaaggcggggagcttataccacaccttacttttatgaacagcactgacaatcttattcccacaccatgctagtgagcggtcaccccaattacagaaaggcgactcccatacatttcacgaggaggagagccaaaaacggttcatgacccggacatgcacgaaatagctcagatatggcgcgaccgcggctacagaacactagaaag

SEQ ID NO: 46159 - DNA, 326 bp, Zea mays
  unsure (1)..(326): unsure at all n locations
  Clone ID: MRT4577_142102C.1
gagctcactgncggcggccgcccttggcttttctgggggggccctttacgcacgaagagggcgtgactatcccttcagcttgcacaacacgaggcgctgcggcctcaccctctaactgcagctccagctcctcaccacaggtgccggacgggttctcgaacctggcccatcctgcgcaagacacgcacttcactaggcacagcctccacatgctggacctgaccagggactagacttcaacgcgccccctggtgagggcctgcggccctcaccctgggcggccgcctgggcctcacctggtccggagcacaagagtgacccagagg

SEQ ID NO: 46160 - DNA, 290 bp, Zea mays
  Clone ID: MRT4577_142103C.1
ctcacagtgtacacatggccaaacagtcctgggcaaaatgccaccaccacatggcagcacggaaacccaagttaggggcccaaaaacatctggaccctttaaacgaagtctgctggtaaatgaaaaacccctcaaaaggcaaaaggggtccaaccccagacgggtaataaacaacaggtctttcacagctttgcttactggagggctcaaacctcctaaatcttgagcagctggaatctcccccaagattccgaaaaggaaggaaccctgtctctaataccctgggtaca

SEQ ID NO: 46161 - DNA, 208 bp, Zea mays
  Clone ID: MRT4577_142104C.1
ggcgtccacgcgtcgccacgcgtcgccacgcgtcgattgtcgcttgcctccgggtctccagaccaatccggggcgggacatatggcgggctggcggcgagacaaggcgttgacgccttctcgggctgccggtgcgggagacgccggttggtgccgcaaggcggctcgagcgcctgccgccccgcacgcgccccgcgacgacgtctcct

SEQ ID NO: 46162 - DNA, 152 bp, Zea mays
  Clone ID: MRT4577_142105C.1
acaaaaacaatcgggaaggggattttttgaaatgcaataccccaaacagaaacaatagccgcaaaagcccacgataacaacacctacaccgacccaatcaaaacaggggcacgcaaaagcatcaccaacactcacaaaataacgaccaactc

SEQ ID NO: 46163 - DNA, 588 bp, Zea mays
  Clone ID: MRT4577_142106C.1
atcaagaagagacggccactcctctggatcttcttattgaagagtacgattgcaccaccgcctgccaacgtacgtgcccaaccaagcacaccgacaaagcatcaatgcgggcaaaggcgccatcgaggagaacgacccgctgaactggggctcgtgggtggaacaactgcccgggagtcaccgggacgacgcgaaggcatgccggctaggccctacaacccgaggtcaaaatcgagggcatccaccctccgcatcggacacgggagcgccggtcgctccgccaaggacgctcccggagtggccgcctagatcgacgacgaggcccgaccccgctgaaaggccaccacttagtggatcctccactgcatcgcccacccgggatacatctacttcgccaccaccaggcttcagcgggacctcccaccgccgcaccaaggacgcgcccgcgctccacgtgaagctgtatcacgcatctcaacgactggaatcttgctgaccgacagcttacgggtacacgttgtcgtcgaaggtaacccgctcggcgatgctgtcgcgcatcaacaccctcctcctgggctactccggcat

SEQ ID NO: 46164 - DNA, 608 bp, Zea mays
  Clone ID: MRT4577_142107C.1
gttaaaagttttcttttgtcacacacaaaggggacttatattttgaacaaaagtgaggaccgattatgtacccgttacactttcttaatatatcataacacgggacttttctcaggataaattattcaagtctcactaaatcacaatgacatgatgcattattcaaggctctacggactgatggtgtacattattaccaacataatcataatgctcaccaaacaattttcattccataaaaacttttacttgacactgcctcatcaaacaaaagtatattgccaccttggaggtagatccctcccacttatttgctatggcattcttttacttggtaccgccaaacttcttctaggaccaattccatgtactgatccaattctataaagccaccttgaatacctacgttattctcttgaaataaccatatttgtatacgcactttggtctaaactaacccaaaaacgagaataatggggtgagtcatgatttgctgcaccttaccttattccatttgtggccggggggctacaaccacttgtccttgatacgtataaaagcttatgaattcgctcgcgctagggcaccgataccacatcctagctaga

SEQ ID NO: 46165 - DNA, 254 bp, Zea mays
  Clone ID: MRT4577_142108C.1
gggtatggcaggcctatgggacttggtacaaaattttacatatctgatcaatacagggggtgggacagttttgtccatgtgacacacttcttgggatccaccctttaacttgtttataaagctctagatcggtggaattcaaacaacggattctctattggtgtgtctgaatgtggcgaccactgagtatacttgaacacgttattaacaattacaaccgttgtatgggtttcaaccagaatttggaacaataa

SEQ ID NO: 46166 - DNA, 394 bp, Zea mays
  Clone ID: MRT4577_142109C.1
acctacatcctgaccaactaggtttccaaccaggcctccgaccccaagggcggcgggaacgtctacgacatgatctacgacatcatcacggagatcaagacgaagctcccgaacaagtgcccgagcgcggacattatctcggacatcatccgcgacagcgcccaccactcgggcaagcccacgggcgcgccccccttcgcgctgcccctgtcgctggtctactacctcgagtacaaccacaaggacgccgaccacctcacgggcccgcacatgctgatgcccaagctcatcaaccagtgctacaaccattactacaacgtcgcgatgctggtcgttatgctcagcatcggccactgcatgtgcttctgcatgtgcacctacatcgagaccaacg

SEQ ID NO: 46167 - DNA, 358 bp, Zea mays
  Clone ID: MRT4577_14210C.1
actgctcaaacaatgagggattaaatgtcgaggaaagaacgaaaacacccgtatttatttgaactaactttaacaatcaatgcttgggaagtggatggatcacacacatgggttcggttaggccagggcaactgaccatgctgcactgcatcaacaggggctccgcgttaagaaccatggcacggaggtggaccggttggcttcatgccaaggcgtctggcacccgatccctccggggtcttgttgttgcgggtgctaattgtctttgagcgcggtgacgaccatatacattggggggcggtttttgggtactcccatgcggacacgaggaccaaccccggaaatccggaccgtagcc

SEQ ID NO: 46168 - DNA, 429 bp, Zea mays
  unsure (1)..(429): unsure at all n locations
  Clone ID: MRT4577_142110C.1
agacgacccgcagcgcaaggccgagggcgagggcaccactctctataccagccgcgagcgaacccaacgccccgccgacgccaaggcgccacncgcgcgaccgcggcgacagaccaacgggcgccaggcgncgcgcggccccgccgcggccgcctcctgccgctggatctccccgaccgacggcgcgacatcgacggaggccgacgcggcggtggcagctgccgacccagagctgcctccgccgcgggagcccgccggaggcgcccgcgaggagcttcctcacaacctggaggacgcgctcgaggaatgcgtggaaggccatgcggcgcggaaccccaacgggctcaccgtgctccagacctgcgagggcgccgacaccgacatcccgcgcttttgctaccatagccgactctacaggggtggaaactg

SEQ ID NO: 46169 - DNA, 197 bp, Zea mays
  Clone ID: MRT4577_142111C.1
tttggtttttaataacggaccgactaggtttcacaaggcccaaaccgcaacatacaaagggcacccgacgtggaatgcactggacgaggccacacaacgacgggactgcgaagaccctccgtacccacacatgaacagacgagagacacatgcggcacccagcagcaggcttaacaagagcaaacgccctcccacac

SEQ ID NO: 46170 - DNA, 369 bp, Zea mays
  unsure (1)..(369): unsure at all n locations
  Clone ID: MRT4577_142112C.1
ctaactgaccccatatctactacccctcctggggacatcaaacagagtgcggcgcacctactattttgacccaatgaaacgccgaggcaccgtttctgacacagtgcttcaaccttttttccatgtttccgacccgtttcccggacataaaggatttctacaagaaggcggtggacaccttctggactgtagaggaggttaacctctctgccgacgcccggtactgaaacgaggcgctgtccaccgactagcggtacttcatctaccacgtgctcaccttcttcgctgccaccgacagcatcttgctagagaacctcgcttnccgcttcatgaccgacgttcatgtcgacgaggcagcggccttctacg

SEQ ID NO: 46171 - DNA, 303 bp, Zea mays
  Clone ID: MRT4577_142113C.1
gcctaattttttttttttttgtagaaatatatagaggaagagggctttcattaaaaataaaatatacagataaagaaaaagcttaaattcccaaaacgttgataaaaagcagagcaaaaaataccagaaaaaaaatttaaacagaccacatatataccatagtagcagagagagaaaaaacgcaaaaaaggaaaatgtccatgctgggacagacaaaccacacatcgattaccaaacacgcgtacgaaaaaacatagacacacattataagttaaaagacaatgatatacatagaactggcaa

SEQ ID NO: 46172 - DNA, 430 bp, Zea mays
  Clone ID: MRT4577_142114C.1
cccacgcatccgcacacgcttcagctatcttgttgtcatccccttaatactcaccgcttcatttaatccatcaaatcagatcacagagtctattcatgtcatctctcaaattccttccttcaggggcactccttctactcaacatattagcggtggggcaatttttgtaatgaattcatatatcatggatcttcaatatgacttcagtattcatcctctctacggttctacttcttagatacaccatttgctcagtgcattatttccactctacagtagattgtacaacacaccctgtacatttatcaagtgctttatctttttatttatagaagcagataccaacatgtatcattttaggcattatctattcggtcattcatcagaatgtatctacattgaccttttcaaccatttcaccatttcctcc

SEQ ID NO: 46173 - DNA, 364 bp, Zea mays
  Clone ID: MRT4577_142115C.1
gcacgcgtgacgtgcctcttggtatcctcgcacagcggccggccttcattattttttatttgtccacccatcgagcggaggcgggcactctgttcatgtttcgttacgtactactccacgaggaaacaaggggcccgtatgtaccatgattacgaccagttcgaactgatcacgaaccgatcagggtccagccaggagcagtcagcaggtagctgcactgactcacggggcaactgcacagcaccggcatcgcctgtggtgcaccctagttgttacgtgtaacggcgcagaggctgtaaatgccttctcagctgagacgcccgcgatccatgcagggcttcaggtcctgaacaacaattctgtg

SEQ ID NO: 46174 - DNA, 262 bp, Zea mays
  Clone ID: MRT4577_142116C.1
tttctaatgagaatccataggctcacgtctttaaagcaaaaataccagggctggagaaagaccttgtcctcgtagaagttaaaggcatgccccaacctaagctcaagggggaactcacagggaatttgtctagattccgttcaccttgctcttcaaggcgctacccagtggttgatttcttggcttgatccgaccttcctataaccatgagttctttcttaccaagcccggcattgggaaccgagtgctttccgtcactttt

SEQ ID NO: 46175 - DNA, 237 bp, Zea mays
  Clone ID: MRT4577_142117C.1
gtttgttttcgcgaaccagcacgcgtgcggacagggggtacagattgagggagcatatcctgaccatgcacccttttcctctgatgggcacctcaaattcttttgctactattacatttggaacttggtaaacctctttttcctttacccggtaagacaaaagaatgacgagaacaagcccctacaggccttgaggccatataacaaggttaatccgggatcaaatggggacattcc

SEQ ID NO: 46176 - DNA, 266 bp, Zea mays
  Clone ID: MRT4577_142118C.1
agcattcggagacacaccaagcgatgcgcactaccaacgacctaacacctatggctaccaagatattatgggtacttgctcttgttgccctctatgtgagcgcaacaaaagcacgcattattgtacactgctcaatggctactagtgccattaagtaagacttgctgcggccaaaaacttaaatggtgttctgacacctaactactcccacccacatgctgcatcatgcgcttggcgcacgcgttaagcgaatattcattagccca

SEQ ID NO: 46177 - DNA, 211 bp, Zea mays
  Clone ID: MRT4577_142119C.1
tctaggacccaagcgcggacacaccggacgggggcagcgataaccagggaggcgggcgaaaccaggcgccatacaaggacggagacaacaaggagctggagcacgcccaaagaccccgaaacaaccaggggcgaccaccaccctagggaccaccgcgcagcgcacggcagacaaccaccagggagaacccggagagcccgagaaaccaccg

SEQ ID NO: 46178 - DNA, 594 bp, Zea mays
  unsure (1)..(594): unsure at all n locations
  Clone ID: MRT4577_14211C.1
ccgggtcgcccagcgtccgcccagcgtccgcccagcgtccgcggccgcgtgggtgngaagtacattcactttctccaccacactgaagcgctcatacaaagatatttcagttgattcaagtaggagcttgttagaggcactaccaactgcttttaagggaatgaaggccatcttgatagatgggagacctgtacgtagtgctgttacaagatatcacctcaagaggttgggaataattgttcaagttgtgaacaatatgagtgcagtagtaaaagctttccctggacaaaatggagcaactgtttctagggaaaaggcaaccattctttttattgagagtgacttttggaggcccgagacagatgttcagttattgaaccatctacgcgagcacaagaatcgtcagttgtctgatgggcataaggtttgaggcaacaagacaaataaggcaaacagagatgagagttaacgaggaaaggaagaataagttggtgttgattgaaggctcaacatttgttgagtaccatttgcctgttttggcgatgacagccgatgttatccaggcaacttacgagaagtgtataaaatcgggaa

SEQ ID NO: 46179 - DNA, 607 bp, Zea mays
  Clone ID: MRT4577_142120C.1
atccactcatcaaccccgcgatccatctcatttcaatccatccatcctcggttcctccgtcccgacagcatctcaacccgatgaacgacatcaacatcgggatcaatgactacctcaaggatcgcaacgatggcgagcagaatgtctctgcacactgacgatgtaaaaatcgtcgccgggtacactactccttcttcaatgccgattacatgacctacatgatcgagtacacacactgcacacggacagtggaaacaccatgaaatcccggcgaaggactccaaaaaccttctctttggagagaaagaggctgctgtgtgtgactgcacgaaccctgaggagatcccgtgctatcctactgtggctgcataataggcttggaggagactggtgatttcactgaacaggagaacgctggaagctcacttgaacgcgggaggcaggaacgatgctgactctgcatcgtaacgacgatgttcctgaggccacccaatgtgctgatcaccacgagcacgatttcgacattaacatggtctcgaatgataagtacattgccagctgtctctggtcgtcttgctaatgtcatcaaggcacaaggtacaggatc

SEQ ID NO: 46180 - DNA, 269 bp, Zea mays
  Clone ID: MRT4577_142121C.1
ccggttacgctgttcctttagtggacatgtatttactgggcccggcgttggttcaatggtgaacccagttaagttttttgccgaaaaatcaggttaagattggccctccgggacattgaatatacttcggggcgatcatgacggaatatgaagctttttcccaaggtggggacttccgtgaattacggcagatcatatcgagatcggttattatttgaaaagataaaagcaacttgggaggagtgtgaatcaacatggaatggtcttat

SEQ ID NO: 46181 - DNA, 197 bp, Zea mays
  Clone ID: MRT4577_142122C.1
agcagtggtaacaacgcagagtacggcggggagaatatgcagtttatttgcttgagaaggcaaacggagatgtggctgtagcagttgacatattttacagttcaagtgagggtaataatgtaattgaggttgaccaaaaaaaaaaaaaaaaaaaaaaaaaaagtactctgcgttgttaccactgcttaagggcgaat

SEQ ID NO: 46182 - DNA, 509 bp, Zea mays
  Clone ID: MRT4577_142123C.1
ccggccggctttctttcttatacgtaattattactactcactcctgctagcgtactactgctactggagtactaagggcgtgttagggtggttggtgttgtcaatgcctgttttaaggtcacgccttccgcccgccttaatcccaggtccaggtcctctctgaaaaatggagccttttcttctgaacaagaggtgtggatgggattctctagagtttgtcagggtatattgccgtctcgtgggtccctagcacttctctatgcatcaagtttgtgcctttggcttggggctgactggtgggtttctgtgtgagctgctcaagtggccgccgagctgcggctccaatttgggggcagcgcggtgggcgtagcccgcaggccgcagctgctcgtcatctcctctcgtccctcccgtgtctctgtgtctgtctccatgacaggaacacacctttgttatctatctcgttatacatcatggttcattgcaaaaaaaaaaaaaaaaaagcggcc

SEQ ID NO: 46183 - DNA, 493 bp, Zea mays
  Clone ID: MRT4577_142124C.1
gccggccgggccggggcactctttaccgatccgcaacgacgacaaacggcaaatctcctgtacggggagaatgaagaagagtgcgctcagatacaacaacgagccaagaattcctgcatagccgtgccaccccagaatgccacaaacagcgctaccggacgcatgctactgttcttttgcatggtaagaaggcgtcgaaacagtggacgtgctcacttgacctcgagagacctgcgatccatgtagccacattttctacaacattcgtgatttgtggggtgggcgtgatcaacaaaggacttggagcatcaatcatcacgtcagacccgtttcataggcctgtgacagccaaatatcctggccaccctgcattagtgttatggagacattaatggtgtagctctgagagaattacccattcctcctaaatgaagtaggcgcgacacaaggagcaacatgggatttcctctacacaatgggaggacaatgccct

SEQ ID NO: 46184 - DNA, 298 bp, Zea mays
  Clone ID: MRT4577_142125C.1
tttgacacctggggctacagtggtcatccggaaataggctgcatgaatgagtgggattatattgatcgggagatcgcggtcctggaagcacaaacagaggataccggcctctccatactggatactgacattgagaagtttgtccgttgcaacgctttagcagatatgtgggagggtagcgcaaaggatatggaggcactgctggacgattacccagagtgtgatctccaagtcaacttgccagaggaagagaacaaggtgtgccaagaggccttgccacatgaagccagggccatgg

SEQ ID NO: 46185 - DNA, 334 bp, Zea mays
  unsure (1)..(334): unsure at all n locations
  Clone ID: MRT4577_142126C.1
tccacgcgttcggccacgcgnttcgccacgcctccgggtccccatccttcgccaaggggaagagcaagatgctttacgcaagcttaaaccagaaattcaagaatggccttaaatgcattcaaggtgaacttcaagccacaaattccaatgaaattaacctttattagatcaaagattcggcaccctatgcgcaacggcatttcgaggttcatgatcacaccttattgacattcctacatattgtggatatgtatgcgcctttatacactgggctctgaaaaactgtttttgggagatgtggggttgttgctctgtgaaaagatactcataggtt

SEQ ID NO: 46186 - DNA, 551 bp, Zea mays
  Clone ID: MRT4577_142127C.1
ttttttttttttttttttttttttttttttttttttttttttttttttttttttttttttttttttttttttttttttttggccccaccccccaactatttacaattacaatcaaatttcccccctccccagggggggggacaaaaaaaatggagggggggggggacaaaaaagattttttacccccagggggaaaaaaaaaaaaccactttttgggggggggggacggaaaaaaacgggattttgtttgtttttgcacaaaggggggcttggggccctggaggaaaccctaactaatcccccgggggggggttgggggggactggggctgggccagtgggggcaccaggaaaccggagttcaggtttttggtcggggggggggaaaaaggggcctgcctttgtttcaaagcccatgggggtttccaaagcatgggccccccccaaaagtttttcctcatcggggccttcggggacgggggacctcttgccaaaggttttttgtttttcagggcccccctccataaaacccatcattttatttgggctact

SEQ ID NO: 46187 - DNA, 1087 bp, Zea mays
  Clone ID: MRT4577_142128C.1
ccttctctcgtagacctgttgccggttgagccgacttcagaaacggttcaaccggtcccagtccatcagctgtccgagggataaaccccactctattcttctctcttctctcacttattcctctcctcctcaggttcaaaaaagacagcatctcctcacctctcctctctgctccaaagaaatcacctcctcgttctagatcccgcggagttcagtttgagggggcaagggttgttggattggatctctctcatcacgtgcccctccctccctttctcaagtttcagatcttcatttgcacgggaacttctcaagaagatggtccgcagaagaaatccgtccattattgagggaagcgaaggtgaaatggacaatcaaatcgaaagtgaagaagaaattcatgagaaacgtcctcgcctctttcaaaccggtccagtcaacaggcaggctcaaggtgacagtgagagcagcgctcggccccaaactgttcacgcaacaagaggcgagagatttccctctcgtcggcgaaaattcgcagggcaatgccctcgccgtgtggcagatccaaatgcggatgaaccagctagtgatgatgatggtaaaaaagatgatgttgtagcacttcctccggatgatgctcctctcattagggatcttgtgctacacagggccaaagccccgtcgtaatccaaatgaacctcaaatggattacagtgcgggcagcaacagtttgcttcaatacataaggtatgaaaatccaatgaagtgggcaagagataatcgaattgacggtcacagattttggaatctctttcatgtggacttctacaactcagtaatcatgactaagaagcaccaacctatcatcaaacaaagatctataaattgggctgaatgtgagcagatgagagataaggaaatgactagagctctgcgagcatgtgaggctaaaggaatgaagaacatcatgcttttctcttatgattggaacgacgaagtgatagcccaattttactcaactctatgggtgaagctgagcagtgatgatttgggtgcctatgcctatccatacatgaatttcacattg

SEQ ID NO: 46188 - DNA, 1118 bp, Zea mays
  Clone ID: MRT4577_142129C.1
cggccgctcgagccggcgggccggtcgctcgaggccgcgcaccactacacatccggcgtcttcacaaacgccggctcgctccccatccttttccgtgctccgcctccccgccccgcgccctccgccgccagatcccgtcgagccccccgcgcccccgcgtcgaagatgagggagtgcatctcgatccacatcgggcaggccggcatccaggtcggcaacgcgtgctgggaactttactgcctcgagcacggcatccagcctgatggccagacgaacggtgacaagaccatcggaggtggtgatgacgccttcaacaccttcttcagcgagaccggagccggcaagtacgtgccccgtgcggtcttcgttgatctcgagcccaccgtgattgacgaggtccgcaccagcgcctaccgccagctcttccaccccgagcagctcatcagcggcaaggaggacgcagccaacaacttcgcccgtggtcactacacaatcggcaaggagattgtggatctctgcctcgaccgcatccgcaagctggccgacaactgcactggactgcagggcttcctggtcttcaacgccgtcggcggtggaaccgggtctgggcttgggtcgctcctcctcgagcgcctgtccgtggactatggaaagaagtccaagctcgggttcaccgtgtacccatctcctcaggtgtcgacctctgtggtcgagccctacaacagtgtgctgtccacccactccctgctggagcacaccgatgtctccatcctgctcgacaacgaggccatctacgacatctgcaggcgctccctggacatcgagaggcccacctacaccaacctgaaccgcctcgtctctcaggtgatctcatcgctgaccacctccctgaggttcgacggtgccctgaacgtggacgtgaccgagttccagaccaacctggtcccgtaccctcggatccacttcatgctctcgtcctacgcgccggtcatctcggcggagaaggcgtaccacgagcagctgtctgtgtcggagatcaccaacagcgcgttcgagccgtcgtccatgatggccaagtgcgaccctcgccacggcaagtacatggcgtgctgcctcat

SEQ ID NO: 46189 - DNA, 3903 bp, Zea mays
  Clone ID: MRT4577_14212C.1
ccggccgggtatccgcgaggatccccccacaccttgcgacgctgcgttgtcacccacccataaggttggggccgccagcaggctcagacgttcctgttcttgattaaacgagagaaggatggcggcagggtctcagggaggtggcctagtctccgtttggatgatcttgagggaacaaattctgatcaaagtgattcagaccgccggacagttattaatgcccgcgagcagctagtcgtaggcgtaactattttaaggcagctgtcgccgcttggaactttcgagagcttcgcttcttttgataagctgtgcaacaggcgtcgttccgccccgctccctctccaccagctccaagcttcctttaggctcgctgttgctagtgctgccttgctgctagtgataggggtcccggggccctcaagttctgggtgggcggcgagcatatggtgggcactgggcgggggaataaggaggaagagaaagaggaggaggagcggcagtagatttgggccgcacaggcagggatggggggcaagtaccgcgcggcgaggacgaagaggtggtggagggggctggcagcggccgggtgggtgctaaccgcggtggtctgctccgcggtgatgcactggaccctgcgccgggacaccatggaccacgccgtatggatgctcagatgcaagtgatggacgggtttgaggcagccgcaggaacaaggcaaatggagttgaaagcgaacgaggaaaggaagaacaagttggctccgattgaaggcccgacaactgccgagtaccatctgcctgttctggcaatgacagccgatgttatccaggcaacttacgaagagtgcataaaatcgggaatggatggatacgtatctaaacccttcgacgaggagcagctataccaagcagtctccagattggtagtgggaacgacagattcggctgtttgatgttcaaaatacgatggaccggacttctcattcatcgatcgaagtgaagcatcaccatcttgcctctgtccagctgactctatcccttgacaatgggcctgacatggcctctcacaagactagatgaaaaaaaaagaagatgaaagtgccgtgagttagctacgtgtcacacatgacatgaagttgctgcggcagcccagaggagtgtaggtagatcaccctgtaactctcttgttctttgatgtttataggctgttgtgtcttctgacaattcattggaaataccacaactagttgcgctcgaaataaggatatagaagtaactggctatgatgtcacaaatgcttcagatgctatggttttgtatggaccttcaagtttggacgagcaagtgcctttcttgcatgttagcatgttggattttggagatccatttaggaagcatgaaatgagatgcaggtatagacaaaaacttcctatgccgtggtctgccataaccaatcctttgggcacatttgtcatatggatgcttcttgggtatagcattgctgctgcatattctcgatatgacaaagttactgaagattgcagaaagatggaagagctaaaaacgcaggcagaagctgctgatgttgcaaaatctcagttcctggcaactgtgtcacatgagatcagaacacctatgaatggcgtccttggaatgctggatatgcttttaggaacagatctaactatgacacagaaggattatgctcaaactgctcaaatgtgtggcagagcattgattacactgataaatgatgtccttgatcgagcaaagattgaggctggaaagttagagcttgaagcggtgccttttgacctgcgttctctcatggatgatgttgtttccttgttttcttcaaagtcacgggagaagtgcattgagcttgccgtatttgtatgtgacaatgttccgaaggttgttattggagatccttggaggtttcgacagatactgacaaatttggtcgggaatgcagtcaaattcacagaacgaggtcatgtatttgtgcgggtgtgtttggctgaaaactcaaatatggaagccaatcaggtcctacatggagccatgaatggcaaaggtggtagagttgagtcaacagctaatggtgccttcaatactttgagtgggtttgaagcagcagacagacgaaatagttggcaatattttaaactgctcctctctgataaggagtcgcttttggatgatcttgagggcgaaaactctaatcaaagtgattcagatcgtgtcacactagcaataagtattgaggacacaggtgtcgggataccactgcaagcacaagatcgtgtttttacaccgtttatgcaggctgacagttcaacttcaaggaattatggcggtactggcatcggtttaagcatcagcaagtgtctagctgaacttatgggtgggcagataagtttcaccagccatccttctgttggaagcacgttcactttctcagccacactgaagcactcatacaaagatatttcgggtgattcaagtaggagcttgacagaggcactaccaactgcttttaagggaatgaaggccatcttggtagatgggagacctgtacgtagtgctgttacaagatatcacctcaagaggttgggaatacttcttcaagttgtgaacaatatgaacgcagtagtaaaagctttcccaggacaaaatggagcagccggttctagggaaaaagcatcaattctttttattgagagtgacttctggaggcctgagacagatgttcagttattgaaccatctacgcgagcagaagaacggtcagttgtcggatgggcacaaggtagttcttttggtcacctctgaagccgacaaggacaaatatggatccatatttgatattgtgatgtgtaagcctataagggcaagcacaattgcttcatctattcaacaactgctcaaagtagagatagccgaaagaaaagataatcaaaaccggccgtcgtttcttcgaagcttgctggttgggaagaatatattggtcgtagacgataataaagtcaacctcagagttgctgcggctgcactcaagaagtatggtgctaatgttagctgtgttgaaagcggcaaggatgctatcagtctacttcaacccccgcatcgcttcgatgcatgttttatggatgttcagatgccagagatggacgggtttgaggcaaccggacaaataaggcaaatggagttgaaagcgaacgaggaaaggaagaacaagttggctccgatcgaaggcgcgacaactgccgagtaccatctgcctgttctggcaatgacagccgatgttatccaggcaacttacgaagagtgcataaaatcgggaatggatggatacgtatctaaacccttcgacgaggagcagctataccaagcagtctccagattggtagtgggaacgacagattcggctgtttgatgttcaaaatacgatggacctgacttctcattcatcgatcgaagtgaagcatcaccatcttgcctctgtccagctgactctatcccttgacaatgggcctgacatggcctctcacaagactagatgaaaaaaaaagaagatgaaagtgccgtgagttaggtacgtgtcacacatgacatgaagttgctgcggcagcccagaggagtgtaggtagatcaccctgtaactctcttgttctttgatgtttataggctgttgtgtcttctgacaattcattggaaataccacatctcgttgcaatcccctagtttcagaaaaaaaaaaaaaaaaaagcggccctgccttgttgtctcatccacatgatccagaaaactgtttcttccagcgccaagaaaaacacgggtaatggcctgtagacctacttcagtattggtatatgctaatggatactaatcagtctcttgac

SEQ ID NO: 46190 - DNA, 280 bp, Zea mays
  Clone ID: MRT4577_142130C.1
ctcgagacgcgccgcctgaatctccataagctcgcacaccaatcactggaatgcggaggaatcgctctcagttgccccgagtagccgcgcacaggtactaaactgctccggatcgcgtcagatgtcgccatggctcagtcatgtgagtctttagagactaggactggggattgtgctgctactcagctggaagtttatagactgtgtacaagttgtggtgtatcgctacctgctagtctgcacttcttagttcctgatcaactgatccgacatgagtggt

SEQ ID NO: 46191 - DNA, 463 bp, Zea mays
  Clone ID: MRT4577_142131C.1
tgctctacttcaccggcgccaccaacatcctctacaccttcggcggccacgccgtcacagtcgagatgatgcacgcgatgtggaagcccgccaagtgcaagtacatctacctgctggcgactctgtacgtgttcacgctgacgctgccgtccatggcggccatgttctgtgtgttcggcgacgagcttttgacctatttgtacgctttttcgcagtttctgattttcttgttgcttgtctctgttgttttaatattgcgtttcttttttttttttttttagttattttttttttatttttttttttttgattttattttttgttttttttaatttatttattttattgttattttatttttattttttttattttttttttttttgttttttgtttttatatatttttttatttgtttatttatttttttttgttttttctttttttttttttgtttttgttt

SEQ ID NO: 46192 - DNA, 268 bp, Zea mays
  Clone ID: MRT4577_142132C.1
gcgctatgctctgcaccgaggtgcccgtctccctgggcatcctcctacggcgccatactgcatagtattggacaaggacctcgtgtgggacgctgtgacaaaggcgaggatgtgtgccaggcggactccagcctacccgagagggagctgcccgagggcccaatgcccggccccatggggtgccgcgcggaggggggcccgttcaagcccttaggcggcgctaggatctcgggggctctccacatgtccatccatagcgcggttctca

SEQ ID NO: 46193 - DNA, 179 bp, Zea mays
  Clone ID: MRT4577_142133C.1
cacttcacgccctacctcaccgacgcgctcctccaggactgccacacgggctacctctagctccacgtcaaagactacagccacgtgcgctgcaaaatcagcagctggatctccggccactaccacctcttcttcacatgccccgcgtatctcaccacacccggcggcaacatgcgccc

SEQ ID NO: 46194 - DNA, 670 bp, Zea mays
  unsure (1)..(670): unsure at all n locations
  Clone ID: MRT4577_142134C.1
ggtaccggcccctcttcgagttttttttttttttttttttttttttttttttttttttttttttttttttttttttttccttaccgggcacaaactataaacggaccacatcaggttcgggtttttagctaggacactctcccatttttttgggacccatccacggttaaaaaatgaaccgacacactgcactgggacgtttcgcctaacagttacccgggcaacaaaagaggggcaaaaccaatggatcccggcctaaaattacaaggccaggccatgaacccggagtttcaaaacctaaatttaaggcatccggggccagttgttttttttgtttcaacaccttaccctgaagtttggcaagctgggcgctaatgctccggggctgctaacggacggacccctccggggcgctgaacatttggaacctcaccttaaggcccagtcgccgaggcacaacgggggaggcccacccgccaccgccgcctttacaagggggcccgcccagtttttagatctcctgccgaatgctcgagcactctttttccagttgggccagccgcgtccgaatgttgtccatgccgaccttaaggacctggttctttgggacagccggggcccaccctccagcctngcgggatggggcaatgccgctccgaaaaggcctgga

SEQ ID NO: 46195 - DNA, 238 bp, Zea mays
  Clone ID: MRT4577_142135C.1
gtgtaaacaaagatttttttaaattaaaagggaagcttggaaggaagggggggtaaaaagggggggggaacagaagggggggggtacggaaaaattgaaagggaccgaaaaggcgctttacaatttgtcggaaaaggcccttaaactggctaaaaaatttttatgccccttaaagggtttaaaaaaaattttaatacttgggttagttttaattgggtttcaaaaattaaaagctttt

SEQ ID NO: 46196 - DNA, 279 bp, Zea mays
  Clone ID: MRT4577_142136C.1
gagagggctaaaatttttttaacttttggggttgctctcaaaaaaaaaaatcaggaagcccaccccttagcccccaaaggggccactcaagccttaacagttttaaccccccctttttttgggaaataaatggggctttttttcaataaaacaaccctttttccccccttaaaacagtttttaacccaagcaagctttttttggccccataaccactttttgcaggggaactttcctttcgggggacattttcccaaaaaagccccatttttccttttt

SEQ ID NO: 46197 - DNA, 284 bp, Zea mays
  unsure (1)..(284): unsure at all n locations
  Clone ID: MRT4577_142137C.1
ggccgggnaaaaggtaccctgactagctctggtggagcgcggcagcagcagcgagcaatggccaccgagaggctcttcaaagctcgcactctggctatgctcgcgaacgcgagaaacaccgtttgctgatcaaggatctgacgctggcgccaaagctgttgcctcggcgactggttgtgttcgcccgcccaacgcccactcctagttctagtacataaatgcagaggggacatgccgcaggaatgcacccggaacatcgtgagtctcaaatttgagggatcaca

SEQ ID NO: 46198 - DNA, 289 bp, Zea mays
  Clone ID: MRT4577_142138C.1
aaccgggaaggggcttgtttttcccaaaattcaggaaaaatccctgttccccccaaaaatacaatcccccacagacccaaaatacgtgggatgcttaaaagcgctttattggaaaagcgagggattccccagtttttggagcaatccccccccaaaaggcatcacacagagacatgtcccctaaccaggccccgactacaaaggggggcctagcctagcctccaaagccgaaaagggggcggccctggcccttgagcccgtaaaccacctccatgggggccacggtctt

SEQ ID NO: 46199 - DNA, 211 bp, Zea mays
  Clone ID: MRT4577_142139C.1
ctcgcttgtcccaagaccagcagggacagggaactgtccgagcccgtggctgtgtggaggaaggcgacccccagcacaagattggtttcctttgggaagggaagagggagtgtgttggggtaaggggtagagcagaggaatggtcagggggcaacaaccgctgacagctgcaacaggtgcatggcatctcacagggaggcagggagttgcg

SEQ ID NO: 46200 - DNA, 793 bp, Zea mays
  Clone ID: MRT4577_14213C.1
ggaaaatacgtagttcacgcccgcgtcatgagcaacatcttgttagatgggccagttggcagcttcatgacattgaatccctatccaagatggtggacccacctatacgtggacaatgttctgagaaagcattgtcacattttgctgacataatcagccgctgtatccagcggcagccagagttcaggccaccaatgtctgatattgtacaagacctaactagacttgtaaatgctactggtgaggaatcagagtaaagaaaaaccatggggatatacaatacaaccctcgtgaccaagttgcgtgttgtacaaaattttgggaagataattgtcttgccacaatctgaggacaatattgtaaggatgtattttcttcagagatcattccacactaactcatgtcaaattggagtttcatttacacatggctggagagtggaggtacagcaatttgtgcacctggtcgttgatcatcaaatccatctttttgcatacatgatattgtacatagcaaggccctgaattcttgtaactaacagtcaggagttcgataaattggttagtctaaagctagtcatttaattattcgcttgttcatcatgttggatggatctactctcagcagtcgaaggaaaattgttcggccatttacttcttgtagagaatagagatgatttggttactgctgtaaaacccagttgtattctcctttcaaaaaaaaaaaaaaagggcggccgccgactagtgagctcgtcgacccgggaattaattccggaccggtacctgcaggc

SEQ ID NO: 46201 - DNA, 190 bp, Zea mays
  Clone ID: MRT4577_142140C.1
ccctgcatgcaagttaaaacccctccaaaaggggccccaaatttaaattcacgggccctcgtttaaaaacgtcgtaacgggaaaaacccggggttaaccaaatttaacccccttgaagaaaacccccttttcccaagctggggtaataccaaaaaggccccaactgttcccctttccaaaaatttgccca

SEQ ID NO: 46202 - DNA, 730 bp, Zea mays
  unsure (1)..(730): unsure at all n locations
  Clone ID: MRT4577_142141C.1
gtacgcctgcaggtactggtccggaattcccgggtcgacccacgcgtccgcagaaaagctttgctaaaacagattcttagttatttgaggtaacaaaagaaagccatgtcttgaattgattcgttcttaattataacagacttatagtggaaagggccttaaacacaggcggactttataaaatgcagtcttaggtttatgtgcaaaatactgtctgttgaccagatgtattcacatgatatatacagagtcaaggtggtgatatagaagatttaacagtgagggagttaacagtctgtgctttaagcgcagttcctttacagtgaatactgtagtcttaatagacctgagctgactgctgcagttgatgtaacccactttagagaatactgtatgacatcttctctaaggaaaaccagctgcagacttcactcagttcctttcatttcataggaaaaggagtagttcagatgtcatgtttaagtccttataagggaaaagagcctgaatatatgccctagtacctaggcttcataactagtaataagaagttagttatgggtaaatagatctcaggttacccagaagagttcatgtgacccccanagagtcctaactagtgtcttggcaagtgagacagatttgtcctgtgagggtgtcaattcaccagtccaagcagaagacaatgaatctatccagtcaggtgtctgtggtggagatctagtgtcaa

SEQ ID NO: 46203 - DNA, 594 bp, Zea mays
  Clone ID: MRT4577_142142C.1
aacaaaaaaagaatctgatcatatatataaacatctctcagatacaatcacttcgggcgacgctgtgtgaaaacgactgcgattgttgcaactacaggatagctcctaaagccgttttacagtgcccccatcactcaaaatctaggggcatccacatgccgaagaaatgtctcaagctgaccatgaaccgttcgacaaaaaaaccctgccaattttgaccaatccccgcaccaccagctatgttcttcaaaggccaaaaaggggggaaaagaaagaatggatgtaggcgagtatgaacagttctgctgtgcaagtccaattgcgaaaatctcttcgaccgagcagatgaatggtaatggagccacctcgggccatggaatgactcggtcgaaggaacagaatggacttggtgggtagctacattagtatgcaaactcattgggctgtgcccacaaaaaaaatgttgtcttcaattcccagtttgccacccccccagtgatcttgctctgataaatgactgactgactgaagagcaggctggcacagagcttgtcttagtcgcccaccctctcgtaaaagaaatgtaggcctcgc

SEQ ID NO: 46204 - DNA, 292 bp, Zea mays
  Clone ID: MRT4577_142143C.1
aaaatccggaatcgtgcagacgggcaccgcttatcctccgcgcaggcaagagcagccagccgattcgggatcggtacgcggagaggggaaaggcgagtcgtcgactcgtcgtccgggcagcttacctccctctcctgtccgtccccgcttacctaggccggccccgtctacgcacgcctaccgtcgtcgcacgatgagcacttctcccgacgccgacgacgtttcgcctttgccgcctactgctgccgccgacgaggccgcgcgggcgacagaaacgggggtggtcgatgag

SEQ ID NO: 46205 - DNA, 578 bp, Zea mays
  Clone ID: MRT4577_142144C.1
attgcctccgctcgaccattcttttctcgccggccatcacttttgcctcaggccgacatgtctctgattaacaatcacgcgcagcgctagaccttcttcacggtgtccaacatcttcctatagaaacccgagcgcctgcgtcagacctccgccagagggaatggaccccgcgtccctgacgacacttgaggtattctaggtacgggaccaagaagagtgctgaggatgtatactgactagaacgaaggatcacgatcgtgttggcttcctctgtgttttatctcacctccacctttaggacctgtggctttgctacctacgtcacttagacggtggttctgaatgatggtccccaccttttgctgcctaatgtaatgccctcgtgagatctgctacctgttaactgacgcaaaccgaacagctcttccggcctctacggctcttcagctccaagttttgtgccctttacagatgcgtccgtgcgcgctagacgatatgcatgggcgaatgtggatccggggcgtgaccgtattccgctgattgttgcacactgcaccgagctccaaggcttcctggtc

SEQ ID NO: 46206 - DNA, 275 bp, Zea mays
  Clone ID: MRT4577_142145C.1
accaagcaagttcttgtgtgtgcgacacaggcgccaaccttcccaataatagtaagcgcaggcaatgcatagttaacaccgaattttatttcacaagatggacaccttttatgacgggtaccaagcgacttctgtatgcactggttgcagaagaaatagtagcatttggcaatcacaagctgtgcaatgatgccagcaaatttttaacatttggttttttgctagaactactctagcctcatggaaaaggtttttgaaggaccagcggaatttat

SEQ ID NO: 46207 - DNA, 604 bp, Zea mays
  unsure (1)..(604): unsure at all n locations
  Clone ID: MRT4577_142146C.1
ccggtatgtcaccgtgcagaccatttctggaacaggggcattgaggattggagccagttttctgcaaagattttttaagttcagccaagatgtctttctgcccaaaccatcctgggngaaaccatacaccaatcttcagggacgctggcatgcagctacatggttatcgatactatgaccccaagacgtgcggctttgatttcacaggcgctatagaggacatttcgaaaatgccacagcaaagtgttcttctcctgcatgcctgtgcccacaatcccacgggagtagacccccgccctgagcagtggaaggaaatagcaacagtggtgaagaaaaataatctctttgcattctttgacatggcctaccaaggctttgccagtggtgatggtaacaaggatgcctgggctgtacgccacttcatcgaacaaggcattaatgtttgtctctgccaatcctatgccaagaacatgggcttatacggtgagcgtgtaggagccttcactgtggtctgcaaggatgctgatgaagctaaaagggtggagtcacagttgaagatcttgatccgtnccatgtattccaaccctccaatcaatggggcccg

SEQ ID NO: 46208 - DNA, 524 bp, Zea mays
  Clone ID: MRT4577_142147C.1
cctcgagccggccgggatatacgagagctcaccttctactctcgtatcctaccgcgccctccctgatattttcactgtgccgccgttcgctggacattctctccctccctcccgcttttaccatgatgcgcgcatcggatcccagcttgaggagctcccttccgctgcgcaacttcctctgtcgacacccaagaatctaagccttcaatctgcgacgcgcccctctctgctcgccctccccagccataggaccttcctgagcgcgcgctcctctgctcctgcgagctcccaattttccatggcgctcggtcgcgcaaagtcttcatcggccatgaggcctccttcgtcgatggccttgcttccctgcatctcgatcatgatctccatcggtcgttctgattacgtgtgacatggcgagcgagtctttgtcgatgacgaggttgttgctggcgacatttatgttgtcctgcactaggacaggaccctgcccctctctgaaagtgactagagctcctcggcatcct

SEQ ID NO: 46209 - DNA, 366 bp, Zea mays
  Clone ID: MRT4577_142148C.1
aggcttcgacgcgtacaagctttacactctttagggctattttttgtttttatcataaaactgggaaaggatctagcttatcctttacagggcccattgttgccctctttgaggagtttacaataagtggaattccattaaaatcggtggtgcattgcgtaaaaccttgcgagttaccgcacactaaacttgcgctgtaaatgaatcagtcactactcttgtttcactgtggggaaaataggtataacaggtcccaatatccatacgaccattcccaacagttggccaaaactgaatagagccaaggggcgcctccctgagagaggctacacttaaattcattgggtgtggctgattcgcccattt

SEQ ID NO: 46210 - DNA, 398 bp, Zea mays
  Clone ID: MRT4577_142149C.1
gagggccgcttttttcttattttttttggaagagagatagggtttagagaaaaggagaagagtgtatggataaaatttaacttgtgactacattcataccaatgcatccatgaattcatggagggatggggcctgtaagctactgtgcaagtttacaactaagcacgggaacatgttgcactattggacagtgcagttttacatcacacctcaatctccaagggcgggaatccatggtcgccgctgaacacaatcacgcacttgcgcttcaggagtacttcctcttcgccggcttccggaggtagccgtacgtacgctgtctccgtacgataccacttgcacacatccacgcatagcacgacgacaaaaaacgtcatggacgacaggtaccacccgaa

SEQ ID NO: 46211 - DNA, 247 bp, Zea mays
  Clone ID: MRT4577_14214C.1
cggacgcgtgggtgaaggcaaggaaaaacacccaaacggccaaaccccaggaagccccgtcggaccctacaagccctaaccctagcgctcccgacgcgccgcgaggatggcgatggacgcggacggcggcaggcggagctgatcgcgcagttctccgctcaggcggcggcgctttcgttcgcgccccagctcgccgcgctggtgcttgaggccacctccctaccggccctctgtcgcttctccgagc

SEQ ID NO: 46212 - DNA, 453 bp, Zea mays
  unsure (1)..(453): unsure at all n locations
  Clone ID: MRT4577_142150C.1
tggcttggaacctttgggctgatttatgtgcttgtttatgtgcttgtttatgtgcttgggacctttcatagaaccccccttcgcgtcgcgcgtcaccttctgtacgggcggtcggtcagtgtaccggaaagagctatctgacgacttcgatatcaagaccacaaggttttaataggcacatattggtcctcggtccaggtatcacatttttgctagagaatgagcgtcactaagttagagcgaggaatccggctaggccgttattctaaatgtaatcaggtgttgntgcgtcggcctcgtttcgcagaagtcgtagtgcacaaatgtattggtacatctaacaaatactgattatccccgcgtccgaaaaggttataaacgtcccccagtccggccggagccgcaggttccccggcgctgagcacacaggtaacaacgtagcgagaatattat

SEQ ID NO: 46213 - DNA, 263 bp, Zea mays
  unsure (1)..(263): unsure at all n locations
  Clone ID: MRT4577_142151C.1
tgcgcactatctcgacacagcctagctccaatggacacaacatacgagctgacgtgagagatatgtaccccaatagctgaccctatggcctatgcgcgactagcattaacaatctgggatcttgtgcaacaagctgccgactactagcatctaaaaaagggtgcttatgaagcgactaagacactgaacagaggcatttctgaggtcgttgngatgaccgcagacactgacctcttgagattcttctcatcttactctccttg

SEQ ID NO: 46214 - DNA, 410 bp, Zea mays
  Clone ID: MRT4577_142152C.1
ggccgcttttttttttttttttttcttttttttttttttttttttttttttttttttttttttttttttttttttttttttttgtttttcatgtcttgtaatacaagagagactataacaaccttggattacaaaaagagcactagatgagaatacgaaactaatacacacacgaaacagagcataatccatagcaacggccacgctaggaagaggccaaagagattggagaggccctcgaccttggcgcggttcttggcggccatttcctccgccaggaagatgtgcttgccttgcctggcctccgtctgctccctggtctcctccggcgtcctgtgcaccatcgccagcttgggcttgatctgcacatcatacaccggcttctttttctgcagccgctccacgagctt

SEQ ID NO: 46215 - DNA, 537 bp, Zea mays
  Clone ID: MRT4577_142153C.1
gcccgaaagcggttcggttatatttcatagagaggttaaaagacgaaaatgagctgtagacccctcccttgcccaaaggtctatacctacctacgcggatataatatgaacggctgcagtcctctatgctgtaactgtgccctacttacctatcgtccggtgatcatcatatacgctacgtcttaaaggttgcatacttatcctagtacagattacactggggagtctctgttcacacctaacacggtgtgattacttatgaagtgtaccagaccacttaacacaagggcgtgtaaggtaacttgtttacgactaggccctcctgtgaggacgacctcccgaatgttccgacgggggccatggaaagcatatgggcaatcttgcctcccagatccgttggactgacatgagtatacccagtggagatcagtggaccctcgcataccaactgtgccggcctgtgggctggagtacttgcaggctcgcttttgcgcgcagcgtttaggcccttgatgataagatggtcagggttgatct

SEQ ID NO: 46216 - DNA, 329 bp, Zea mays
  Clone ID: MRT4577_142154C.1
ccgacgcacgcgtccgtataattgcttgtgaatataattacaatcttttgataacaaagatacaacaggtccccaatacatcgttacagcgtgcacaaatcaaacaacacagacacccacccaataataccatattatcaactcttaacttgatatatcaatgccaggacagcacaaaccaatagctactgctcctgttctcaaaggatgtctcacactatgcactgtgtctacattgaatctgaacttcacttacgcaaaaccaaacaagaatcttgcagcttctcccagcagatcacatcaaaactacccacatgcttaacattcat

SEQ ID NO: 46217 - DNA, 935 bp, Zea mays
  Clone ID: MRT4577_142155C.1
atttggaaacattgggcaatttactttatacctactatttcgtctggtttttggtttctagtctgattttattagtagctatgattggggctatagtacttactatgcataggactacaaaggtgaaaagacaggatgtattccgacgaaatgccttggattttaggaggactactattcatattcagaacagaaggttcttctcccacaaaggggatgacgcacctgtcccccccgctgatccggaatccatttaatctgatttggcagagagaatagaaaggatttataggcgggccggggaggagcaatctttagtagaagccgggactacgccaagggaacttgtagataacgtcctgccagagggggcggagctaccgcttctacaagaaacctgggttcagtttgtacgggacgagtcatacagcgagttttgggtagagatcgattcgataatctgctaaggaaatatgggcacgcggcgcgcggtgagcccgacacccccgatcccgatgctcgagcctgatgcccctcaatcaggaggaggcgactcagcggggagcacgggggaagaaaattgtccgggggcggggaaggaaagtaggaacctccgaaggcccgcccgagtcaaagaagcgcaaaagttattctgattctgattccgggggggatgatgggagtgaccctgctccggatccttctcctttcttttgattttgactaaaatgagaggtggagaaattgagttcttttgagcagcgttgtctgtagtagagtagcttttttttttttcttttacagaaagaaggcgaggcccacctgccttctctaggtactttacttggaaaggtgtcaccgccttccttcttctctaggtactttacttggaaaggtaggtgcgggaaagaagagcgggtatgtgggcttctttc

SEQ ID NO: 46218 - DNA, 357 bp, Zea mays
  Clone ID: MRT4577_142156C.1
gaccgacgcgtgcgaccatcgcaacgcagcagcatcaacaatttttaccagcactaaaccaactaactgcggtcgacggtgtcgactacttgctacagcagttgctcgcattcaacccacttgctctggcaaacatagttgcataccaacaacaacaacaattgcatcagtttctaccagcgctcactcaactagctatggtgaaccatgacgtctacctacatcagctacaactgatttcatctagccctctcgctgtggttaatgcacctacatacctgtaacaacagttgctgcaacagattgtaccatctctgactcagctagctgtggcaaactctgctgcctacttgcaac

SEQ ID NO: 46219 - DNA, 294 bp, Zea mays
  Clone ID: MRT4577_142157C.1
ggggctcctatgggggttttacccccgttttctcattattccgattggctgggaaccacaaattttgttttggggtacttgttccacgggtcattgacaaaacaatttaaggggcttggaaggaacacgggtaggaaaatttaacaatggaacaaaaataccaaattcttttatagcctgcatggggggggtttccacgggtggagagcattaagatgggtgggctcaacggtagcggcggagggacagggtttggttgccctttcaggggggccttttttacggtctgttttt

SEQ ID NO: 46220 - DNA, 333 bp, Zea mays
  unsure (1)..(333): unsure at all n locations
  Clone ID: MRT4577_142158C.1
ttgcgctaggtttttgcaccaccctnccgccgccgcggtggcgctattaaatcaggcgggcgatcagatctccaccacgccacaccctcgacgagagcaggagcgccgtcgtgtcgagtcatattttcggcctcaggtctgtgtcgcgccgcgtacaactcaagcgctgcttggagattgagctcgtgctgttgatctctctgccgctcgtggccctcgacgacatcgtcgccatcattctctgcatcatctgtcgatgatcgcagatggactattcagcctgcacgggcgtatgcattgcgactcctgcaatcgccttcctgcttgatcacc

SEQ ID NO: 46221 - DNA, 198 bp, Zea mays
  Clone ID: MRT4577_142159C.1
gcttggtcgctgggcgtcttcgacatgcttcttttgtccctcgagtgaccgatagagtgcgccggcgctgtgatggtggtttattaagatctgctatatggggagaagctcctgtcgggtgtatttacctacatggagctcgagaacggggtgctgtgggaggtcgagggagagtggggcacccgggggcctggtggt

SEQ ID NO: 46222 - DNA, 580 bp, Zea mays
  unsure (1)..(580): unsure at all n locations
  Clone ID: MRT4577_14215C.1
gggcattgntttgtttattataattgagctgggggtgcattatgtcactagccagaataacattcagaatatgtatcctgttgctcttccgttcccctttctaaaataaggtatcaatataattttgcagtgtaaaaaaaaaaaaaaaaaaaaaaaaaaaaaaaaaaaaaaaaaaagaggggggggggaaaaaaaaaaaaaaaaaaaaaaaaaaaaaaaaaaaaaaaaaaaaaaaaaaaaaaaaaaaaggggcgggccgttttaagaagaaccaaattttacttccccgggcttgcaactaaaaactttttttttggggcccccaaaattaaattaatgggccgggttttaaaaacttcggaattggaaaaaccttgggttacccaaattaaatccctttgaaaaaaatccccttttccccagttggctaaaaaccaaaaaggccccccccaaccccctttccaaaaatttccccaccctaaatggaaaagggaccccccctttaaccggccaataaaccccgccggttttggtgttaaccccaaggggaacctttacatttgccagccccttacccccc

SEQ ID NO: 46223 - DNA, 747 bp, Zea mays
  Clone ID: MRT4577_142160C.1
cgggagagacctcacaatctcaccatcaatctatatttgacttccagcacagctacccgagcgaagatgagcgcaccggcggccgtcagggtgatcggcgctttcgacagcccgttcagccaccgcgccgaggtcgccctgcgcctcaagggcgttccctacgagcttatactggaggagctccacaacaagagcgagctgctgctcacgagcaaccccgtccacaagaaggtgcccgtgctcctccatggcgaccgcgccgtctgcgagtcactcatcatcgtcgagtacgtcgacgagaccttcgacggaccacgactcctaccgtccgacccatatgaccgcgccatggcccgcttctgggcccgcttcatcgacgacaagtgctcgaagccgttctggctggcgatgtggacggacggcgaggcgcagaagggtttcatgaaggagatcaaggagaacttcgcgctcctggaggcgcagctcgaggggaagaggttcttcggcggcgacacaattggcctcgtcgacatagccgcctgcgggttcgcgcactggctcaccgtgtgcgaggaggtgtccggggtgacgctggtcaccgccaaggagttccctcgcctctgccgctgggccaaggagtacgcctccgacgagaaggtccgggcgtgcctgccggacagggcgcagatgctcgcccatttcacggcaaacaagggagatgttcatggccatggcaaagtcatgctg

SEQ ID NO: 46224 - DNA, 1916 bp, Zea mays
  Clone ID: MRT4577_142161C.1
gccggaaaaaaaaaaaaaaaaaaaaaaaaaaaaaaaaaaaaaaaaaaaaaaaaaaaaaaaaaaaaaaaaaaaaaaaaaagggccgtcgagccggccgggaatgctacctggctacgtgctcgcggcctcgcctaccaccacccgtgcccgtgtcccgccgccggcggcgctggggatggcggggcccaaggcggctgaggacggctcggcggctccgctgctgcctgcgcaggcgggggaacggagctcaggaggcgtgggcggaggggccacgtccgcgcagacgctggggaacgtggttgtctccatcgtgggcaccggtgtgctcggcctcccctacgccttccgcgcggccggctgggtcgcgggctccatcggcgtcgccgccgccggctccgccacgctctactgcatgttgctactcgtggactgcagggataaactcaaagaggaagaaactgaagagtgctgtcatggtcactatacatatggggatttgggtgacaggtgcttcgggactataggccgatgcttgacagagaccctcgtccttgtttcgcaggctggtggttctgtagcatacctgatattcattggccaaaatctccattccacattcagccagctgatgtcaccagccggcttcatcttcgccatcctcctgcctctgcagatagcgctctccttcatccgctcactgtcgtccctttctccgttcagtatatttgcagacgtgtgcaatgtccttgccatggcaatcgttatcaaagaggatcttcagctctttgaccaccccttttcaaacagaagcgcttttaatggactttgggcagtaccattcaccttcggtgttgcagtcttctgtttcgaaggattcagcatgacccttgcactagaagcgtcgatggcagaccggagaaagttccgctcggtgctttcccaagcagttgccgccatcatagccgtgtatgtctgttttggagtttgtgggtacttggcctatggcgaggccaccaaagacatcataacacttaatcttccgaacaattggtcgtctgctgcagttaaggttggcctatgcatcgcactggcattcaccttcccagtcatgatgcacccgatccatgagatcgtcgagacaaggttcagatccaacagatgctttcggaagctcagccacaacgatggcggcgcggagtggataggcttgcacgcaagccgcgtcctcgtggtggcggtcctcactgtggtggcgtccttcatccccttctttgggtccttcatctcgttcgtcgggagcaccatgtgcgcgcttctctcctttgtgctgccggctctcttccatctcagcattgtaggctcgtcaatacccttgtggaggcgggtgctggactacggcatccttctctttggtctggctttcgctggatatggtcttgtcactgctctctcctcgcattgaacaatggcccaaacagtcaaaaaagtgcagagatcaggatatcttgtgatgacaggagtcaaatggatgctaggagcaccatatatcagatagcacggctcggattagtgcgtgattgaactgatccgcttcaacccatatagccgcagtcatccatggaagatataccttagcggattggaatggtgatttcgagaaaccaagttgacattgttctatgcatgttacaaaaatctacagatgtcatgaactttaagagccatatcttaatcgcgtatgcatgttacacgaaaaaaaaaaaaaaaaaacccgcggccttgttcgtttgtgtcggattggtgggatggaacaattcccggccggattgcttctctaatttatataaaattttgattgatcggaacgattccgggtgcaatctcgacgcaaacgaacaagggctcaacccatatag

SEQ ID NO: 46225 - DNA, 199 bp, Zea mays
  Clone ID: MRT4577_142162C.1
ggcgaagcagcagcagcgagaggccaccacttacatggctaccacggcgtttctacccccggcgaagctgcggctgcatggacgtcggttcactagccccaaaacggcaggacgtatcactgtcacggtccctcctgctcgagcgcagcaagagcagcacgtgaaggacgatgaggccgaggctgcgagcgtgcacccg

SEQ ID NO: 46226 - DNA, 210 bp, Zea mays
  Clone ID: MRT4577_142163C.1
aaaaaaaaataaaataaaaaaaaaaaaatataaaaaaaaggaaggacgcatataggggagcctgggtgagctgctccaagctgcgtcggcatacttacttatgtagtggctcctcctattgagttacctggctgccgtttatcggccgtcggtctgcaacttccttgctgtgacccaccttactttttttgtagcaattgctttttttta

SEQ ID NO: 46227 - DNA, 350 bp, Zea mays
  Clone ID: MRT4577_142164C.1
aaagacaaagtacaaaatggaacaaacacacaaaaacagacttatacaaattcgggggtttaacatcagataaagctacattacatataatcttgtaaagctgaatgatacatattctagtaaaaataattaaacgttacataaaattacactcgtagatttcacaccaacacatcttctattgagaaaaatctttttcaatgtctggtatagggaaggtttactagcttgttccatactcaagtaattcccacctgaatggctgaaagacatataacacttccgggcaactcttggacaaaagaacgacacaaacgcaaaccgctgctatcgctaccatcgaaagcatt

SEQ ID NO: 46228 - DNA, 138 bp, Zea mays
  Clone ID: MRT4577_142165C.1
gtccgtccgaattccggtcgcccacgcgtcgacattcaatgtttggtttgttgcattgacatcaacttgttgttgtatgtctattatgtatgagtcgcactctcatgggacttttgggccatggtcgctacctatatt

SEQ ID NO: 46229 - DNA, 777 bp, Zea mays
  Clone ID: MRT4577_142166C.1
gtcgtcctcgcagtattaaccacacaggtcactcggtaagcgcaaccccccgaatccctcgtcgactctacagtacatcgaatacccgtcgcattgttccagcaataggaacacgacagtcttgaagatggctagagcgcagattggcagcaatgcctttctcactcttagagttgcagtacctatttagtggatgaacattcgctaataggtttctgttctcaatgacagcctccacgacaagatgccaccaaagggaaagaaagcagcccccgcacccttcccccagggaaaggccggcggatccaagaaggctcccaagaaccctctcattgagaagcgccccaagaacttcggtatcggccaggacatccagccccagcgcaatgtctcccgcatggtccgatggcccgcctacgtgcgcctccagcgccagaagaagatcctcaacatgcgcttgaaggttcccccgtccatctcccagttccagcacgttcttgaccgcaacaccgccacctctgctttcaagctcctcaacaagtaccgacctgagaccaaggccgagaagaaggagcgtctcaccaaggaggctaccgccatctccgagggcaagaagaaggaggatgtttccaagaagccctacactgccaagttcggtctcaaccacgttgttggcctcatcgagaacaagaaagcttccctcgtcttgatcgccaacgatgctgaccccattgagttggtggtcttcctccccgccctctgccgcaagatgggtgt

SEQ ID NO: 46230 - DNA, 919 bp, Zea mays
  Clone ID: MRT4577_142167C.1
gggggggggggggtttttttttttttttttttttttttttttttttttttttttttttggggcatcgaaaaacccaaatttcagcaaaagtttgcctacaagccaaaacgagctccgaatccgtttcaaccactatcaaatctccgcttgggggggggggggtaagacttaagaatgagacatcctctccctcctttcggacacgcgtgcttcttgaatgctggacgcggccaaacagcgccagcagcaaatctccaggctgcacagcagcagcagcgaccgcccgcaggcatgcaacagcagcagcggcacggggagaaaaaggtgggccaaaccgggcacgaaaccgaagcgctcaccgtccctcacccaaatcgccgaccgtgaggagagaagccgagctgaagagagggagggcagcaggcggcagcgcggaggggaaatggggaatgcgcgaccagtgtgagcctctcacccccgcgaaatcccaccgcttctgattccgccggctaaattagctgggctaaacggtggacggcggcttcgagaggttcgttcgagacagtcagggtgaggttgtgaggagccacggcgacggggatgatgaagggagggggcgcggaaggagacgctcacagcctccttcctccgcttcctcctcctgctcctcctccccctcaccgccttctacttcttctacacgctgcagctcctcctcatctcggcatcgtcggccgcctccaactgcgtgccggacgccgtctcggtctcccgggtgtccgccaacctcacggcggcggagaagcagctgccccctccggccgcagctgtgtccacgtccacggcgacgacgctgcagcacgtggtgttcggcatcgcggcgtcgtcgcggttctgggacaagcgtaaggagtacatc

SEQ ID NO: 46231 - DNA, 240 bp, Zea mays
  Clone ID: MRT4577_142168C.1
accgcgcccacctaagcctgttgagagatgactgagggatgcccagaggcacacaaacaacgtcgacgacgtatgcctcgtgggcggcttcactatgatgctccgggtaccatttttgctcacatgactacattctcctataggagctgttcatgaacattacctctgaccaggcgcgtgtctatggtgttaatacccaagcctttatccttataggatacagcaagcaaaaggtgctgg

SEQ ID NO: 46232 - DNA, 302 bp, Zea mays
  unsure (1)..(302): unsure at all n locations
  Clone ID: MRT4577_142169C.1
aagcttngagctgccaacaangctgtctcgaagattggacagtactgcctggtggtggctctggcggctcgcagtcttgatctggacctcaggggggcgccgccatcatcatgatcagaaatcggctgacagaaatggttctggagaccacaataacggatcagcagtgaagaaccaacctgaggatactgaacatccagatagaatgatactgcaacgaaaccccaaaccaatccagctgcgcccaacatcttacacgctcccaccataccccctagccacttttttttcccccccccccc

SEQ ID NO: 46233 - DNA, 304 bp, Zea mays
  unsure (1)..(304): unsure at all n locations
  Clone ID: MRT4577_14216C.1
atcaacctgtgctctgacaaacactcnccaaagagagaaagttctcaaatatgaggaacggctcaacnaacctcctgagcatcaactagttcttctagccagctgaaggctacaggtactattaccctactagccttgaccgtggcaggtaccgtaacagggtatccatgcattgttacaaccccaatgtatctgttgaccaactcgctgctccatcgatcgaagaccaggctcatttccctgtcctgccctaagcacaactcgtgttctaactcaagattatgtcacttttgatgacagcgtc

SEQ ID NO: 46234 - DNA, 360 bp, Zea mays
  Clone ID: MRT4577_142170C.1
ctttgggctgatttatgtgcttgcagtgactcctccccgaacgtcaggtcctcacgcatgttaaacgatacacgtcgtacgtgcgcagctctatttaggcggcggcgtgtcttaatgatgtcatctagacctctctcgctatagtcttacatgatgatgcacttcgtgatcgctaccaatttacggtgtataagttgctcgaattgttcaagattagatttctttatttgctgatgctcggtgaagttcaagaagttcgaagtatttaagggtaccattctgcatttagtgttcgggtattaactgcttaagagttttcctcattttcggggtgctggcttacttaagggttttactatg

SEQ ID NO: 46235 - DNA, 369 bp, Zea mays
  Clone ID: MRT4577_142171C.1
aataatgaaagctcaattgattcattccttttttttagataatggaacaaaatccggctttcgcctctttcgagggtagggccaaggtcagacaccaaataacaactccaagtactcgcaaaataaggccaaaacatttagcctaaaagacttaaactctctcttactcctcaccgattcaacactcacttaaaaaatgaaaatgatcaatacaacgtaatcctattagaaaatctccaaccccgataagcaaaaaagtgcatggccatcgtctccagatgtcgacaagctcttcttaacagattcgctgaatcgtcacttctttgcagctgcgcccaaagtctgagccaatgagttcctctgaataga

SEQ ID NO: 46236 - DNA, 240 bp, Zea mays
  Clone ID: MRT4577_142172C.1
cccacgcgtacgagaacatatcgatgcttttaaatatcaatcagctccctcttgcaaggtatgtgctcgttgcacaggtgctcagatagctccttctatgcatctgctaccatcacataagatggcttactgagctttatttcatgtagatacatcctatgaacattcctttacttcggctaacgtatcatattacaatcccttatgattacgattttctttgaattatgcacctaacca

SEQ ID NO: 46237 - DNA, 197 bp, Zea mays
  Clone ID: MRT4577_142173C.1
cccgtttgccttgtttaccttcctccctttaactcctgcgatcctggagtgtgcgggagcatccaaatgtcggcctactgcgcaagtacgcggatgagctcatcaagaatgctgcctacatcggcacccctggcaagggtatccttgctgctgatgagtcaactggcaccattggtaagctcctttttaccatcaat

SEQ ID NO: 46238 - DNA, 153 bp, Zea mays
  unsure (1)..(153): unsure at all n locations
  Clone ID: MRT4577_142174C.1
tttgaaaactactcggggaaataacgtgctggaaagaatagacccttcattggtggagaattcaattaccaagcgccgngcttttgaatggtttggggtggattaagccggctttttttatatggaccttatgaaggttggaaaataaaaagg

SEQ ID NO: 46239 - DNA, 1838 bp, Zea mays
  Clone ID: MRT4577_142175C.1
tgtctttttcttacatctacacagtctagagatagtcggcgtgcatgacctggctgccccatacttcacacctggacacgtgctcatcccatggacagaaattactctctagcagtcccccgatcccgagagcctcattgatagcacactatagcgtgattttggcaccaaggaagcactctggttgcttaagataggtcttgtgtgcatcccggtatagccctaagatcaagccctccatgtcaatggttgccaaggatgctgcaagatgagtgtgctgtgagtgacaggatcatgaggcctggcctgatcacagacgtcatggacctgaatgtcaggatggtagagtcggttcagttccgcttgacatcatgttctagtactgacacgtcaaggcctgagccctgaggcacagaaaaattgcggggctcataaaccctatataccgccgactcgccgccttcgcctgccgccggatctctgcaccggcggtagagaagcccgtgctgcccctcgtgtatcaccggaacttgcagcaaagacacaattccagtttggtggatgcgagtggaggattcagcgagatgcttgcctctacacggaggtgctatgtatttggaggcaaaggtggtgtggggaaaacaagcatggcggcgtcgcttgctgtgaagtttgccaaccatggtgaaccaacagctattgtttcgacggaaccatctccgtcactcggtgatttatttgaacaagacatgggtgttggcggcaaaactgtacgcatcactggatttgactctctttttgcagttgaggctggtcagttcaagataaagggagaacctgaagatcttggatcttttatcaacaatttacttggaaagatggggcttggaacacattctgatattatgtctatgattagagagatgctggatggaatgccccctggacttgaagaagcgcttgtactatcaaaggtgataaaatctattgacgtgcaagaggccgatatacttcggcgtttagtgctggatgctccatccactggacatacacttaagcttctgtcagcttctgattggattgaaatgttccttactttgagcattaagggcataaaagtggcttcgtccatgccatcgtttaatatgtatcttgaggacgtgcaattcatctctgccaggctagaggaactaaggcagcaggttcgcagagtgcgtgagattttgtttgatccacaatcaacagaattcatcgtcgtgacaattccaacgatgatggcagttactgagtcatcaaggtttcacgagtcattaaagaaggatggtgcacacacaagaaggctcgtcataaatcaggtgttgccaccgtctgcgtcggactgcagattctgtgctgcaaaacggagggaagaagcacgtgccttccgtgcgatactggaggaccgagaactcggcggcctgaagctgatccaggctccgctccttgatatggaggtgaaaggcgtccctgcactccgattcctcagcgattcagtgtggaagtagcgagaaacactaggtcaaataaaagattaatctctgtcggtctgttcggattctttcatttggttggagttagaatctagttcatgaatttggcctagaatctggcattcgaccacgttctatcactcttctcaagtatagacctgtgtcaaattcagagggcaataaatggtagtagtttttttttttttggtcacagcttatactagttcacaacagcacaccaatggataaccctcgcttgacgcttgtgttaatgccgagggataagatggaatgaactcagcattcagt

SEQ ID NO: 46240 - DNA, 347 bp, Zea mays
  unsure (1)..(347): unsure at all n locations
  Clone ID: MRT4577_142176C.1
tatctgtctttctttaattatttcnctattcgggcccgcttgactacaacatttcgcgcaaacccaaatancataaacatacaccatttcaaggacctacgaaatgaataaaaatcaaaacccgtcattctattaaatgcctctcataaagagatagcactaattcttaacttgaacattaaccaaatatttacagaatgcaactcttgtatcttttaactagactcaagcaaatgctacccccaaattccaaacacttacttcccaatctccacccttctttattccccttacaccctacatacatactcctatgaccacactttaaaatcctcaaaaaaaatatc

SEQ ID NO: 46241 - DNA, 506 bp, Zea mays
  unsure (1)..(506): unsure at all n locations
  Clone ID: MRT4577_142177C.1
ccccgcgtccgnaaaaaaaaaaaaaaaaaaaaaaaaaaaaaaaaaaaaaaaaaaagggaaggccgatataaaaagaaccggagcttaccgccggcgggcctgccaaggttgatacctcttttattgcggcgtcttaactcatttatggggccgcctttgtacaacctcagtggccgttgaaaaccccgcggttacccagcttaatacgctgggaaaacccctgctccttcccccagcaggcgatttaccttacagcccctttccgatggccgttgtgaccagtagcgggccctgtttgatgaatgtgaccacccttgttgcagcctgttaagcgccttggacgcgccctttacccgcagattgagcggtgcttttgcgaaggttctccgcaccgctccttttgcttttttcccttcctttttgccctttttttccgttttttcccgtcaagttctaagtatgtggcctccctttttccagccaggttattactttggggctccttt

SEQ ID NO: 46242 - DNA, 508 bp, Zea mays
  Clone ID: MRT4577_142178C.1
atcaacattatctatgtcattgtgccacctccgacttcctactttcgttctctcgagtgaaggataattcgacatcgctaatatgttggttgatgacgatctcctatctggatacgagctcctgagcgattcattcacctacaaggagctcgagaacgtggtgctgcgggaggtcgagggaacgtgcctcacccgaggcgctgaccgatggtgacatatgttgtcaatccatactccgagggtggcgatggacgtaacgcgtctgatcgacatccgaccgtgcgacgtaggttcgatattcgaccgaccgattccgcctacgacgaaaacttccttttcacgaaacatcatttgtgtcttacttgctaaaatacatcaagaatctcactggtgcggaggacccatataaagtgcatgagcccataaaggatctcaatgctgcaaacaagtttctccttaggtagctgcacgaactttaattctttgttggctagagtatgaaggatga

SEQ ID NO: 46243 - DNA, 445 bp, Zea mays
  unsure (1)..(445): unsure at all n locations
  Clone ID: MRT4577_142179C.1
gccacgccctctccatcccgggtggggggggttctcatgatcaacctgcggcgtccagagggcctcattggtgagatcatcagccttttgagaaaaggcttctacctcaagccttgaacttgtcccgtggagagtcttttgccgagaacactactccggtggctgctggggcccttcttccanggcctcntggactacatcatctctggccctgtggtggccatggtctgggagggcaagagcgtcgtcacaactggccgcaagatcattggcgccaccaaccccctggcttctgagcccggcaccatccgtggcgactttgctgtcgacattggcgggggtgtctttcatggaagtgactgttttttgagtgctaataaggggattgtcctgtggtttttccgtgggccttgctgtttgtcgggcggccggcacctcttttttt

SEQ ID NO: 46244 - DNA, 173 bp, Zea mays
  Clone ID: MRT4577_14217C.1
ccggccgggccgcccgtccgcaaatccctcgtctagtctgctgtgccatctgttgtaccacgactaaaccacagctccaccgtcaggtcttcttcccctttcgtgtcctctcctgcgcgcgcaccgacaagtgaacgagcgagcgagcgagcatcatggacatggaggcggcc

SEQ ID NO: 46245 - DNA, 474 bp, Zea mays
  Clone ID: MRT4577_142180C.1
ggggggaacccgccccaaaattaaagtatttaaaataaaagaaaccaggaagggggattcaaaaccccgggacccccaatttgacaaaggagttgcccagcacagggtacaaatttaatcttaggagcggggggcaaccggtggcagcctgaaacaacaacccgggtaaagccctccggggcaaaaaccaaaaaaaacagggttatttccgaaactggctgggccaaaataacccaaaaaaaaaaaccctttttgaaattttgggaaaaacaatccccgacatggagggggaaaaacatcccgggacctgcaaaaaaacaatagggatttaaaagaaaccctgttgaaaaaaaaaacccattgcaagccctggaaaggaacaggagttattaaaaataacaggcctttttaaatatcgaccccccttatgaagccaagcccaacacaaaaaggggattgaaccggttccctcaa

SEQ ID NO: 46246 - DNA, 304 bp, Zea mays
  unsure (1)..(304): unsure at all n locations
  Clone ID: MRT4577_142181C.1
cccgcaccacccctccggctcctagctctccgccccgccgcctcatggcgccctcctctgccgggtggcagcactcctcgcaccgtcccccgccgccgccgccgactcctcctcatcgcggtgctgacaaggactagcttatgagccagggtggagagggggatccaggctgcatttttttgctgaatttgntaagggggggggggggggtatagttgtctgatcaacctgaacgtaatctaaatggtggcccatgtattatgtgtgcacaataagacgggacgtgtggatggatggtaccagg

SEQ ID NO: 46247 - DNA, 492 bp, Zea mays
  unsure (1)..(492): unsure at all n locations
  Clone ID: MRT4577_142182C.1
aacactcacacctgaatgacactatcgcataaaaagcacaatggcacataatattgacaccatctatgccatacatggtacattagcatgccaacaatggcagacaaataattcagcatgcttatactaccttcgctcttctctgcaagacacttcttacaggataccaatcctccacgcactagctcgccaacatcctatagatagcctatttcccccgtacctctaaccagcgggagtcttcggcatgcgaaaacccaattctccaaccctacaggatccaacaggcaaacacaattggcatataacctttatcaccctagtacctccaacaatcatcagcccatattacattaagtacctttggtgcacttattggcaaaaaacataaggcacaaacatctacaacaaccttgtgctagcaaaccttgcttcctactcttaaccacagcatctttcttccattcaaccatctacctccttnaactctcc

SEQ ID NO: 46248 - DNA, 288 bp, Zea mays
  Clone ID: MRT4577_142183C.1
caaatataccagcaacctctgtttttgtaaaagagcaaacaaaaaaagaaacgggggacggaagcgaacaaaacacacagggcccacaccggaagagagcaaagacgcgcaaactatacgaaccgaaacgggacaaggagctgggccacaaccaacagaagaaccacacgatcacgcagaccaacccgcgagagctgccaacaaacagaacgcgaacaaacaccagggcgagcaacagcacaacgaaataaagagagaacacgacaacaaagcgaacggacccaagga

SEQ ID NO: 46249 - DNA, 223 bp, Zea mays
  Clone ID: MRT4577_142184C.1
aaaaaaggaacgagccacgcgtacgattttgtttgcaacccgtttgtatacaattttttttttttatgtgcttgctaactaattggttgggggcccaccgtgtctaaccgataataaaatattcacctttttctttcaaacaattattaacatgttttctattttgcttgacaaaaagttatttccataataacattttataaaaatggggcggccttttata

SEQ ID NO: 46250 - DNA, 472 bp, Zea mays
  unsure (1)..(472): unsure at all n locations
  Clone ID: MRT4577_142185C.1
gctttatctaccccagagcgcagaagaacccgatcgacaccatgagggtgttgctcgatgccctcgctctcctggcatgtngatgcgagcgccacctacacgcatacaagcggcggttgcggctgccagccaccacctgacggatcatctaccgtcgacggagcatctgccacctccgggtcacctgccacctgcagtgcatgtgccaccgacggtccacctgcacgcgccagtccacctgccaccgccggtccatgtgccgccgccagttcatctgcacccgccaccatgccactaccctactcaaccggcactggctgagcctgatgcacagccacacgcatgcccgtgccaacagccgcatgcaagcccgtgccaactgcatggaacctgcggagtgggcatcaccccaatcctgggccagtgcgtcgagtctctgatgcatcactgcagaccgacggcgacgccctac

SEQ ID NO: 46251 - DNA, 280 bp, Zea mays
  Clone ID: MRT4577_142186C.1
tctttggagaacaatggaagcactgaagatatggggacctagacctttgcctgtggcggtggttcacacaattgcaaattctacttcttaagctagacaaagctcaacgccttgctgcgaatattagggaaggcaaggagggtgatggtggcgacctcaagctcttgccaattgagcatggatcttgattgcacagacacatttggagacgtgacattcgcatgtcgctactgtgcccaatcccgggagccccataacgatgaaaccaactgcatacatc

SEQ ID NO: 46252 - DNA, 772 bp, Zea mays
  Clone ID: MRT4577_142187C.1
gggtacctcgaggccggccgggaaaccgatcctttccagccgcgttattattctcgtctcccagccccccacacgcgctcccctccaccgtccgccgcgcgtccccaccggcggccaccgccaccggcccacctccccggcgccccttacccttctttccgcgcgatggtaactcgcggcggcggtagccagtcctacggcttcccgatctactgcgccgcctggctcccgctcgcccacatcatcaagcccgaccctcccgctgccgaggcggatgcggatggctcctccccctccaccccctcgcttccgatggttgtcctcgggggcggtggcggggagggccggagcggggtgccgaacaagctcgtggtggcggccctcgccaccggggaagaggccgcgccggctctctcccccgatacggtggtcgaggtgaatagtgaggaggaggtgccgtacagaatggccgtccacccgcgtggcgatggcgtgttctgtgccttcccaaacggctgcaggttgtatcgatgggaatcacaggaaggagagggaccacagaggttggctttagagccggaccaggatgctttagcagagctgaaagatgtcggtttgcagttggccgtatccttcagtggagaaggttcaatacttgcaattggtggtgaagatgggcatttaagagttttcaactggcctaccatggggtctgttctcacagaaatcgatactaaaacatcgattaaggatcttactatcaggtcggacg

SEQ ID NO: 46253 - DNA, 213 bp, Zea mays
  Clone ID: MRT4577_142188C.1
ctctccagcgcttccatacagcatctaccaggggtgccttccttttgggccaataatgggaagtccgcacaaatccaaattcgcaacatgagacaaaattatttattccacgcgtaaggtacccccttagttagcatttttagacaggtaattcttttctccttctcctccgtttccttcccttgcggtgggctgctccccgttccttttggt

SEQ ID NO: 46254 - DNA, 774 bp, Zea mays
  unsure (1)..(774): unsure at all n locations
  Clone ID: MRT4577_142189C.1
gtttttatgtttcatgtcggcaaaggaatgaagggcgggcctggtgcagcggtagagcctaccgtctgtaaccggaaggtcccgggttcgagccccagcctctgcgtattatgcgggttgatcgatggaggtttctgcggcataacagttggctccagtggcgatacattgatttgtccaagggtggatggaagtgtcacttgcatgatggttaattgagtctatgctccaaggaagctctacaacaattgtggaattgtttaagatacctgtaaatcctgggatttgtgttaagttgatatgggttgactgttttgcattggtggataagaaacaactgatcagcatttacaaacaaaagacctgttcatggcggcgtaatttcgagacaactgtttcatgactacatcatggtgtggattgaagacactcaattgcagttacttgataactgcaaagctgagaagctgttgctgatgttgagagagaaattatgaaggcactggagaagcaatgcatggatattctgatgcctctaagagatggcataccagaaaaaattgagaagcaggtccaaagattaacaagaagacaatctatagctccctatgttgtgccaaaccagttaggagcattcatgaacacagtaaaaaggatgctagatgtgttagactgccaagtcgaagacattctcaagtcatgggcaacgtaccttactatatcaagtgggaacactgtttttggagagcanatgaactncatcactgtcatgct

SEQ ID NO: 46255 - DNA, 5380 bp, Zea mays
  unsure (1)..(5380): unsure at all n locations
  Clone ID: MRT4577_14218C.1
ccaacaaacagagaaacacttcgtcgctaacctatcttcctcccgcagccgccacttcctgtctactctcctcctcctccatccctagcgctaacaatctggtatcaaaggtcaggcaaactggatcccgtcggcaattgccctcggcgtcctcgcaccgctgctatggagtacaacgaatcgaaccgccaggtgctcgaggaattgcggctcatggaagcaaggctgtctgagaagttcgctggtcgttgcgacagcatagagcggcgcgtggaggagcggtgcgatgaactcaattcccacttcacgacgcgctgcgacaagatccaagatcaagtcgatgttgctgcactccgtggcgaggagcgtcttatcgccttggaggaaatgcgcaccgacatcgagcagtggcgccccgatctaatcaagcggatcgaggacgtggcgttggaggtggtgcgcgtcaacaagttcttcgagcgggaacgtcgagcggagcccgtcgacaagcccggcatcttcggcagctacacggcgccgcccctgcgtccacccgcaggcgcacctcccgctgctgggccgtacggccacctcttcgagacattccaccgggagcgtgaatcggggtatgaatttaccccgactcatggcccggtcaagggtacgcgtccaccccatccttctcgcctctctggttttatgcccgagcaatactatccatatgagtcggcacgcgatactgggcgattggggagcgggcgttttccaccgatgagtttccctcgctttgatggatctcgtccacaactatggcgcacacagagtgaaaactattttgagatgtatgacacagagtaccatatgtgggtcaagatagcgtccatgcatttcgagggcaaagctcaccgatgactgcaatcggttgagcgcaaattgcgttacatgtcttgggaggaattttgtgggctcattcatgatcgctttgggaaggagcaacacgagtcgttgattaggcagttgtttcacattaggcaaagtgggtctgtcgcagattatgttgaacagtttgcttcactggtagatgagttagctgcctacgagtctcgcacagatcctttatattatacaatgcgttttatagatgggctcaaacatgaaatcaaaacagttattatggttcaacgacctcccaatctcgatgctgcctgcgctctggctcttgtgcaggaagaggcgctggagtccacgcgtcgctggcgtgtggagcctatatccaaccggatggcttggccacacgcggccacttcaactgaagcaggtcgagctgatggtgtatctatgggacctgagaagcctaatactgacaacagaaggggaagttcatcagctgaaagaatagcatcattgaagagctatcgtcgtgcacgcggtctgtgcgatcgatgtgctgaaaaatggtttccaggtcacaaatgccccactactgtacaactgcaagtcatagaggaagtctgggatttactcaatgaggatgaggtctctgcaacagtggaaacgacgtctgagcaattgctgatggctatatccaatgcagcatggtcagggatcggttccattacgactcttcgtctccaaggttccatacagcagcatgagttgatgattctcatcgattctggatcttctcacactttcattaatgacaagtggctgtcagaattaaaaggggttcggccattacacaatcagctcaatgtcagagtagctaatggacaaatcctcacatgctcccatcatttaccccaggctgtatggcacatgtccggtcaccagtttgtcaatgatctcatttttctgcctttaccatcagtcgatttggtagtgggcatggattggctgcaattgcatagtcctatgagagttgactggtccaacaaatggatgattataccttatcgtggcactttggtttgcttacaaggtgtttgtccatcatttccttcaggtgccatggtggaattgcgtctgttaccagaaccacacgagagcggtaattcggacagcaatgaagacaccgtgattgatcctcgagttaagaaagtgttagcacagttctcggaggtttttgctgaaccagctgggttgccacccagcagacagtgtgatcatgcaattccactggtctcgggggctcatccttttaatgtgcgaccatataggtatccaccagccctcaaagacgaaatagagacacaagtgcagcagatgctggaacaaggcgtgattcagaagagttatagtccttttgcatcacctgtattgctggtcaagaagaaggatcagacatggcgcttttgcgtggattaccgatatctgaatgccataacaatcaaaagcaagtacccagttccggttttcgattagctaatggatgaacttgctcacgcacaatggtttagcaagctggatttaagagccagatatcaccagattcgtttgctaccgggtgaggaacacaaaacaacatttcagacacatattggtcatttcgagtttcgggtgatggcgttcgggctcactggtgcacctaacacatttttggaggccatgaacgacactttagccccagtcttaaggaagtgcgccttggttttctttgacgatattttaatctacagttcgtcttttgaagcacacctgacccatctgactacagttctcgaactcttacacaaagataattggaaagtgaaattatccaagtgtgcctttgcccagtccagcattgcctatttgggccatatcatcagtgctagtggtgtctccacagatccggctaaaatcatggtagtacagtagtggcctaccccttcctctgccaaggagttgcacaacttcttaggtctggcgggtttttacagaaaatttgttcgccatttcggtatgatcagtcggcctttaatggatctgctcaagaagaatactctatttgtttggacaacggagcaccaacaagcatttgaattattgaaaacagcactaagctcagctccggtgttagcactcccagacttctctcttcctttttgcatttacactgatgcatgcaaaactggagttggtgctgttcttatgcaacgaggacatcccctggcatttttaagcaaggcattgggaccgaagaatcaaggactgtcgacctatgaaaaggaatacttggctatactcattgctgttaaccagtggaggtcgtacttacagttagcagagttccacatttatacggatcatcaaagcttagtgccattgaatgaacaacgcttgaatacagtctggcaacagaaactgtacactaagttggctgggttacaataccgtattatatacaaaaaaggctgtgataatgtggctgccgatgcattgtctcgatatcccacttcggaacagctgctgcatatttctcagtgtacacctacctggattgatgaggtggtacagggataccagcatgattctcaggcccaagaattattaacacatctgactatatcatccaacaacgacaactctccgtttactctagtccagggtgtcatccgacataaggggcgtgtgtggctaggcaacaatacagcgttacaactcaaaattatagcagctcttcatgattctgctctcggaggtcattctggatttctggtaacctacagaaggattaaacagctattttattggaaagggatgaagaaagatatccatgcctatgtccagacatgcaatatctgccaacaggccaaaccggacaggaccagctatcccgggctgctcgcgcctctacctgttcccccgcatgcatggcattctatatcaatggacttcattgaagggttaccgaagtccggaacaatggattgcattctggtggtggtagatcgattctcaaaatatggtcatttcttggcgctggcccaccctttttctgcagcaaaggtagcaaaacttttcttggataatatctataagcttcatggtatgccggacaatatagtatctgatcgggatagagtgttcacaagtctgttctggcagcaattattcactctcagtggcacccaattatgcatgagttcggcttatcacccacaatccgatggccagacggagcgcgtaaactagtgcattgaaacttatttgcgatgctttgtgcacgcctgtcccagcaaatggtaccaatggttagctgttgcagagttctggtataataccaactttcattcagctctgaattgttctccatttgaggtgttatatggacagccccctcggcacttcggcttgcaaccagggagtgcagtgactgtttcagatctgtctacttggcttcacgatcgtgaggtggtatccaagttggttcagcaacatctgttacgtgcccaggaccgcatgaaacgtcaggcggataaacgacgttctgaacggatttttagcgtcggcgatcaggtgtacctgaagttacaaccgtacgtacaatcatcagtcacaactcgggccaatcaaaagcttgcttttcggttcttcggcccctacaaaattttacagcgcatcggcccagttgcttacaagcttcagttgcccgcttcctctcagattcaccccatttttcatgtatctcaactcaagtcggctgtcaaccgtccacaacacatcattccattactacctgagactaatgattcacttcaggtgcccatacaggttcttcaacgtcgattaatccggcgtggtggttctatggtgactcaagtcaaagttgcatggtctggaatggacaccgcaatggctacgtgggaagatgttgatgcactgaaggcgcgttttccttatgcaccggcttgggggcaagccgcgtttcaagaccgggggaatgtcagctctgctgtaccggaagacacaagaaccatggccaagaaggatctgacggcgaagacagaaggaggcgatgtctcagctcggcctcgacgtatcaagcgcggcagcgtccgagtaactgggccggaatgggccaattgatggctggctgggccggtctgtaatatgggatataggcatatgctggaaccgtgaacagacatcgaaaatctgagaacaaacagagaaacatttcgtcgctaacaaaaaaaaaaaaaaaaaaaaaaaaaaaaaaaaaaaaaaaaaaaaaaaaaaaaaaaaaaaaaaaaaaaaaaaaaaaaaaaaaaaaaaaaaaanaaaaaannnnaaaaaaaaaaaaaaaaaaaaaaaaaaaaaaaaaaaannnaagggggggggggttttaaggaaacccaatttttgacccggtgttttgaaaaattttttttttttt

SEQ ID NO: 46256 - DNA, 496 bp, Zea mays
  Clone ID: MRT4577_142190C.1
aaaaaaccataaaattctttccaaaaaagggcaacaaggaagggcaaccaactttccctttttttaaaacccccaacgggttagcccccaacccctatcccctaagccgtcaaacaatttgataaaaattttaaaacagcagggaggtggcaaaacccccgggccttgcctggaaaaccctaggttaatgtttgttaaaaaacccccccttcaccacaaacttttgtttggacacttgatcccgccgcccctcttcagttggcaaataaccccccgttaaacaccatcttggggtccacccaactcctcttccgaatcacgggatgaattatccgcccctccccaaatcaggctcgaatttcacaaaaaccgcaaccatctctggtttgacccctttgtccaccccctaatgacccaccctttggacttcccctttcccttaatctacaaatccaccttcttccatacaaaaaaaatcccaactggcccaccacct

SEQ ID NO: 46257 - DNA, 271 bp, Zea mays
  Clone ID: MRT4577_142191C.1
cccttttgaaatcaagttagctcgtccacatgcccggataagaaccggggagccagtgcgactggttagtagatgtttcttgtggttagtttctaaaatgaagttttgcatggtactctttgatggtttatggtactgtcacctctgatgtgttctattatttttattcaccactaatcccaatgcttaaattatatggcttgtatgttctgttattcaacagcttgttgctctagtacttcccacatctggatttagatatttcattcat

SEQ ID NO: 46258 - DNA, 288 bp, Zea mays
  unsure (1)..(288): unsure at all n locations
  Clone ID: MRT4577_142192C.1
gcacaaacaggacccccaacacacaggaacacaacagcaaaacaacaaacccagcgcccgccaggctcggagcaaacgccaaaacccccaacgcggcaccaacggaccgcaccccagncacccaccccacaccctaccttgctcgcagacgcaacttccgctgaacgcacactactgcgcggagcacgcaccgaccacaccgcggtacaaattatgtatgagtaagtatagggactcaccatacaagtagttattgcagcgtgccaccccatctagcgatcgaacaca

SEQ ID NO: 46259 - DNA, 375 bp, Zea mays
  unsure (1)..(375): unsure at all n locations
  Clone ID: MRT4577_142193C.1
atacatagccacgtattttttgccttgcttagttgatccacgcactatggttttgtttcgcgtgtgatcgggacgtcaaacgggccctattttagaaaatctgggcagggttatacagggtgattattttgaaatctaaacaaacctgtatttattaaaactctactactttgtgaaaccggccgggtgagaaatttaactttgcattttgaaagaatccttggttnccacgttttgttcataccataacccactcgttggagttggccttatttgcaatttccttcccttacattggtcccaaatcctaaatgggataaacgctttcgaatttcaaagggacccccccgcggtttccacgccttttcctagttt

SEQ ID NO: 46260 - DNA, 421 bp, Zea mays
  Clone ID: MRT4577_142194C.1
cccacgcgtccgtcttcccacaggtctgttcacaaattgcagctcagcgtgcagccgatcctgaccttgataaactatatattacaaaagtgagtagctctataggtcctgcttatgagatttttatggatattttttattacactcgtaatggttgtttccatttggcttttttgtcaaagttcatgaagaaattgtttcttatgcctagcaaacgcttcaaatgcaaggaaatggttagttgagggtcataccgatggtgctcttttaagttatgcagttgctgcctcaagctttctgcctccctttgccagagctagtaagattggaaaagctttcaattaattaacataaatgagagtgactggacaaccatatgatctctactttagagtagggactacaactacaacgaaaagaa

SEQ ID NO: 46261 - DNA, 417 bp, Zea mays
  Clone ID: MRT4577_142195C.1
ccacgcgtccgcctcaagatattctcattttctcaaaatcagcaaagaagcgccagactacaggagatcacattgatgattctgagaaacttcgtcctgaggaactaaaccaacaaacaatcgaagctctggtcgcagagagtaacttgaaaatggagattcttccggttgatgatttggacattgcgttgcatgattttgtgaacaaggatgacaagatggcattttattcatgtttgcagagaaaccttgaagaaaccaggaataagttgagttctgaagcagataaatccaaatttgaggaagaagatataatagtcaaagttggcgagtgcatgcaggaacgcgttaaggaaaggtctctgcactctaaggacggcacacgtttgacaacaggctctcacaacttggatactg

SEQ ID NO: 46262 - DNA, 2575 bp, Zea mays
  Clone ID: MRT4577_142196C.1
ccgggaggacgccccctgcctgcgtcgtctcctcccgttcacccctgtctcgtcgtggcgacgattggggaccctagcctcctacgcccaataccctaaacccttcccttgcagcacctgccactgccagtgcattagatttacagcaacggattggtttggccaacacgttgagttcaggttcaatgtctgaaccagcacaacctagtggaggggaaggtgatgtcaacacgctccgaatacttgtagcaaccgactgccatctaggctacatggagaaagatgagatacgtaggtttgattcctttcaagcatttgaggagatttgcgcattggcagataaaaataaggtggattttatacttctcggtggtgatctattccatgagaacaagccgtcacgctcaaccctggtaaaaacgattgagattctacggcgctactgcctaaatgatcaacctgtgaagttccaggttgtcagtgatcagacagttaactttccaaacaggtttggtaaggtaaattatgaagacccaaactttaacgttggtctgcctgtgttcaccattcatggaaatcatgatgaccctgctggagtggataatctctctgctatcgatattctttcggcttgcaatcttgtaaattattttggaaagatggaccttggtggctctggcgttggtcagatagcagtttatcctgtacttgtaaaaaagggcatgacttcagttgcactgtatggtcttggaaacattagagatgaacgactaaatagaatgtttcagacgcctcattcagtacagtggatgcgacctggaactcaagatggggagtcagcgtctgactggttcaatatattggtacttcatcagaataggataaagacaaaccctaaaagtgccatcaatgagcatttcttaccacgtttcctggattttattgtatggggccatgagcatgaatgtcttattgatcctcaggaggtccctggaatgggtttccacatcacacaaccaggttcatcagtcgcgacgtccctgattgatggtgaagcaaaaccaaagcatgttcttttgttagaaatcaagggaaatcagtacaggccaaccaaaatacctctgagatctgtcagaccttttgaatatgctgaggttgtgttgaaagatgaagcagatgttaactcaaatgatcaggactctgtgcttgaacatttggataaaattgtaagaaatctgattgagaagagtagccaaccaactgccagcagatcagagcccaaacttccattagttagaatcaaggtagattactctgggttttcaacaataaacccacaacgttttggtcagaagtatgttggaaaggtcgcaaaccctcaagatattctcattttctcaaaatcagcaaagaagcgccagactacaggagatcacattgatgattctgagaaacttcgtcctgaggaactaaaccaacaaacaatcgaagctctggtcgcagagagtaacttggcactttcacagcacattatctggatatgcgcatgatgttttgtgaggatcatttcatttttctaggaaaatggagattcttccggttgatgatttggacattgcgttgcatgattttgtgaacaaggatgacaagatggcattttattcatgtttgcagagaaaccttgaagaaaccaggaataagttgagttctgaagcagataaatccaaatttgaggaagaagatataatagtcaaagttggcgagtgcatgcaggaacgcgttaaggaaaggtctctgcactctaaggacggcacacgtttgacaacaggctctcacaacttggatactggaggtaaatcttttacagctcaaagcaaccagaactccttcagtgatgatgaagacaccagggagatgcttcttggtgcaagatcaactgatgttggacgaaaatcatctggatttactagaccctccaaagatactgctgatgttgctaaacgtggtacttccaaaagaggcaggggaagaggcaccagttcaatgaagcagaccactcttagtttcagccagtcaaggtcagctaccgttattcgtagtgaggatgtggcttcctctgaggaggaagcagatgcaaatgaagttgttgaaaattcagaagaggagagtgcgcaacaagttggacgtaaaagagcagctcctaggggtagaggtagaggtagaggcggaggttccactgcaagagggggcgaaaaacagatattgcttccatgcaaaatatgatgagcaaagatgatgatgattcagaagatgaaccgccaaagaaaactcctcgggtcaccaggaactatggcgctgtcaggaggagatgaccctttaaggagttcttgctcatgagagttataggctaggtgttttgtcttgtaaagttggaagagccgacgtgtttttatcaaccttgacgtcgaccagtttgcgttgccgtgaactgactgtaccttgtacacgcccgaatgtaacggatttttgggatttatacatccttgtagctgcttaaattccagcgattgctgtc

SEQ ID NO: 46263 - DNA, 728 bp, Zea mays
  Clone ID: MRT4577_142198C.1
aggttatctccactccttggtgaaggaaagatgacagaatgctctttgaagattctacggaacttgagtgacgtgaaagagaccgcagggtttataatcagaacaggcaattgcgtcagctccatttcagatcatctggacactggaagccaaagcgaacgtgaacatgcggtggtcatccttctaggggtatgctcccacagtcctgaggtttgttcactttccatgaaggaaggcgtcatcccagcccttgtagacttatcagtgagtggaaccaaggtggcaagggattgctcggtcaagttgcttcagcttctgaggaacttcaggcgatgtgaccagttcagcagttcatgctcaagagagcttgctgtcgatcatgtttcagagaacactcgcaatggttcaatttgcatgcagccgatatcaaagtcagcccggtatatttcaagaaagctcaaccttttctcaaaacctcggtcgctgaccctggcttgagaaatggaaggggtcggttggatcgagccctattccgcagcgctaactgccagatgtacagatagtagcaggtagcgttcgtcgagatgaaatgtttgtgggaggctttttaaaaccccccatgtatttcaagagtttttattagtttttttggattttctttacgggcgctacaaccagtaaatgtatgactgttcgagctggaaacctgtgcgccttttttcgtggcc

SEQ ID NO: 46264 - DNA, 238 bp, Zea mays
  unsure (1)..(238): unsure at all n locations
  Clone ID: MRT4577_142199C.1
agacagtccggacagacagctgatctattattccgagaggcatgttatagtagatggaagatccctgttgaacgaaccatgtctgagatgacctatactgaagctgggctggtgcgtacatacactaaggccaatactagaanctgttttttattactgggggtgcaagaacatcataagaagaggccagcttatgtatatcccagacgtgtatgaacgccgactacatgatccgcgc

SEQ ID NO: 46265 - DNA, 405 bp, Zea mays
  Clone ID: MRT4577_14219C.1
agactgattctaatgaactagccgactccagcacgcaacgccagcatctccatcacagcacctctctgctacagtactggctgtctcctgtccggtatgatgcaactgcaatgtgcggccaccccttctgatcctgtccacctgtggtccaggcctgaaactcaagctcaggtagcggtgctgcacgcgctgctggtcgtcaacagtggcatccgtgtcgtcagtgctcctgctgcgaacggcacgaactgcctgtgtcgcttgagctgtgtgtcgctctctcacgcgttcgtgttcgggatcgctacgtcggcgtaccacgtctacggcaccgcatcgattagcggccgtagtccctccatctgggattcattcgcgcatgtcctaggaaatattgcagggaat

SEQ ID NO: 46266 - DNA, 243 bp, Zea mays
  unsure (1)..(243): unsure at all n locations
  Clone ID: MRT4577_1421C.1
atcctcttgctgcgctcgaatttcttcccccagccgccgtgcctcccaccgcatcctgctcagtgctctctcggcaacgctctggccgagagagggatggaggccttgcgtactccggccgncacggtcctcgtcgtcctcggcctancggcgangcgggagcgtggcgagcgcacgctcccgatcacgcgntacaagattcgcgagcccgtcccgctccacgccaacaagggcggaccattt

SEQ ID NO: 46267 - DNA, 294 bp, Zea mays
  Clone ID: MRT4577_142200C.1
aaaaaaaaggaaaatttggtttcttttaatttttttcttaccaagggttggggccgggaaccggggaaacttttctttcaaaaaattggccgggaattaatttttttgctcccattgcttaaatatttttgggggggacgatttttggggccccaaaatgggacttcttttaggaatttgaacccttcaattttttttttcctcaactttaattgaaccccccaaggttcggccccccttttgggggccaaaaaaaaatgtttttttgggctcaggggttttactttaaaaggg

SEQ ID NO: 46268 - DNA, 506 bp, Zea mays
  Clone ID: MRT4577_142202C.1
cggacgcgtgggcttgcaaatcaaaagcttcttgggattccttcagaaaagactaatgttcatggaggagctgtatctttagggcatcctcttgggtgcagtggtgctcgcattttggtcacccttcttggtgttcttagggtgaagggtggcaagatcggggttgctggagtctgtaacggtggaggtggagcatcagctcttgttgttgagctcgcataagagatattgaacttcgctagactcgaaacagtgctgctgctatctgcataattcaaccgagcatgattgagcaatcattctgtcttgccgcttcggtcaccatagcaacatgacgtcgcaggcgcaatcattctagcaattagcaccagctccctgaggcggaccttgtactcttacgttgatgtatgtttagtgttgtagtttgctgaacattcttattttaattgaggaataaagtgtggtgggcttgtgttacctggttgtggggtaggagaaatggaggg

SEQ ID NO: 46269 - DNA, 336 bp, Zea mays
  unsure (1)..(336): unsure at all n locations
  Clone ID: MRT4577_142203C.1
ggcgatcagaccaaaccgcccncacctgagtgtgacactgagctagttctccacccctccttcaacttggcagctctataacctcggctgtcaaccttttcttatggcacccatcattcacaacttccacattgaccgtaggggagggacgctgacaatgagaatgattgctgccctcactcgtggtgcacgcgcgttgctttcgcctactgttacgactccttgccctgccggacaacaccaatgaaccgcttctctggggaggcgcgcgccatataatcaaaaagatatacagagagatacccgagcaccccaccgcctcctaaattacctctt

SEQ ID NO: 46270 - DNA, 519 bp, Zea mays
  Clone ID: MRT4577_142204C.1
ccccccacggggggttgctcttttaaaaaaaggaattgggctctaccccccggaaaaaaaagaaaaccgttttcttttagtgaccccaatttggaaccgggttttaattcccccaccactgggggggtttgggcccaaaattttcgcccaaaaagcacccccttttccccaatcattttttacccggggccacagcgaaacccccgaggggacaggggaccctcctttcaaaatttgggggcccgggggccccccacctttgggcccaaaacaaaacccccccccaaattggggtccccatttttccgtgaaaaagggggaattttgggggctccataaagggcccggggggggccccccttgggggggccccccgaaaccccccatgggacccccaaacgggtggggcaataggggggggcccggccccaagggctcccccggaaatccggcgcctgggaaattcactttttggcccaggctaagaactcttttttgcccccccaacctggggggggg

SEQ ID NO: 46271 - DNA, 647 bp, Zea mays
  Clone ID: MRT4577_142205C.1
ggtgatgagcaagtcattggcagaaaaggggtactacaagcagaaaggggtggtgaggaaagttatggataaatatgttggggagatagagatgttggagagcaagcatgttctcagggttgaccaagatgagctcgagaccgtgatccctcagatcggtgggctgttgcggatattgaatggtgcttatcggggatcaaatgccaggttgctctcagtggacactgagaaattctgtgcaaaagtgcaggttgagaaaggtctctatgatgggaaggttcttagggctgtcgaatacgaggacatttgcaagatatcctcatgatatacagtgtgatccattccattttcctggatcatcaccgaagcaaacaagcactatgcaacccagtgtactagctctgccagttacatatctgatagtgtttgtgcttgttactgcttgtgatggaatatcttctgttgaagcagtgttcaatatgttgttgtttctagttcattgtagctgatgaaaggctatgtgtggggaaaccgtgtcatgtatatttgcttgttactagaccctgataattttgcaatatttggttaactgctatatttctgtgctctagttaccctttaaccagatttatttttggtagtttgcc

SEQ ID NO: 46272 - DNA, 1324 bp, Zea mays
  Clone ID: MRT4577_142206C.1
aaaaaaaaaaaaaaaaaccggccgggataagctcaaagcaagcagatctaagctccaggcagcgtcgcgacagagtgagctagtgagtagcacgacaacaacaatggcttccctgaaggccgcgaagcccagcggagttgcggcgcagggcaaggagccggcgcccaagctcagcgagacggcgacgaagccgtcagccgcgaagagcggcggcgttaagaaggctgagcagaagccccgggaaaccaaaaggaaggtgaagagcagcaaacaggcggcggcggccaaaaagtgacgtacagtacgtgtggagtgtaatggagcttccatgcatgagtgaatccatgccatgttatgaatctagtccttcctttcttgtatcttccatgtgacgcggcgtgtgcgtcccctcatgtgtgatgatgccagatgaatactacaaataagacgttgttgtgactgtgaaaaaaaaaaaaaaaaaaaaaaacataaaaaaaaatccaagcggacttcggcacgatacaagctcaaagcaagcagatctaagctccaggcagcgtcgcgacagagtgagctagtgagtagcacgacaacaacaatggcttccctgaaggccgcgaagcccagcggagttgcggcgcagggcaaggagccggcgcccaagctcagcgagacggcgacgaagccgtcagccgcgaagagcggcggcgttaagaaggctgagcagaagccccgggaaaccaaaaggaaggtgaagagcagcaaacaggcggcggcggccaaaaagtgacgtacagtacgtgtggagtgtaatggagcttccatgcatgagtgaatccatgccatgttatgaatctagtccttcctttcttgtatcttccatgtgacgcggcgtgtgcgtcccctcatgtgtgatgatgccagatgaatactacaaataagacgttgttgtgactgtgtgcaaaaaaaaaaaaaaaaaaaaaaaaaaaaaaaaaaaaaaaaaaaaaaaaaaaaaaaaaaaaaaaaaaaaaaaaaaaaaaaaaaaaaaaaaaaaaaaaaaaaaaaaaaaaaaggggggggccggttttaaaaaaaccaaatttaactacccgggcatggaaagtaaaaacttttttattggggcacctaaattaaattaaatgggcggggttttaaaaacttgggaatgggaaaaacctggggttacccaaattaaatggcttggaaaaaaatccccttttcccaagtggggtaaaaacaaaaaaggcccaaacgattgccctttccaaacattgcccaaccttaatggggaatgggaaccccc

SEQ ID NO: 46273 - DNA, 1477 bp, Zea mays
  Clone ID: MRT4577_142207C.1
agatctaactcacctctgcttcggtcgttacacgcgtgctcgtcaggagttcaggcgcggcgagcaggggggcgggggagaagcagccggactcgttagcccagtcggcagtcgccatgggcatcggctacgtagtgggcgtcctcggcggcgccatcctcgcccacgccgcctacgccaccatccagtaccgcgcggtgctcaagatcacggaggaggagttctcgcggccgcccatggatgtgatgatggagttgctcttagggttggtcttgtgcatgtgggcaggtcttgctgttcccactaaatttctctcggtgcttccacattctgatgagaataggatcgtctcgctcccggctaacctggatttcatgatcttcaaccaccgtggaagagcgctgccgtcagactcagacctgaaactccatacatagacatgtccagaatccagatcttttttctttattttctgtaaggccttgttcggttattcctattacacatggattagatgagattggaaaaaattaaaaataaatttgacttgcttgagaattaaaaaaaaaaaaaaaaaaaaaaaaaaaaaaaaaaaaaaaaaaagtccatcaggcatccaagcttaaagcaagcagatctaagctccaggcagcgtcgcgacagagtgagtgagtagcacgacaacaacaatggcttccctgaaggccgcgaagcccagcggagttgcggcgcagggcaaggagccggcgcccaagctcagcgagacggcgacgaagccgtcagccgcgaagagcggcggcgttaagaaggctgagcagaagccccgggaaaccaaaaggaaggtgaagagcagcaaaccggcggcggcggccaaaaagtgacgtacagtacagtacgtgtggagtgtaatggagcttccatgcatgcatgagacaatgaatgccattttaaatcattactgaggcattctcttgaactcagcacttgtgcattcagtacctgaattgatctgttttctttctactcggctgtttggtatttgtctgctaccttatggcaggatcagtggcgtcaacgacacaaaattgaaggaagaattgtggagatagataagttctaccgcttgctgggtggaatggtaagtagctcaactcacaagtttccttctggacacagatttgcaattgcggaggtttctctgacaggagatggtcgaaaatcatgccttgtaacgacatggcaaaaaacaacaaagaagatttcgtgtaagggcatggtcgaatattatgtcttgctggtacactctagatcagcatggacttttagtttttggtttttacttgttgagcagctggcttcccagagttgacttgtttgagtctgtgatgcccctaaggcccttttgtacctctcctttgtaatataagatttttttgactttcttgttagtggtaccattcatgtgatgattctgatg

SEQ ID NO: 46274 - DNA, 832 bp, Zea mays
  Clone ID: MRT4577_142208C.1
ctccacacgtactgtacgtgtggagtgtaatgtagtttccatgcatgagtgaatccatgccatgttatgaatctagtccttcctttcttgtatcttccatgtgacgcggcgtgtgcgtcccctcatgtgtgatgatgccagatgaatacaaaaaaaaactcggcctggaaggcatcaggcatccaagaagctcaaagcaagcagatctaagctccaggcagcgtcgcgacagagtgagctagtgagtagcacgacaacaacaatggcttccctgaaggccgcgaagcccagcggagttgcggcgcagggcaaggagccggcgcccaagctcagcgagacggcgacgaagccgtcagccgcgaagagcggcggcgttaagaaggctgagcagaagccccgggaaaccaaaaggaaggtgaagagcagcaaacaggcggcggcggccaaaaagtgacgtacagtacgtgtggagtgtaatggagcttccatgcatgagtgaatccatgccatgttatgaatctagtccttcctttcttgtatcttccatgtgacgcggcgtgtgcgtcccctcatgtgtgatgatgccagatgaatactacaaataagacgttgttgtgactgtgtgcctgaatgtgtgccatcgtcgcctccttcatgggtccctttgccgcttcatgctcaagcattaaaaatgaactaatggtagtcattcttccagcataactacgtgttttacgcgttgttcagttgcatatgtaaacaaaattttagacatgaacggaaaccaaacaaaaaaaaaaaaaaaaaaaaaaaaggaaaaaaaaaaaaaaaa

SEQ ID NO: 46275 - DNA, 261 bp, Zea mays
  Clone ID: MRT4577_142209C.1
ctcccgctgctgccaatgtcctcccgttctctgataccggcaatgtacttgcgtgcttcgcaacctctgctgagagcgatgcgagatgggcggcaagggtgatgggtcgtgaatcggcatcgatctcggcacgaactagtcttgcgtcggtgtgtggtatccgatagtgtcgagatcatcgccaacgaccagggtaaccgcagcacaccctcgtacgtcgccttcaccgactccgagcgcctcatcggagatgcggccaag

SEQ ID NO: 46276 - DNA, 127 bp, Zea mays
  Clone ID: MRT4577_14220C.1
atgagatcggccaaacacaaattataactttcattgctcctgatacttaaaaaaaaacaatctggttttgaaccatttcacacctaactcatcactgtgggaaacagtattactgctcaacctctct

SEQ ID NO: 46277 - DNA, 358 bp, Zea mays
  Clone ID: MRT4577_142210C.1
cggccgacccacgcgtaccggagcaaccttctttatgataagggagccctgatgttgtaacagcacgcaacgcactgaaccgcggcgactattaagagggcgcgggggcctcctaatcgtgaccgtccttgtacttcgtggagcagcagctctcgccactgcttcggccctcacgctccctgcaccttgccctcggcgctgacctccaaattacttggagcgtggacggggaggtccactagctctgcctcagactggggctctcagggcccgaggatttcgtgcgtcacgtcgcctactgggaggcgcgcaagttgctgtctaactccgacctccttacccgctcccgtattgaccc

SEQ ID NO: 46278 - DNA, 338 bp, Zea mays
  unsure (1)..(338): unsure at all n locations
  Clone ID: MRT4577_142211C.1
cggaaaaacaaaacgnaggcgggagaagaagatgaaagcggaggagagcggggggaagggagaccacgcggcacgaccagggngcggggcgnccaaaanaagggccaaacnnnanccaggaggcnngcaggacggcnaganncngacgcgncannnccnngnggannccnncncnccngngaagcgacnnnggacgcacnanccggaggggggggcggaccaacacnngngccacnggancgngannncagngagccccaacnacngcagcacnagngagngggggagacaaagcagcnanaagcaggccagcggcccaanaaacnggggcagcaggg

SEQ ID NO: 46279 - DNA, 974 bp, Zea mays
  Clone ID: MRT4577_142212C.1
ccccgcgtccgcccacgcgtccgcccacgcgtccgcccacgcggccgcccaaaagtccggcctcctctgccacacacacacctcgccagcaccacagccatcgccacagtcacagtcagcgagagagagagagcatggacctgctgaaccccgagcagatctccgagttccgggaggcgttcgcgttcttcgacaaggacggcgacgggtgcatcacggtggaggagctggcgacggtgatggggtcgctgcaggggcagcggcccagcgcggaggagctgcgcgagatgatccgcgacgccgacgccgacggcaacggcgccatcgacttcgccgagttcctgggcctcatggcacgcaagaccgcggggggcggcgccggcggcggcgccgaccccgacgaggagctgcgcgaggcgttcaaggtgttcgacaaggaccagaacgggtacatctccgccaccgagctccgccacgtcatgatcaacctcggcgagaagctcacggacgaggaggtggagcagatgatccgcgaggccgacctcgacggcgacggccaggtcaactacgacgagttcgtcaggatgatgatgctctccgacggcgccggcgccggcgccgcagccacgggccaccaccaatgaacccatctccacctttcatcagcctagcgcttcccatcacgtcccttgccgatggagtggcggatcactccatccgtctctgcttcctttttctttttcaccccctcaaaaaaaaaaaaagatcagcgtccgtctctctaatgtaacgtacgtaatgtaatgtaactgatcaaatattcaacaagaaatttaattaccgaaagaaaaaaaaaaaaaaaaaaacggccaaaaaaaagatcagcgtccgtctctctaatgtaacgtacgtaatgtaatgtaactgatcaaatattcaacaagaaatttaattaccgaatggacggatgaatt

SEQ ID NO: 46280 - DNA, 351 bp, Zea mays
  Clone ID: MRT4577_142213C.1
ggggggaggcaattaaaatgggagtatgggaggggcccaatctgggaacattcaaaaaatcacaggcccttgggaccccaaaagttataaaacggggggcaaaaacaaaaaaccttgttgccttggaaaggaatgtccataccgatctcaaaaatttaaagaaaaaacaaaagttttatttgagcctaatcaaactgctcccaaacagggttagcttgcgttaaaaaaacacggggggggggagcactaaagctgcccatgccgttttaaaaagtttcccactgggttgttactgaaacaaccttattataaacgcgaaaggggttggcattttttgctttcagcttatcc

SEQ ID NO: 46281 - DNA, 274 bp, Zea mays
  Clone ID: MRT4577_142214C.1
ctcaccgattgcaagtgagcgccgccgacgtttctatagcagaatatccaatctagcggggggcgcacctcggtgggggagctagttcaggcgacgatatggcgtcaggtcaggaaagcaggaaggagctggaccgcaaggcccgcgagggcgagaccggcgtccccggcgggaccggcggcaagagcgtcaaggcccaagagcacctttccgaatggcgcatccgggggggccatactcgcatggagcagctggggcaacaatggtacagcga

SEQ ID NO: 46282 - DNA, 478 bp, Zea mays
  Clone ID: MRT4577_142215C.1
ggttcttccttggttgaacatgacaagcttgagcttgcgacttctgtccttataaaaggacaggagaacggggtatgccttatgttgcctttcgatctggacgacgctgataagcttggtcctgatgctagtagtgaactttccaggtaggaccatgatctgaaattatctgatgcatgcatgggtctcgacttacgtccatatccgatgtcgggactcagttgtggcctgcaatctactcagacacggatcctggaatggacccatggcagcacttgaattcgacagattggcagatgcaactagcgcaatggcaaagaaactatcccagcttagtggcacggccttcactacaatagtgggtgggggagactccattggcgctgctgacatagtgggagtctgccactctatgactcacatttcaactggaggatgcgcaagcttggagctgctggatgggaatgagctcccacga

SEQ ID NO: 46283 - DNA, 622 bp, Zea mays
  Clone ID: MRT4577_142216C.1
tgcaccatttcggagaaaataggtggcccattatggcaattgctattcttgcaacagttgtgggaatccaagccgtcatcactggtacattctcaatgatcaagcagtgcgcttctctgggctcctttcctcgggtaaagataatccatacatctgccaaagtacacgggcaaatatacatccctgagatcaattggattatgatgatactgtgcttagctgtaaccattggttttaggaacacaaaacacttgagaaatgcatcaggtatgtcaatgttaacatattggatgtccatctgaccatctcacatctacttgttatttttacataggatgggctattattactctgtgtgcagttgcaaacatgtgacttattgatttgttatcatgggcatggcagattagatgatagtgacatcccttccttgcgactcatggtttgctggagctgtaggattctcccggcacaatggaggtgctattgtctgatttggagcaacaaggaaatataaagtagtaaaacaatttctttacgaaagataaacttttcagggtcattgaaaattatgagtcaaaacctagagcataatcttcagaatgccttgcttttaataagt

SEQ ID NO: 46284 - DNA, 354 bp, Zea mays
  Clone ID: MRT4577_142217C.1
gaagttccgggaacgacccacgcgtcccacgcgttcgggtagtattccccctccagggagaattcggattcctgaggctctggggggttcggattcctgggagagcggatcgagatgacatggtcatatgtttagtactgctgattattagggggcctctcctgggccacggacgaacacttacttcacaacacctttagcacctacggcgaggtcctctagttcaagatcattctcgatcgggagacgcacaggtcccgaggcttcagcttcatcaccttctccacggaggaagcgatgcagaacgccatcgagggcatgaacggcaaggaactgcactgcctgaacaattac

SEQ ID NO: 46285 - DNA, 239 bp, Zea mays
  Clone ID: MRT4577_142218C.1
tctttctctagatccatcatgcatccttaggcaggaattcgacgctgtacaaggagtctagtcagaccgaaagtgactgcacgtgccgatatcttacaccagctgtaccagaaactccaaaccctaccccatgtgtactgacatgtagcaatagcgagcttcgccaggccgactgatatcgaactggaccgctccattgcgtgaatccgacatgctgcgcatctatttaaaaaaaagaa

SEQ ID NO: 46286 - DNA, 664 bp, Zea mays
  Clone ID: MRT4577_142219C.1
ccttggaccgttggatgcggataataaggaggatcaggagaggatcattgcagatcgcaagacaccacttgtggtgacatctgctccagccgtgcgctacccgaacccaccaaaccctgacaaggtgctttacatcaacaagaaggaggcgccgctgctaaaagttgagagaggtgttccagtttaagttctcggtgcaggctgggcatgacatggcactctatatcacttcagatcccattggtggtaatgctacactgaggaataaaacagaggtcatatatgctggcgggcctgatgcccatggtgtactagctaccccaaaagagcttgtttggctgcctgatcggaatacgcctgacctagtctattatcagtcactgtatgaacagaagatgggatggaaggttcaagtggttgatggaggccttagtgacatgtacaataacagtgttgttttggatgatcaacaggttacgttgttttggactctctccttggattataaatctatatctatagcagctcgaggtgagaagaaaagtggatatcttgctattgggtttgggagtgggatggtgaatagcttcacctatgttgcttgggtgggcaatgatggggttgggcgagtaaaaacttattggattgatggaaagagtgcaac

SEQ ID NO: 46287 - DNA, 531 bp, Zea mays
  Clone ID: MRT4577_14221C.1
cccttgcgtgcggacgcgcgggtttcacggcgatcgtgactgactaagatgatatggtgtcgatagcaaatcgatttctgtcagctgctatgaagttggatcggaaaccctccaagggtggggggctcgaggatgacccactgggcgtcacaggcgcccacaactgtacaatgatggcagtcgcatggatcggcgctcatccagcggttgagttggtgcacgcggaccttggcattgcaaacaacagcgagctcttactgatcaacctcagaaggctgagtgcgaacatgggaaccagcttgatggacttgcagaaacacataatccagaagtacctcccaaaaggaggctgtcagtagacaccagtttctgatcgatacacttttatctgaggtgtgcctagtggtcttgagtagccaacaaccttcgggattatggcgtgggagttgatataagagagtgctgatgttaggtgatcccatctgtacctacttgtgaatgcaatgctgtcagttcatcatggtaccatga

SEQ ID NO: 46288 - DNA, 603 bp, Zea mays
  Clone ID: MRT4577_142220C.1
ccggccgttccggctggcgctgaacaagttcgcggacatgaccacggacgagttccggcgcacgtacgctggctcccggacgcgccaccaccgcgcccagctgggcgaggcgaggagcttcgcgcacgcgcagcatggccggggcgggagcgggacgacgaacctgccgcccgcggtcgactggcggctccgcggcgcggtcaccggcgtcaaggaccaaggccagtgcgggagctgctgggcgttctcggccatcgcggccgtggagggcgtcaacaagatcatgaccgggaagctggtgtccctgtcggagcaggagctcgtggactgcgacgacgtggacaaccaaggctgcgacggcggcctcatggactacgcgttccagtacatccagaggaatggaggcgtcaccaccgagtccaactacccgtaccttgccgagcagaggagctgtaacaaggccaaagaacggtcccatgacgtgaccatagatggatacgaggacgtccctgctaacaacgaagacgctctccagaaagccgtcgcgagccagccagtggccgttgcaatcgaggctagcggccaagatttccagttctactc

SEQ ID NO: 46289 - DNA, 307 bp, Zea mays
  Clone ID: MRT4577_142221C.1
taagctgggaattcggctcgagacctttccactggcctactggttattagccgtcctgaacttcatcaccggaggaggtctttgtggagaggctgggcgccatcaatactttgctaccattagtgaggtcccttttgatgcacccgtctatactacagaggatggtgagatgtcttttagcgaaccgcatgcatgcgttcataccgttggttgcggaggccattgaagtctctcatgctggacacttgatgcctacagcatgcgaatgtgagagatttcaccataaacagacaagctataaagagct

SEQ ID NO: 46290 - DNA, 461 bp, Zea mays
  unsure (1)..(461): unsure at all n locations
  Clone ID: MRT4577_142222C.1
ttttttttttttttttttttacaagacaacttcatctttattccagatgtacaacgagtagtcaactcttggtctcatcgatgaccataaatacatcactacattagatgtaatttctaatacaattactcaatcaaagattactaaaccccaaggcaatttagtacaagaaaaatcagaggggctgataataatttggctgttgggctgcagccgcaacccaggcagccgttcagaactcctgggttctgttatgagggatttaatactggcacaacatggcaggaaatcggctctgatcttgcaaacagccatgcagctctacacaggtgatgcagaattgaagacatctgctcaccagtgcaggctgcattgctgaaccagtgtgatctgntgctgtaaatataaataaggcctgcaggttacatatgagctctcttcagcaatacatgttcacttgg

SEQ ID NO: 46291 - DNA, 351 bp, Zea mays
  Clone ID: MRT4577_142223C.1
ttttcaactaacttttgttttaccaacactcattgcccatccaagcagctttttttaacctttaggtttgtctaaaaccattaccccttttaaaaaataccatactatgtacctcaacctcttttaacccattaccctaatttacctcaaccttttccatccataccataaaaagtgccaaattttttattaaattcccacccaaattaattattatatttacccccctttattccaccaatccctcttccaaatcctaaaatctaatgttccttataataatatccaattcccacttttattcactaattcttatttttttcacccacattttttcaataatctttttat

SEQ ID NO: 46292 - DNA, 768 bp, Zea mays
  Clone ID: MRT4577_142224C.1
ttgatttaagcagaccctgaatgaagggaatcatggtgcatttaaatgcaaccgtcgcctaacgtgtgtccgagtggggttttcttgtttttttgagcaggagaggaaaccgtcggcattctgaatcagatagaggtgacgcaacctgggacagctgccgggtggacggtccgtcgactggtggaggaggagaggtgagcagcgactgtacgagtcggaaggtggtgttgaatgatggctgctccagtgcagtgcatgggatcactcgaggttgcactagcaactttcgacgtggttgttggttcagttaggtttgcaatcgtcgtcgtccctcgcagatcatcacagggtggcgaggagatactaacagtgtatggacggtgagtctgaggagaccatcatgcctttgtcgttcagagccgggctagcacttgactgattggcctgcagagcggaaatggaaagccagagccaaaccctgctctgctcaccgtcggagataagagctcgcattgcatcagccggtctcttccgcgcacagccggactctcttcaccaaggcacacggccacacgggtcacgaggaaagtttcctttaaatacccactcggtactcatatagtataagacataaccacttttttattttatccccacgatataaagtgttctctctaaatagtgttctctctctaaatatacgtgaattgatgtaatattattagtactaatatagagaattaaatacaaaaaaaaaaaaaaaaaaaa

SEQ ID NO: 46293 - DNA, 423 bp, Zea mays
  Clone ID: MRT4577_142225C.1
aattccatggtcgacaagcttactttacggaggccgacctatactctagtgttatcaaaatacaaacgcttacaatctaaactgcactaacacgggaaatgaacgcacaacctctatttgattgtttttctaggtacataaaaacatctatccgcacatgagacaatcacccggttgcatgccacggtaactcttctaacactaacagactgagaattcaacattcacgggtctcccttagtggcttacattgcggcaacatgcctttctgtttcctcgcacccagcaactccactggcagttaaagatgctgagtatcctttgggtgcgccagtgtgttactttgaacattatccaaacagatagtaaaccctctacagctttagccccatataacgcttaccaatgctgagcacctacaaa

SEQ ID NO: 46294 - DNA, 702 bp, Zea mays
  Clone ID: MRT4577_142226C.1
tgattattccctgcgaacctgccgcccttcgccgaagcgcccctcccttcgcttcgtttctccctccgccacacacgcaacgcacccacctagaacttgtccaccgggcgcggcgagatccttagcagctactcgtgtccagtcctcctgctcatcatctactgtgtggatcctttctcggttgagggatgacacaacagcgagttatctgactttgaagataaacgagacaagatgggctcttatctaagcactgcagtcagtaaggctcgatccatggattcagacgaggtacatggatcagtttcaaacaaaagggccaagataaccccatatgactgtgggtcatattcgaggataattccgactcttcctgatgagctttcatttcaaattctagcaaggttaccacggattcattacctaaagatgaagttggttagccaaacttggaaggcggcaatcaccggcgctgagcttgcccagctgagaaaagagcttgggttaactgaagaatggttgtatatactgaccagagttgaggcaaataagcttgaatgctatgcactcgatccattgttccagaaatggcaaaggctgccatccatgccttcattcgccaatgaggcggactccactgggaggacgcagtattctgtgtttcggatgtggaatgtagtgggctcaagcatcaggattgct

SEQ ID NO: 46295 - DNA, 807 bp, Zea mays
  unsure (1)..(807): unsure at all n locations
  Clone ID: MRT4577_142227C.1
atggatgctggcaacgctgcccctccagtttcctttcccctacgctcgacggtcaactccatggcatctacagtgccggccatcatcttgatctctggcgcgtgttcctctggccaccggcccactcattcgtcgtgtgcctaccgtcgaacctatccaagcatgtgctccccctctgctcgcttggtccaaaattgccaagtcatcggacctccgtcacgcttgttttgcattcatcgttgttcttgtgggcgcgaccgcggtctcgtcacgcagcagctggggcctgctcatgtcgatcgtcgtctacatcgtcgcctggtcgggagctctcgctactagctcgctttcgtccaaatcgccaccgcgtatgcttgggtctctggccgcgcgtctttctatctcgcgctcgtctcgtccaatgcctcagctcacccctcgccacgccgtgctgctcggttccctacagcacctgttcagcccatcaatgtacctacttgttcgctggtcgcactcgtctcgtccagtgcctctgttgtccattggttcatgttgtcgcggctcagacccgtcgttatagctcggtcgtgcggcaagctaacagcatgtcgtgtgccccacgccctgctgttcgatcggtatcagtgtcctccttcgctaggctgttgctcgtggatggactggacatcacttcagcgatctctgcaaaaccatccactcccggcccctttgtcgaacttcggncttatcgcctcggcgcgcaacaaccatcgtagcgtggggaatcagctgcgtcgctttttcgga

SEQ ID NO: 46296 - DNA, 263 bp, Zea mays
  Clone ID: MRT4577_142228C.1
atagtgttgcctcgacaaatcgccgggcttcatcaccatacacggagagaaaaaaaacggggcccccatctactgtaaaccccgccgtggtggccgttcgaagcatgcagcaggggtaggatgtaccacgtgcacgtgaggctcgtgcttggtgaaaccgcgggatgcgctccgccgccgcgtctggccatgggggaaaagttagagcttgcgcagagaatggaggaaggatgtgacgaggtccgccgtggactgagttccgt

SEQ ID NO: 46297 - DNA, 350 bp, Zea mays
  Clone ID: MRT4577_142229C.1
cccacgcgtgcgcagacgcgtgggagagtaaattatacctctgatcataaaattgagcgtcggcttcaatagatggatgcagaacaattatgacgaacggattcatgtgatgggcaatctaatcggtgaggcacggaatcaacatcaggatcactagcacaaaacattcactccagaacaaatgggggtgagcatggttctcagcaactgcaaaccctgtatcgcgtcgactctctagatggctaccagatgcatgacagtgaacattctcttgaaaaactgcctaagtatcgacaacgatacagcatgccgctgcaatcttatgtgatatgagaagaaacattgaatcg

SEQ ID NO: 46298 - DNA, 1941 bp, Zea mays
  Clone ID: MRT4577_14222C.1
atgtctcaagacaaaaaagttgctgctgagatgaagctgagcgaagagaagctccttgaggagaagactgctggatttgttgagtcaatagcaaaaaccaatacggagaagattactaaagagatactagaaggcttatctgacgatcctgatgatagcgatagttatgatatggagagtggaggcgaagactctgaagatcggccctggcgaccaagtcatgcagtcttcgggaaatcaactatcaaacagagtcatcttgataatatgagaggaaggtattttcgagatatgtctattgtgagggctgacgtagacagagccgctcctgctcccgaagaaaacgaagttgtgatctttcgaagcttcttcaaagctggactttggttcccattgagcagatttgtggtcgaagttttaaagacatatcagattttccttcaccagatcactcccgaagcagttattagaatggggatcttcgtctgggctgtgaggagtcaaggtctagactcaagtgcaagatgtttttgcagtatgcatgaactttcgtatgagacgaagccctggggtaaagaacaatatcataacaattttggtttctatagctttgttgctcgctctggcgcaagctacccagtgccgacgtttcggaagagatggcccggggcctcgatggaagagtggttttacgtgaaaaatgatttgaagaaaagaaagggtgcaacctctggaaaggttgatgcttcggctgctccaagcgagcctgcgccgaagagtaaaaagttaaaagttctcacccaccggccatgttacattgagccgaccatggtgcctgagtttggcggggaaacttcttcagctgctactccaaaggaaccaattccttctacacagaaagctgaggaaccggccaccttgccgaaggcaccctcagccaagttagctgagccgaagactgataaagctgaggagctaagaatcgagggaacaaaaacattagaagttttaagcccttcggcagaagtgacaatgccgaaggcacaaaaagggaaaattgccaaggcttcgaaagtgccaattgaaaccaaaacaaaactgaccgaagccaaagctacaatgagccaagctagcgccgaagctgggccttcagagcctgctaaggagaaaccctcggaaattggagaaaaggcagcggaggaagaagctatagaacagattttgcctgaaaaagctgcggctcctactcccgaagcaccttccgaagaccttggttatattattcgacatgcttcgggaaaaagattatctgaagaagaaaattttgaagctaaacactatgcccgagaactgaagtactcgaaaggggccttagtgtttaatggtacagatgaagatgatttcttgtattgcctcccagacaacaaagaattatccgtctgccgggaaatggctagaagtatggggtttccgaagctcgaagctggcctctgtgccatgacgaaggacaatcttgcgaatagccttgcatacaacagcctgaagggattaatacttagcaatgccttaagggcgcaaaataatgctgaagacgagagctgcactattgctctcaataaccttcgaacagaggttatcaggctgagaaatgaagccacagaaaaagacaaaattctacttacactggtggacaaaataaaaactagcttcgccaacgtgggcgcgtactcgagtgaagacaacttcataaggggtgatcctgagggcgtaaacgagtggatcagtgctgaactatcccctcccccagagccattcaacccactggccaacccagagacaaggaaaacaacagaaattattaatatggccgaagctattgtagatgaagttgttactaagttgctaaccaaagctgcagaaaaagttctgaaggacgagtag

SEQ ID NO: 46299 - DNA, 344 bp, Zea mays
  Clone ID: MRT4577_142230C.1
ttcaaaactttacgctggttttttaattatcttacacaaagggaagtagtcttgcctcttgtttttttcctgattggaagctctgaaacgaaatggcccaacttccgcctagcgaagcccagcactgcatcgaacaactaccggcatcctgttctttttgggcctgggctctgaaacgaaatggcccaacttccgcccagcgagcgaagcccacaaaacgacggtcagcttcccaaggcaaggaccatacgtgccacctgcctacctcatcaaaaaagatgaaaaaagggaatcgcggtggaagtaccgaaaagacaagccggcagcaccctaccttttttctt

SEQ ID NO: 46300 - DNA, 411 bp, Zea mays
  Clone ID: MRT4577_142231C.1
ctccttgctcgcttgtctcgctccctgtccacgccagccatagccatggagctctcccgcctgccgccggtcctgctgctctgcttgctggccagctcgtcgacgacggccctgccggcgctgcccgggatggaccaggtgcggcagcaggtcgacagggcaaacaggcgcggcccgtccattggtctcgtcatgtcgtacgtcgccgaggacaccgcgctccaggcctccggctacttcaggccttggcgtgtccagcctttcgttgacctctacggacggaggtttcacatcgggagtattcgaggtgtgaatgttatatacgcattgacaggacaacgcaggttgaatgcagctgtcactgtacaaactctcctcgatgtctttaccgtgtctggtattgtccattat

SEQ ID NO: 46301 - DNA, 468 bp, Zea mays
  Clone ID: MRT4577_142232C.1
ggggccccggaaggggcaaaactggaaaacctaaaaaccttaaaataaccaaaaaaaaaaaaacaggcccccctctcccgccccaaaggaaaaaacaaaaaaccccgggacaaggggtttttatctacagcaaaaaattccaacaacaacaacaacaaaaaatcaggggtaattcccccggaaaaaaaatttaagggaaagggggcccccacttaaattgcaggccaagccaaactcctccaaaaacgggccctttcttttgggaaaaaaagggtccacccccccccacaagaaccaaaaaaaccaggcccccaggatggaccaaacaaaaaaaaacgggggggtcctgttttgcccccccaccaaacccttgaaaaacgggtacagggggacaaacacccaaaaggggaaaaaaaacttcccaaacagggggccccacaaatcgaaccccttggtaaacccgttcaa

SEQ ID NO: 46302 - DNA, 1878 bp, Zea mays
  Clone ID: MRT4577_142233C.1
ccaccgcgccggagggaaaagttgtccggtcggggccgatcgggagcgggaaggggaggagggggaggagcatgttgcaactgcagaactcctagtcgatacggcaatcctcgtggccatgctaacacaagggctagcatatcaagaattgttatgttagcagaagcactatttgagcttctggatgaaattcaccaccaatctgcttcgttattgtcatcaagatcagcgttttctccaattggatctgctcctgctccaaaggacattgttgagcgtcttcctgcaaaagtgtataggagaccattctaataccacatggaggaagcagaacaatgccggattatcaattgccaaatccttctgggaagattggcccacgatatggtgacaactttggctatttcatctaacatgtgtagataaatggttaaaggagattcacagggtttgtccactttgtcgtggcgatgtctgcagatctgatgcgctgattggaaaggtcagctgattctgtctcttgagaatgcagctttctacagagaaaagtggagctcttttcaactttctaattccgatacaacctacaaaactattgcacaggatgctcctgtattgtatggagaaatctgatagaatctgaagatgctagcttcaggagctcctacagaaggatggggtctcatgaaccttttgaaggcagtgtccggtttagccgaacattaagtgttgggcggcttcgggacagagttctcaggcggcctccattctcagatgggctattcaccccttcacttctttatgatagggcagtatggccgtctggaaatgctagtgctaggcaagattcagcagtaatgcaaaggactaattcagacaggagttcagaaccacggtctgatccttcaaccagcgatatgtacaactcgagctctgagaggcaggctagcaacggcgatctactggagcgcagatcagcttttcttgagaggaggaggataagatctcaggtcagagctctacaaaggttgggcagcaggtttgaaaatttatctggtcatgagagatcctgcatactatctggtcagcatagaacaggaaattgcaactgcagaacaggtagtcgacaaggcaatcctgatgaagaaactagcacaagggctagcatatcgagaattgttatgttagcagaagcactttttgaggttctggatgaaattcaccaccaatctgccgcattatcgtcatcaagaccatcattttcttcaattggatccgttcctgctccaagggagattgttgagcgtcttccttcaaaagtgtataggaaaccattgaaataccagagcgaggaagcagcacaatgctatatttgccttgttgaatatgaagagggagattgcctccgtatacttccatgccatcatgaattccatctaacatgtgtagacaaatggctaaaggagattcacagggtttgcccactttgtcgtggcgatgtttgcagatctgatgcacccattggaaagaccagctgattctgtctcttgagaatggagcttcttacagaaaattggagagcttggcatggttctcatccaattccgatagaaccgccaaacttctgcagctgttattttcatttcctcctctcttatggtcagtacagcatcgcagtcatcctattatgaaactgatgacgacatgccatggtgaatttaggattcttgtgtggtggggcgagtttgttgataatggattattggcttccgtttgggcgattgatgtcgggtgcagccattctggccaactttggttccacgtgtttcctactatttgaacaggggactaaaatcttcaaagttaccgtccttttct

SEQ ID NO: 46303 - DNA, 729 bp, Zea mays
  Clone ID: MRT4577_142234C.1
gccggccggtttcaaaaagaaccgacccacagacacaaagatccaccggaagtcacttctttcttactcctcctcatccttaagattactgctcattgtctttgtcctcctcgctccgcttccacgacattcctgaggacacacatgacgcacccgataccgatgaacaggcacatcatgttcccagttgcggtacggcgcgctcaaagctaaggttgccgccgccttcaacgctgcgatcacctcgatctacttttacatgccgctgtgctactacagcttcctcgagctccactaaatctacaggtacttgaaatcctaatagggcatctagacaactatactagcgaataccccctacaaccggtagtacgatattgactcgctgaaatataaattgagaactaaataatcccacgaaatatattcatgccactgctagttctcgcactgcatatgccaccctcctccacgcctacctggaagtgttcgccctcactgctgtcccttattgctactatatcctgtcgaaaatgatcatgatcgcaatgctgttcaccctcagcgcagataaactcaccttcttcaacagacaggacgctaaaagaatagagaatctcttaaattacatgctatttgtcacagtgactgcaacattgcataataactttattaagtagcctacagctatgagacatgtacactaacacatattcttactgcgaactc

SEQ ID NO: 46304 - DNA, 721 bp, Zea mays
  Clone ID: MRT4577_142235C.1
ttcccacgagggtttgaaaatttatctggtcatgagaggtcctgcatactatctggtcagcatagaacaggaacttgcaactgcagaacaggtagtcgacaaggcaatcctgatgaagaaactagcacaagggctagcatatcaagaattggtatgttagcagaagcactatttgaggttctggatgaaattcaccaccaatctgctgcgttatcgtcatcaagaccagcgttttcttcaattggatctggtcctgctccaagggagattggtgagcgtcttcctgcaaaagtgtataggagaccattgaaataccacagtgaggaagctgcacaatgctatatttgccttgttgaatatgaagagggagattgtcttcgtatacttccatgccatcatgaatttcatctaacatgtgtagataaatggttaaaggagattcacagggtttgtccactttgtcgtggcgatgtctgcagatctgatgcactgattggaaaggtcagctgattctgtctcttgagaatgcagcttcctacagagaaaagtggagctctttccatggttctaattccgatacaacctacaaaactattgcacaggatgctcctgtattgtatggaaaattcgcattgaaactggtcacacgctattgtgaatttaagactcttgtatggtggggcgagtttgttgatattggattgttgccctccgtttcctt

SEQ ID NO: 46305 - DNA, 361 bp, Zea mays
  Clone ID: MRT4577_142236C.1
ccgccgtgtgctggcgattgcggcgctttggtgtcgtgcggccttgccggttagacgtggtcgcgagaacgaggtacacagactttttttttttttttttattttttttttattttttttttttatattttttttttatttttttggggttttattttttttttttttttttttttttatataattggttggtcctttttccggggccggctttggggcgtttttttgcggttttccttcccctgggggggggttgggccttttttttggggggcccttttcccttttttggggggggttttccctttcgggggccggttttttcccccgtggtgttgggaagtccttgggtttccccctt

SEQ ID NO: 46306 - DNA, 234 bp, Zea mays
  Clone ID: MRT4577_142237C.1
cacacgagaaggaggaaacagcaattgcagagcttgatgaagaagatgaggagcttataaaatcaatcactttccgaaactctggattcgatgtaaagcggatagatagatgacgacgacgatgatgatgaggatttggctcctggccaatcaattagaacaataacggacagtgaatcttcagaatctgtgactaaaccaacagatgtttcatgcaataataacggatcagag

SEQ ID NO: 46307 - DNA, 353 bp, Zea mays
  Clone ID: MRT4577_142238C.1
aagaaaatatggggtgtattttcaaatgcaagtatagatacaaatagatgtttgctaccgggtcgaactataaaacaactttttccatagagaactggttaacaacaaaacaaaccaatggaatagacaatagtaggaaaaatggcaaaacaaagcacgatgtcgacatcatgctcttacaacaacaaaattcaaaatatgaaaaatgttgagatcttgaaaggtgaaacaaaatcttttaactggtaacttttggccacgaagaactcatcatctgaaaaaaaattccaaacaacattaacttgttaataccttcaatgcttcagcaagaccttcacaagtagaagcttcac

SEQ ID NO: 46308 - DNA, 795 bp, Zea mays
  Clone ID: MRT4577_142239C.1
atgggcacccggtcccagacgggtgtccccttggacggagtgggttgcgccgcactagtggatcatctccgcacggcatcctggtcccccgccaagttccggccacacctgccggaaaaatacgacagaacatcaaacccgtcggagttcctgcaggtgtacgtcaccgccatcacggcagcaggacctgcccggacctggctcatgaacctcaccctggggtcagtctattcttgggaagagctatgcgtgcggttcgttgcgaactttgctagtgcttaccaacagcacggtgtggaggcccacctccatgcggtgaggcaggaacccggggagatcctccggaagttcatctcccgcttcaccaaggtgcgagctgcccagtcgggtggctcgggggtcgtccaccgggacagaaagaagaaaaagaagaaggaccacgactaccagaagtcgtggtccactgctctggtggccacaacaacgactagaggccagggcgaccgcaacaaacgcccacgaccgcggaagggtagcagcggtccatgccatgtgcacccgcatggtcgccacaacaccgtggagtgtcgtgagatcattgacctcgcaaaacacgtcagcgagcggcgcgagcagtcttccaaagacggctccccgcctcgccgtcggcccggcaaagagaaggtggacgacggcgaggtagccgcggctgagcagggcctcgggtaccagtcgcccgagggggacctgaaagatatcttcaccggaggctcctactccggtgaagaaaactag

SEQ ID NO: 46309 - DNA, 303 bp, Zea mays
  Clone ID: MRT4577_14223C.1
ggggcccgaacatgtttttttttttttgcaaaaacaaaagaacaaaagaactccttcttttgctcatcataagagttttatcagcttcggcagcaaaggaggggccagttcgacagtcaggatcccacattcccccagcaggtttgtcctcagatagggaaccgctgcaaccaggaactggtgcagagcaacccaagggtcccactgggacgaaacatgcatgaattccccattggcccaaagaggtttcacgggaatgtgaacgacccaccaatctgctggttttgggacggggggttggtg

SEQ ID NO: 46310 - DNA, 1685 bp, Zea mays
  Clone ID: MRT4577_142240C.1
accgtcgtctcctccgtgcaccagcccagcagcgaggtgttcgcgctcttcgacgacctctgcctcctctccagcggggagtgcgtctacttcggtgacgccaagctagcgacacagttcttcgcggaaacggggttcccctgtcccagccggaggaacccgtccgaccatttcctccggtgtgtcaactcggacttcgatgatgtcgccgccaccatgaaaggctccatgaagctgcgagcagaggcagagctcgatcccctgttgaagtactctacctcagagatcagggaacggctagtggacaagtacaggatctcagattacgccatgatggttaggagcacgatacacgagataaccaagattgagggtgtgatggaggatgtgatccgtggcagccaggcgagctggttgaagcagctccgcacgctgacaagccggtccttcaccaacatgtcccgcgatctgaactactactggctgcgcatcatcatctacatcgtgatggccatctgcctgggaaccatctactacgacgtgggcaccagctacacggccatccaggcgcgcgcctcgtgcggcggcttcgtgtcgggcttcatgaccttcatgtccatcggcggcttcccgtccttcatcgaggagatgaaggtgttcaccctcgagcgccagaacggccactacggcgtcgccgcctacatcatctccaacttcctctcctccatgccgttcctgctcgccgcgtcctgggccagcacgtccatcacgtattggatggtcaagttccggccgggcttcagctacttcgccttcttcgccctcaacctctacggcggcgtctccgtcatcgagagcctcatgatgatcatctccgccctcgtgccaaacttcctcatgggcctcatccttggcgccggtgtcatcgggatcatgatgttgacctctgggttcttccgactgcttccggagctcccaaagatcttctggcggtatccagtgtcctacattgtctatgggtcatgggggttgaagggcgggtacaagaacgacttgatcgggctggagttcgagccgatgatgccagggcagccgaagctgaccggcgagtacatcatcaccgagatgatggggctgagcctgaaccactccaagtggctggacctcgccatgatcttcgtcctcctcttcgcctaccgcctcaccttcttcgtcgtgctcaaggtgaaggaggccgctgcgccatacatccgcgtcgcctacacacgattcaccgtcaagcgtctcgagcggcgcgcctccttcaggaagacgctggccatggcgtccatgtccaagcggcacaacccgccgcaccccatggccatccaggaaggactcagctcgcctatgccgtactgagctgagccgaggcgaaggagagagcggagggagacggaagtggtggtcgatatcacagttacttgtggatgtgcttacagatttgtccgttccattgtttagtttgtcagagagcgttgtcaaagataccccacgcgatagtcggtcttcagagcattcgtttcactgtaataactctgaacaccatacacatacaagatagtgctgctgtgcgtacttgtttttttttgtaaacatgaaaccaggcaatgatccttatattaagaaagtcacgcagtcaaaaa

SEQ ID NO: 46311 - DNA, 410 bp, Zea mays
  Clone ID: MRT4577_142241C.1
cggacgcgtgggcggacgcgtgggcggacgcgtgggtccgcgtccaacctgtttgcacaaatgtgagcagttcccagagcgctctccctccttgtcgtacgccctgcattccctgttgaagcatttttggttgctttgctttggtggtgtcaaacgagatggcttaagcagaagaatcttggcacaactaagcagacttcgtacgataatctgtagttttttttaggcaaaacaactatgtgtttcattttttccctacagtttctagtacaagatcttttgattgttgagttactgttttaattattgttagtgcgtctaaatttaaatatttagactactaatgatatatgtaactgtacatagttgtctattttcaattttgaaaaatgctgacatgttagtgaatt

SEQ ID NO: 46312 - DNA, 401 bp, Zea mays
  unsure (1)..(401): unsure at all n locations
  Clone ID: MRT4577_142242C.1
ggggggggggactgcctgatgcaacangcgcttgccggctggagggcgggtccggccctgacgctgcagcacctgggggccttaccgcttcggagcgggccngnggtgatgccccgggtgacgacgcctaaccgtggtgtccccttggggggggcggggggggtgtcnccnatggccttgccgctcctggtgtcgcatggggtggtgccccagtgtcgctgcgacgccgtctcgcggattgtgccgcacccgcngcggccatccatgtgcaacgccggggctgtggcgacgccccccgtgctgcctgccgcggccgcggggggggggctgcgcggtgggtgggggtgtggggggggggcctgcccgggcgggcgctcggcggggcgaacggggggggcggc

SEQ ID NO: 46313 - DNA, 323 bp, Zea mays
  Clone ID: MRT4577_142243C.1
aaaacaaaggacaagggggggtccataaaaacctcccccccctttgtttttcctttaaacaaaccaatcccatttgggtcgggatttgttgggccccccggggtttaaccaacggatcaataatcaattaatgaaccttggggcgggggggggggcccggttccctggcttacccggcccccccgggggcccccttgatgagcgcgggggccacccccataaacccctcaaagtccttttttttgggcagcaacgtgtttttcaccggcctggatggggcgttctttcaaaaaaccttacaagaccccgtgtcctcctccccc

SEQ ID NO: 46314 - DNA, 651 bp, Zea mays
  Clone ID: MRT4577_142244C.1
gtgcggcgctcgaggcggccatcaccgaactacttcctccaaatccaccttctccgtaccagagcagcccgctatctccgacatgcagactgaaaagatacactactctcgcaaccacaagatccgaatataaggtacggcaagggaaggaatgaggcccaagggacgaaggctgcgtcgcgagcaacactacgagtactgcatttacgcgtcggtcatatcgcactctacctcaaggccagtcaagaactcctcacccgcttcaccaagaagcacccgactatctatcccacgtcctccatcatctcccagtacaccagccgcaactgccaggtaaaccggaacgcgatcacaagaaaaatctgatacagccgcgtcacatacaggtacccgggaatcacaactacctattaccgaagatgctcagagctactgcctgtctctcaccatgacgcgcgttgccccacattcatcagacgtgtgctgcccaacaaaggcagctcaaagaccaaggcgcacacatagcatcccgcatgatcactgagttctaaacaagtcgcgatctccggcagcatgttgtctctgacttaccgacgactgccaactgcaacatgcatgaactaccccctgtacttcatgtacacctactac

SEQ ID NO: 46315 - DNA, 677 bp, Zea mays
  Clone ID: MRT4577_142245C.1
ctcgagccggcgggacgattttcctcgcctggtgcagacatggcgacctcagcggggctctccactcgccgccaatcccacccagctctatctgggccgagattcgctgggcaagccggtgaaggggcttggccttgacatgggccgcgagcgcgcccagagaagcatatgcgcgccaggcggggagcaacatctccgccgagcgcgaccccgacatggagaacgggaagctgatgaacctcctcctcctcggcgccatctcggtggacgccgtgggtatggccgtaacctacggagccttctatcgactcgtgccgttctcggtaacgccggcggagggacctacgccaaggacaagatggacaacgacatcgcgatggaggagtgactcaacacggacggtcccaacgatcgcacgctcgatgcaagtctcaaggaggtacaccgcgcacctgaaggtggagcatcgtatcaagacgctgagacacctacggaatctcgccgtgtgtactcactctccagtgcataatgccgtgtaacggggccgagaacaagttcatctgcccatgtcacggattgcaatacaacaaccatggcaaggtgttccgtggaccggcgcctctgtcgctgatcctgtgacacgccgacgtctacaactgcaaagtcctcttcacccc

SEQ ID NO: 46316 - DNA, 403 bp, Zea mays
  Clone ID: MRT4577_142246C.1
ccctcgctttcgcccacgcgtccgcccgcggattcgattccgccggccgcatcttctccagcgccacagagatgtggacggaaaacgcaaggagtggtactccaaggctatcgcctactggcaaggcgtggaggcgccgtcgccgccgctgtcgccgcctcgcagagcgcttccgcgccgaaaagcgccatctggttgagcttgactgtagctcgggtattggtcgacgaacagagaattctatgcgtacgcattggaacgaggttgatctcgctgtgccagattctcatttgcttgaagcccaacggaaacattttactggatgtatggaccatggggaggactttcacaaggttagcaatctggactgtgtgcctactcatgactaaactcctcgtgaagg

SEQ ID NO: 46317 - DNA, 538 bp, Zea mays
  Clone ID: MRT4577_142247C.1
gggaccgggcccttccctcggtttttttttttttttttttttttttttttttttttttttttttttttttttttttttttttttttgtttttttttttttttttttttttttttttttttttttgttttttttttccttgctctctttatgagcggctttttttttttttactgtttcttccttttttgggggatcctaggaggccgaaaaaatgcttcaacggatgcggcttaaaaacctggcctttctataagaccgcaggcacaccccccccctttcattaagaaaactaaacgcccacctccggaagggaccgccccgagcgccgacatggcaggacaggcctaagaaaactccttttgttatattccaagaacaacctcccagggcgccgaggggcccaaagacgtacagagtctcgaattgggggaccgtgctttggagcacccccccccccctttttttgtaggagagtgggcgcccttccgtctgggccttgtcgccgatgcacactagagagggcaggttttcatgctt

SEQ ID NO: 46318 - DNA, 637 bp, Zea mays
  Clone ID: MRT4577_142248C.1
tgattgagaggaaccgttcgctcggagccttggatcatcaacgtcgagatctccactcaatcaagttatcgtatctcatggaagatcgggctgcgtctactatcaattggtatcagatttccaggttgcccgtgaggtataatcctaccttcagattagttttgtttcatcccatagtccacaaaaagctaaaaaaattacgatcagtttattccgacctaaaaccatcgccttagcctttgcacaattcagttttagagtccatagttctgagttcgtgttctagttgggtttggttgctagattagatttgttttggttcagtttgattctgtccatccgcttccatcctacaaaaccgaccctatctacaaaatagatcctatctctaaaaccgaccctatccacaaaacagatcctatctctaaaaccgaccctatccacaaaacagatcctatctctaaaaccgaccatatccacaaaatagatcctgtctctaaaactgaccctatccacaaaacagatcctgtatctaaaccaaccatatccacaaaacaaatcctatctctaaaaccgaccctgtgctccatagccgcggcttcggttcctgccgatttgtgtctttaaaaaccatact

SEQ ID NO: 46319 - DNA, 228 bp, Zea mays
  Clone ID: MRT4577_142249C.1
gcgtgcgctgtcatgagaatcatgtcggcctgtcacactcatactcactgatgactttctcgttatataatcgaccatgttgaccccttaggctgtagttggtacaatggtacttatatagatgcttgaactagagaccctatgttcgtcttcctatactctgatgctgtatgcaactgaaacaatgaatctattatcttaacgctgcacaaacctctgttcctccca

SEQ ID NO: 46320 - DNA, 1830 bp, Zea mays
  Clone ID: MRT4577_14224C.1
atgtctcaagacaagaaggcagttgctgagacgaagctaaccgaagaggagaagctccttgaggagaagactgctagatttgttgagtcaatagcgaaaacgaatacagagaagattactaaagaaattctggaaggcttgtctgaagatattgatgatagtgacagctatgatgtggagaccttcaggatatggccactgatagacagctgggaaatgccaaaagaaaccatcactaaccctagcgaaggtgatttggttcgattgaaatataccttcaggtttggagaccagtttgtcgaaccagatgacgactggctgaagtgtgttgaaaatactagcgatgagttacttggagcatattccaagtctgaagataatgcactatctgcggccttcgggagccgaaaaaagaaacgattaaataggaaaagaaagagtgcaacttctggaaaggttgctgcttcggctgctccaagcgagcctgcgccgaagaggaaaaaattgaaggtccttagccaccgaccgtgctatattgaaccggccatagtgcctgagtttggcggggaaacctcttcggttactgaagcaaaagaagctgcccctcccacgcagaagactgaagagccagctgcaatgccgaaggcgcctttgactaagcttattgaaacgagggttgacgaaggcaaggatgaaagatcaaaaactgaagaagcagcaaagatgcccgagattctatgtccttcagcagaagcaacagtgctgaaggcaaaaaaaagtcctgcgataacccctagaaggaaaaggatggctgggaccgaagccgaacccacagtgcctgttgagacgaagcttgccacatccgaacaaggggccgaagaagtacctccaaatactgatatagcttttgagagaaatatgggcaaagaagccgaatcccctgctcccgaagcaccttctgaatatcctgattatatcattcgacatgcttcgggaaaaagattatctaaggaagaaatttttgaagctaaacactatgcccgagaactgaagtacccgaaaggggtcccagtgtttaatggtacggatgaagatgacttcttgtattgcctcccagacaacaaagaattatccgtctgtcgggagatggccagaagtatgggctttccgaagctcgaagttggcctctgcgccatgacgaaggacgatcttgcggatagccttgcatacaacagtatgaagggcttaatacttagcaacgccttaagggcgcaaaagaatgatgaagacgagagctgcactattgctctcaacaaccttcgaacagaggttatcaagctgagaaacgaagccttggaaaaagacaaaatcctacttacattggtggacaaagtaaagggagatgaagctaacttcaaggctcaatctgaaatccaaaggaatgagattgaaaaccttcaaaagcaactggctgaagccaaattaaaatgcgctgttgctgaagctgaacgagatgccagtgattactggaaaaattattgtgaaaaaacagttgcagaacttcgcgcatcaaaagaaagatgctttggaaaatctgtggagtgcgtaaaaaagataaagactagcttcgccaacgtgggcgcgtactcgagcgaagacaacttcataaggggcgatcctgagggcataattgagtggatcagcggtgaagccgaagcttttgaagaaattttgagtgactgcggggatgtttgcgcgttctctggtgcgaggggagttgcagctattttggagaaggcagggtgcgaatatgttaaaactttggcctag

SEQ ID NO: 46321 - DNA, 255 bp, Zea mays
  Clone ID: MRT4577_142250C.1
caccaactaccccctcttccgctacgtttattacatacgttccataactcctctcctatacacacttatccactatattaatatcttctaccacaaccacaacatcttctatcctctctcatacctatccatttactatccatcaacttactcacacaatcctctaacctccctccacccctctattaatcaactctcatccacacaatccactaacactcatcacagatcactacacaaccactaaaacaaaca

SEQ ID NO: 46322 - DNA, 616 bp, Zea mays
  Clone ID: MRT4577_142251C.1
cactcccaagggggggggccaagaaaattttcgggcccaacctttggccaaaaagggcctttgggcaaaacaaaatttttggcaccccagccaaccaaaggggcggcccaaacccccccccccccagggcaaaaaaaggggaaagggcccgggccggaaaaaccaaagtggggcttccaaagggcaaaccctttttatataaaaaagggggggggccaaggggaaaccccagagggggggccccgcccaaccaaaaaaatccaaaccctttttaaagccaaaccccccggaggggggccggaaaaaacccccccaggtttggggggaccaaacagggcaacccctttgaagccttcacctatttgacccggcggccccgaaggttggaaaggaaaaaaacccccctggggcccttgggggggggggcacccccggtccccccccgggcttaacccgattcaaaaaagtaaacccccccggtgtttgatggccctaaaaaaaccctttaacccttaaacccaaaaaaagtcccccggcgggaatgggccccacaccaaggcccccggggtccttcaagtcaacctccccctccgaaaccccccggggggctcccccc

SEQ ID NO: 46323 - DNA, 363 bp, Zea mays
  Clone ID: MRT4577_142252C.1
cccaaacccagaaacaagaaattgctaaggagttcaattactctgaaaccatatttgtgcaccctgttgaccctcaaacacctacgcagcagagaattgatattttcactactgatagagaattgcccttcgcgggccacccgactatcggtgctgcgtcgtgggctctgtacctatcccctgataagggtgatgttaccacactcctaacgaaagctggaccgatcccgatttctctaagaccttcgggagatgaagctgcggcgttgattccacatgatgtgaggatacatcagaagagattccccgttcaggagttgttgagactgcatcctaccgtcaagccatttgtcggttcgacgg

SEQ ID NO: 46324 - DNA, 234 bp, Zea mays
  unsure (1)..(234): unsure at all n locations
  Clone ID: MRT4577_142253C.1
atatagaacgcccttcagatgagcgcaggttaactgtacatgacaccgggacaaggaacatacacacgctgattcggaagaggattgaacacacaccgtcgaccatgctccttcatgcatggaagcacctgttcagcgggggtgcgaacacacatcatccccagaatagctctcgncctaagagactggtaacatacattccccagacactcgtggcccacgacccagctccac

SEQ ID NO: 46325 - DNA, 264 bp, Zea mays
  Clone ID: MRT4577_142254C.1
cgacgcctcggcagacgcctcggttggcttctcccttttgcgtcagcagagaaacagagcgagattagcaatcgccatgtctggcatcatccacaagatcgaggagaagctccacatgccgggcgaccacaagaaggaagatgagcaccacaagaatgccgacgatcaccacacgaaagaggagggggagcaccacacgaaggaccgctcctagcataaagaatgcatcatagacaagatcaaggacaagatcaccggcgagca

SEQ ID NO: 46326 - DNA, 291 bp, Zea mays
  unsure (1)..(291): unsure at all n locations
  Clone ID: MRT4577_142255C.1
accggggtttgttgttaaataatattttcattttttatgggggttttttttaagccaccataattatatcaaacaattaatagcaatcaaaccgacgaacatataaaaatagtaatacaatagccccttcgggcaatttaatttgtggtcacggggggggggcgatttgagctaatatggagcgaaacaagacgacccaaaggcgggggggagctccaatagaaaagcgaggtaaacgccaggaaggggccagcaacggccgcaacacaaatnaccagggatgggagcagg

SEQ ID NO: 46327 - DNA, 738 bp, Zea mays
  Clone ID: MRT4577_142256C.1
cgggccgtgaagaccgactcgtcgttctggacaatagaggatgctgagatgcatataacactgcaaaaaagagagaaggggaaaacatggtcatccccaatacaagggcaagggattttgggtccatatgctgcagatcaagagcaaaagcggcttatgctccaaaggtttcaggaagaggtatgatctctcccaccctcacctgtactagtttcattgccacgcattcccatctcatgctttcatgctcgactttcttttcttagtttgttgagttgtttttaattttctaactcagggccagatatttttgaatcaccgaccatactaatctgctttgcatgctaatgcctcaagtcaaattacagatccaatcgaaaaatcttgtttggcaagattagtttcacattcaaatttgtgtactattaaaatagagttaaatgcatgagcgatctctgaacttgtcacgggatgccacttaggtccacgaacattggaaatacatttctaggtctttgaacttgttaagtggtacaccacagtggctggtatggtccagaaatggacccatgatgcaccatttttacaagtttagagatgtatggtacatcacttaacaagttcaaggacttttaaatgcattttcaaagtttatggatctaattgacatcccttgacaagtttaaggggccatcaatgcatttaactcattaaaataagttgctctgtaactacacc

SEQ ID NO: 46328 - DNA, 701 bp, Zea mays
  unsure (1)..(701): unsure at all n locations
  Clone ID: MRT4577_142257C.1
aattcggcacgaggggaaaattccccattgctcaatccaagagagcaaggaaatccagcgcccaaatcgtgatcaaagaggaaagggtgctcgcccacctcgatgataggaaggagcgtgatgcggagacatgggtgctggacacaggggcgacaaatcacatgtcgggcgccagagctgccttcatccagctcgaagagatggagctgggatccatgcgtttcggggatgactcgatggcgcggattgaaggccgcgggaccgtcgcattcctgtgcaagactggagaaatcagatcgctgagcggagtctacttcattccccgactaacgacaaacattgttagcatcggtcaactcgacgaggctgggtacaaggntcgatgttagcgcgggagtaatgaagatccaggagccntagtggtcaactgctggcgaaggtacggcgcgaaacaaatcggttgtatctgctccaagtcaaactcgccccggcaacttgcctagcagtgcacgggcgaaatgataaaagaggtcaggctctggcatgagcgttttggccatgtcaacatggcggcgctccgaaaactagctcggaggagatggtgcgtgattacataatcgggcagtgacaaggtgtgcgaagctggccaagtcgcagcagagaagacttattccgatgaggcgagatcgcgctcatcagcg

SEQ ID NO: 46329 - DNA, 438 bp, Zea mays
  Clone ID: MRT4577_142258C.1
acatagagaacctggttttgacatgtagcgcacggaagttgaaaaccgtcatagttcatttcacaagccaaatgaaagttcctagggagattcatcggtggctaacagttgggagcaattcatgtcatgccattagggcttaaaattgacaggtttcacaactagcctgtcatgagcacacacattgagtggtatcaactttttcacatctaggcaaactagcagagtaacgtggcaggacttcaacatggggcgccaggctaagctagattgttacggaaagagcacctgcacctggatgcattcattaggggatatacaggacctggtgctgtactgggtcgcgcttgccgaaatagggaccatgggcaggttgactggggtaagacgctgcacttattattggaggaagatgagcctgatcgccatacacgaact

SEQ ID NO: 46330 - DNA, 871 bp, Zea mays
  Clone ID: MRT4577_142259C.1
ggccgcaaattttttttttttttttttctttaacatgatcgaaaacttatcattagcttctcatgttctgtcacacccagatttaagggacaaagtcgggtgcatctcatacatgcgccaaagaagacaacatatataataacagagtgtatagagataaatgtcacaatataatcagagtacttattacatagcggaattcttacaaaataaaagataaatatagatagaactaaagtccatccttggcgcaaaaaagtcaactgggagacgccacctagatcgaatcgaactcctcgtcgtgtggctcctcttgaaccacctgttcttctcctggcacttgagattccagttaccaggatgattcttcagatccttgtgacctcacgcggtagtagcgcagcaggaacactcgtccacggcgacgcgtggtccacggcggtagcggaactccatcgagcaattctttgtcgacaggggctccaatcctagtgttggtgtcgcggacacgctcgtcgaggcgtagaggagctcctcgacctactcaattcgagcggcacaccgatcccggcgaggtccctctcacggcaacaatggcgggtggaaattccggaggcgacagtggcagcgcgaagaaatctacgaggcaatggcttgcggagggggaattagagggggtggacaaggcggttgacgcgagcactaatcgccaccagcgggtcgaagcacaagagggagaacgcagcggccagaacctcggttctggatggggcgacgacgagggaggtgatggaggtcgggagggtgtcagtggataaaaaaatgtgtcgccgccagtagggggcagggcgaggcgcgaggccccggccgg

SEQ ID NO: 46331 - DNA, 727 bp, Zea mays
  unsure (1)..(727): unsure at all n locations
  Clone ID: MRT4577_14225C.1
attcttttgcgctcttaaggcttgctagataagccctaccgaaagaatgaatgataatataagaacaaaagactattaaaattataaacttccaaattacaattttcgtaccttcagactgttgtatgcaaggctatccgcaagatcgtccttcgtcatggcacagaggccaacttcgagcttcggaaagcccatacttctggccatctcccggcagacggataattctttgttgtctggcaggcaatacaagaagtcatctttgtctgtaccattaaacactaaggcccctttcggatacttcagtttttgggcatagtgtttggcttcaaaaatttcttcttcagataatctttttcccgaagcatgtcgaatgatataatcaggatctccggaaggtgcttcgggagcatgggttttggcttctttgcccatattcctctcaaaagctatatcagtatttggaggtatttttttttggccccttgctcggctgtggcaagcttcgtctcagcaggcactggtgggttcggctttcggtcccagcctcaattgctgcaattttgccctttatctgcctagtatcagcttcagcctgcgcctctgcaatttcggcaaacttctttatgggagagggggcgtttggagtnccgttgtttccaaaatgtctaaaacatttaccatcctttttctcttaggggttattttagaaactttttctgccttc

SEQ ID NO: 46332 - DNA, 226 bp, Zea mays
  Clone ID: MRT4577_142260C.1
cacgtaggttcgatcggaatctaggatcgtagatcgccatttattttacaacacgtatcacctatgggacggctatatgtcagcgattctgagtgtaactgaaccattccatgcatgaagtacagcaccaagcacctttttgaatacagaatccatttagtaagatgtatcaaatcagtataatttccagaaaccataaatcatggatataaaacttaaccttttt

SEQ ID NO: 46333 - DNA, 655 bp, Zea mays
  Clone ID: MRT4577_142261C.1
gtgacgctgaaatcttgtcgcactactggtgttgctggtagggaggcctctaaggctgcaaaagctgtgtcgcgtgtgcggcgctttctgctggatactgacggcactgttctgcatgtacttcggcctgtactactacgtcgacaagtttgccggcttcgctagcgttgccctcagcgcgctgcagctggaccctctgtccagcacgccgcccgctatcgtcccctgccgcatgaagctcgtcgggggcgcgctcctgcaccacgtccggtcgggcatgcatgacatcttctgctggatactctcagcactgttctggatgtacttcggcctgtactacttcttcgacaagtttgccggcgacacgtgcgttgccctggacgagtaccagctgaaccctcagaactgcccctccggcgccgccaccatcggtgacatcccgcagatcctgaagaggctgacgtgctcggacttcggcggcggcgccaactgccgcccggccgacctctcgtcggcgatcgactacgacaaggtgcagtcgtacacgagctccatccagaacgtgctggacatcttcccgggcacggagcgcctggtgagctgtgagctggtgaaggccggcttcgcggacatcgtggacaaccagtgcgcccgt

SEQ ID NO: 46334 - DNA, 137 bp, Zea mays
  Clone ID: MRT4577_142262C.1
tgcagggaaagcaagaaggctggagggatccagcgtatcttgccagtcaccagtgaggtctatcagtaaggtgggattatgggggtacatactaaaggagttgaatcatcagagtaaactgccagttgcaaatttga

SEQ ID NO: 46335 - DNA, 607 bp, Zea mays
  unsure (1)..(607): unsure at all n locations
  Clone ID: MRT4577_142263C.1
cggggcgcctgcatcgcagttcgctgcagcttttgctacttgacacaggcacagctttgggagggggcggggaacagaaagagcgatgcgatcgtgtcctgccgcgccactaccactanctantctgccgccgtccgccgtgccgcgcgagctccgactgccggggccggagggaggggaggaaggggctgctgctccccctgccgcccgcgggcggggactgagatccatccagctcggaggaggaggaggaggagtcnctcctgggcctgggttctanacgtggtgacccanatcttgacgcggctgcccaaggaggttactcatctagaggagaggaggggttgggtccttgacccggtggggggggggctttgccactgggatagggggacagtgtggcctgctggatctttatcggcaggtggggggcctgtgctttccggtgggctgggacgcgttcacatgccaggggctggcggtttggtacttactcgacggattgggtaancgctgtctgtggggtgtggtntgctnctccttctttcatctgattttnngnggattggggggcgaggaggaagacctaggaaaattatctctctta

SEQ ID NO: 46336 - DNA, 142 bp, Zea mays
  unsure (1)..(142): unsure at all n locations
  Clone ID: MRT4577_142264C.1
ctcgcctctctctcgcgcaaccacagtagatctaccaaccatacgaccgggccgtgtcgantctagggctctctcgtgtaaggaattaagcaggcaataggccaaccgtcttccagcaccgccaatgcgagcagcaggctgc

SEQ ID NO: 46337 - DNA, 929 bp, Zea mays
  Clone ID: MRT4577_142265C.1
cctccacttccacgcgtccgcattggagtggctccattgcttggcaagctagctagtctcttgtcctgtcctgtcctgtccttccttggcaacaatatataaaatggtgggtagggagcagatctgtgcgacgacgcaggcgcccaacaaggtggcgatgagccgccaggttttccatgtcctcctccttgccgccgtcgtccttttggcctcgctgctatccgcgaaggagaagctgctggggctgagcccggctgcggtggcggtggcctgctgggcgggtgcggtggcggcgtgggcgtacgcggtgtcccgcccccgccccgtgtacctggtggagctgtccgggtacgtgggcgggccttcgcacgaggcctcccgcgccaagacgatcgcccacttcgggcggtgcgggcggttcagcgacgagagcatggcgttccagaagcggatgctggagcggtcggggctcggggagcaaacccacttcccggcgtcgctcatcagcgtgcccgtggacatgtgcctccgcacggcgcgcgaggagtcgcacgccgtcatcttcggcgtcaactccagcctgctcagccccacgccgtccttcacgtcgctcatcgccaaccgctacgggatgcggcgcgacgtcgtcagccacaacctcagcggaatgggatgcagcgccggcatcatcgccatcgacctcgccaagcgcctgctacaggtacatggtttatacgtcaatctttcttaggcagtgcatgagacactcaggcacagtgatttcaccacgtacgtacgtagtaccaatattctgcttccaggctggtttttgcagattatttatgtgcgtgcccatgcatggcttattctatttccatgcgccaggaattatatatttgaacacatacatattgctacgtttgttgttt

SEQ ID NO: 46338 - DNA, 387 bp, Zea mays
  Clone ID: MRT4577_142266C.1
cgttctgcaaacgatccatgtgctatctcgcttacgtcttgttcggttgtttgcaagccatatggattggaggggattgatacagattggaggggattttgacttactagagattgaatcgctcccaatctccctcaatccatatggattgaggtagaaccgaacatgaccttaccaggaatgtgttggtgacgatcctgcaaaaaatatcctagtcttgttcttgtcaatattctcccccagccattcggttagtttcttgagagctatctcgaaaccatcgaccatttccatctcgtctaactttgcatcaccatcttcgaacgaaccatacctgcacatgtatacaagtgttaattacctgttcgctgattgcatttggtaact

SEQ ID NO: 46339 - DNA, 1178 bp, Zea mays
  Clone ID: MRT4577_142267C.1
gctagatcatatcgatcgccatatatatagtagggagcggctcgcagggcaagaacgaagcagatggcggtgatgagccgccgccgcgtcatccagctcgtcctcgttggcgtcgtcgtcttcctggtggccccgcggctgtcgtggaaccttccgggcggcctcgagaagctggggctgcagcagagcccggcggcggtggcggtggcctgctgggcggctgcggtggcggcgtgggcgtacgcggtgtcccggccccggcccgtgtacctggtggacctgtccgggtacgtggcgggcgcgtcgcacgaggcgtcccgcgccaagacgatcgcccacttcgggcggtgcgggcggttcagcgacgagagcatggcgttccagaagcggatgctggagcggtcggggctcggggagcagacccacttcccggcgtcgctcatcagcgtgcccgtggacatgtgcctccgcacggcgcgggaggagtcccacgccgtcatcttcggcgtcgtggacgacctcctccgcagggcgcgcgtggccggcggcgacgtcggcgtgctcatcttcaactccagcctgctcagccccacgccgtccttcacgtcgctcatcgccaaccgctacgggatgcggcgcgacgtcgtcagccacaacctcagcggaatgggatgcagcgccggcatcatcgccatcgacctcgccaagcgcctgctccaggtgcactcggacacgtacgcgctggtggtgagcacggagaacatcactctcaacgcctacatgggcaacaaccgccccatgctggtcaccaacacgctcttccgcgtcggcggcgcggccatcctgctgtccaaccgccgcgccgaccgccgccgcgccaagtaccagctcatccacacggtgcgcacgcaccgcggcgcgcacgaccagagcttcggctgcgtcacgcaggaggaggacgacgcggggtgcgtcggcgtctccctggccaaggagctcatggtggtcgccggcgaggccctgcgcaccaacatcaccacgctgggcccgctcgtcctgcccatgtccgagcagctccgcttcctggccaccgtcgtcctcaaccgcgtcttccgcgccagagtgcgcgcctacctgccggacttcaagctcgccttcgaccacttctgcatccacgc

SEQ ID NO: 46340 - DNA, 455 bp, Zea mays
  Clone ID: MRT4577_142268C.1
ggatggaagaaggccctggagagaagcaaaaaaaaatgccggggggccaagctggtacaaacaaaagaaaagggaaacaaaacggagcgggaaaacaagcaaaattctatttggattaaaaaaaccctaccaaagggtctaaaaagaaaataaaaaagggcttaaaaaaagggaaaaagcgggggacggggcaaaatccttgaaaaaacgggacaaaaaaacaaatttttttaaaaagggggcccccgaaaacaaaaaaaaaaggggacaaatggggaaggaacaatttgacaaggatttaaatgacaacccccaaaaaatcttgaattgggggaaaaaaaccgaggggttgaacttcaaaaaaacacgttcaaagggggggattttaaaaaagctaaaaaaacccaggggggagggccccttggaaaggaaatccaatcttttttccaaggggg

SEQ ID NO: 46341 - DNA, 689 bp, Zea mays
  Clone ID: MRT4577_142269C.1
gagtcttcttttgggggtcttctaatagttctctctcgtttttgtggagtgcgtctgcggattgaccccggcctcctttccgtcgagtacgatgcatcctcataccccgtatcatctcctctgcgccactcgctcgacgcgtagcgtcgactccttcgtatatatggccggaccaagtctctacgccgagatcggcgagaatacggtgatctgctgtacaaggactaccatagcgaccacaagttctagcctctctacctacagatccgatggagtcgctgtcactgctactagtacaaagtagaagctggactctgatctttcagatgatactccattctcagcatacagagcgataacatgatcgtagatgttgcacagcaaactcttgagctttgtatcattactatggtactgtctctgagatgtgcacacaccatgactgaagactatcttacgctttgctgctcctgatctgagatctggataggatgagcttcatgattcgtctgattatgctggagttaatgcaagcggtagtctgacagtcgatcctgtatgcaactctgctctggtgattctggcactatagctctcgcaggtgatgcagagatctcatttgattgtgcctctgcgatcttcaccacatacaatggtggattgctgttcgctcatgaagaccgtatcgc

SEQ ID NO: 46342 - DNA, 2526 bp, Zea mays
  Clone ID: MRT4577_14226C.1
atgtctcaagacaagaagccagttgctgagacgaagctaaccgaagaggagaagcttcttgaggagaagactgctagatttgttgagtcaatagcaaaaacgaatacagagaagattactaaagaaattttggagggcttgtctgaagatactgatgatagtgacagctatgatatggagagtggaggcgaagactctgaagatcggccctggcgaccaagtcatgcagtcttcgggaaatcaactatcaaacagagtcatcttgataatatgagagggagaaaacgaagttgtgatcttccgaagcttcttcaaagctgggcttcggttcctgttgagaaggcgagagaagacattaaagagatcattatgcgccccatctggtcctgcttcggccttcgaaagctgaaggtagaaattgatgaagcggccgaagcatgccgaagggccttcagcatagtttgctcttttattggaactagagacttagttcaggaacatgtagcctataggatatggccgctgatagacagctgggaaatgccgaaagaaaccatcactaaccctagcgaaggcgatctggttcgactgaaatacaccttcagatttggagaccagtttgtcgaaccagatgatgactggctgaagtgcgttgaaaatactagcgatgaattacttggagtatattccaagtccaaagataatgcactatctgcggccttcgggagccgaaataagaaaagattaaacagggtttttgatgctattggatttgtgtaccctgactaccgctacccgccacgggggcagaagagaaaaggcgcgacctctggaaaggttgccgcttcggctgctccgagcgagcctgtgtcgaagagtaaaaagttgaaagtcctcacccaccggccccgctatattgaaccggccacagtgcccgagtttagcggggaaacttcttcagctattgaagcaaaaagacctgctcctcctacgcagaagattgaagagtcggctgcaatgccgaaggcaccttcggccaagttagctgagccgaagactgataaaattgaggagccaagaatcgagaaaacattagaagtggcggtgccgaaggcacaaaaaggtcttacaacgactcccaaaaggaaaaggatggcaagtgtactagatgtactagagtcagtaaaagcttcaagttctattccttcagggaaaattgccgaggttgaaacaaaactagccgaagttgaggctgcagtgggccagactagtgccaaagccgggccttcagagcctgttgataaacaaccttcggaaattaagaaaaaggcagcagaggaaaaggctacagagaagagtttgcctgagaaaactgtcactcctactcccgaagttttaaagaaaaatattgaatatatcattcgtcatgcttcgagaaagaaactctctaaagaagaagaacgagaggctcaacactatgcccagaaactgaaatatccaaaacgggcattagtgttcaacggcagcggagaagaggatttcttgtactgtctcccagacagcaaggagatatctgtctgccgggagatgagcagaagcttcggattcccaacattagaagatgggctttcagtgctgttgaaggatgaattggccgacaaagtaattgaacttaggaacgaaggccttgaaaaagataaaatattaatttcattggtgagcaaaataaaagaagacgaggctagctccaaagcccaagctgaggcccagaaaagtgaaattgaagaccttcggaaacagttagccgaggacaaattaaaatgcgcagttgccgaagctgatcgagatgccagtgagtactggaaaaattattttgaaaagacagttgcagaactccgcgcatcaaaagaaaaatgttttgagaaatctgtggaatgcgttaaaaagataaaaactagcttcgccaacgtgggcgcgtactcgagtgaatacaacttcataaggggcgatcctgagggcgtaatcgagtggatcagtggtgaggccgaagcctttgaagagattttgagtgatcgcggggacgtttgtgccttctctggcgcgagaggagttgcagctattttggagaaggcagggtgcgaacatgttaaaactttggcccaggccgaagctaccttctctatcgacgatacgaaggacccctcggtcgaagcaagctcaataggcggaaatttttttactgatatctgggaaaatggtggccgaaggatggcccatgaaataatgaaaaagagcgaaaaagacatccatgacactcgagaagcagcaaaagcatctgaaaaagttgtggaacttgaaagacgaatagttgaactatctcctcctccagagccatttgacccaatggccgacccagagacaaagaaaacaatagaaattattaatatgaccgaagctattgtagatgaagtcgttaccaaattgctgaccaaagctacagataaagttttgaagaaagaagagtag

SEQ ID NO: 46343 - DNA, 490 bp, Zea mays
  unsure (1)..(490): unsure at all n locations
  Clone ID: MRT4577_142270C.1
ggccaccaagcccgccccanncagnccgagacaaattccgagaaccgagccacgcagggcgagcccaggccccagaggccgccagagccagcggcncgcacggcgccccacgcganggcgcagaaggagaccaanggcagcaacggcgagcacancgccacccgcccgccgccgaccccggcgccccnccgcggcaccaagcccgnccagggtggcgggcgganccaggacaccggaggggcgggcnncaacggcncgcaccgcgaggacaggcacanggagaacgagaagcacgaggncagngcggcnganaaccaggncaccggaacaaaagaaaaccngaagaaggggagcggacacccaagangngagcncagccgccangaggacaccgagccacngcaagaggaggcagaccaganccaccaccgagcnngccccgcnncaccaaaccncnacaagcacaaaccngnnaagaccancaagacaa

SEQ ID NO: 46344 - DNA, 258 bp, Zea mays
  Clone ID: MRT4577_142271C.1
cgtactttttttattattttcttattcttcggggtgatttttaaattcttctcggggtaaacaaacggtggaatttatattcgccccgtcctggaatcacaaaatgcgagctgattgggatctatcaagccccgtcttgaaatccactaaaacccccgggttttcccagaaggggggttaatccacctttcttacataagtagcacttccataaggggcctccaggggggggggaaaacctgggcctccagggatccc

SEQ ID NO: 46345 - DNA, 261 bp, Zea mays
  Clone ID: MRT4577_142272C.1
gtctcttccctaatacttacgaaatgttaattactgaatgatctttgtttatttttgttataattgcttgttgtttatatttttttattgttccgctgaagggacttgtatcaacttgcaccaaagttagggcaataatttgtatgttagtacttagaacttgttgaggcttccccatacccctaagtttcatttgtagctagaagccatcagggttgcctgtaactagcaaagcattatattgtattgttgttgtccagg

SEQ ID NO: 46346 - DNA, 532 bp, Zea mays
  Clone ID: MRT4577_142273C.1
ggccgcttttttttttttttttttcttttttttcaaacatcaacaaccgccaccacttttttaaatttgtctctgcaataaatcacaggattgattcactgtctcttacatttagtattgacttgatgactagggcatcacaaggggttacatgggacagtaatctgcttgctatttgaaatggggggcatgtgaaagcttgctgcacttgcaagatggtgcacaatcctggatcgtcgaataacaactgccgcctggacagcagtagcaaacaccttcggatattgctccctttttgcaggcctgtttctcgcatttgcagaaacgaacaacgttccgagagtatgcaggaatcatcaaacttcctaggatcaccatcaagagcaggacagccttgcttgcttccattgtaattctcgccatataaggattttttttctcagatcagagatcgatggttgttgggcttcatgtgactacccccctccggcctcgcggaggctgcaagaatccctactgtactttttttctt

SEQ ID NO: 46347 - DNA, 1910 bp, Zea mays
  Clone ID: MRT4577_142274C.1
ttgggtacctcgaggccggccgggcgcgcctgcggcttgccgcagtcgatccgaatcgcaacgcccgaatataccactcgctcctcctccctgcttgcctcccgctgatatgatatccgtccattccaatccccctcttccgctccgcctccctctagctcctctccctctcgcagccatcctcgtccccctaagaacccggacgtcgtttgtcccctccttttctgggcgtttacatctttaagctcaaagagaaaggattatgaaaatggcgcacttgatcactaattgcagctttcagacattctcgagttctcctaattactgccgcaatattgggcaactacagaactcaaaatcttcaaatctgtccctcaaatcctgttccaggagacaaaagaagtcatatgttacctgtgctagcgctgccgtacaaggacagacacaaacacctcttactggtagccagcaagcttatgagcattcatcctccaaacctaaaaaggtaatggttattggtggagatggatactgtgggtgggcaacagcacttcatctctcaaacaaaggttatgaggttgcgattgttgataatcttgtccgccgtgcttttgataaccaactcggtcttgattcccttacccccataacctccatccagaatcgtgtccgtagatggaagtctctcactgctaagacaatccagctctttattggtgacatatgtgattttgaattcctctcagaaaccttcaagtcttttgagccggatgccgctgtccactttggcgagcaaagatccgcgccatactctatgattgatcgttcgcgggcagtctacacacagcataacaatgtcattgggacacttaatgtcttgtttgccataaaggaatacagtgaagagtgccatcttgttaagctaggaactatgggtgagtatggaacaccaaacattgacatcgaagaggggtttatcactattactcacaatggaagaacagacaccttgccttatccaaaacaagccagctctttctatcatctgagcaaagtgcatgattcccacaacatagcatttacatgcaaggcttggggtataagggccactgatcttaaccaaggtgtggtctatggtgtcagaacagatgaaactgcaatgcacgaagagctatctaacagatttgattacgatggggtctttgggaccgcactaaataggttctgtgttcaggctgctgttgggcatccacttacagtttatggaaaaggtggtcagacccggggatatctggacatcagagacactgtacagtgcgtggagctagcaatagccaacccagccaaacctggcgagttcagagtcttcaaccagttcaccgagcagttctctgtcaatgagctagccaaactggtgactgcggcaggagcgaagcttgggctagaagtggagaccaaatcgatacccaacccacgagtcgaggctgaggagcactactacaacgccaagcacacgaagcttattgagctcggcctggtgccccacctgctctcggactccctgctcgactcgcttctcaactttgccatccaatacaaggatcgggtcgacacggcacagatcatgcccagtgtgtcgtggaagaagatgggtgccaagccacggacagtctctgtttagagggtgattcaacttcccctgggttataatatcaaccatggcattgacattattgacatatgtaatgtaataattatgcacgttagtatgatttgctaggtagtgaggtgtttattacgatattaaattatattgttgcccgtgcaacaaaaaagtacaaaaaagttgactatgctgctcactcgagccgccttgaggtcttacaatggtcctgagggttaagccgtcc

SEQ ID NO: 46348 - DNA, 322 bp, Zea mays
  Clone ID: MRT4577_142275C.1
gttcgttgggaaaatggggttaaatcaaatctttcgccgatgaaccatcgtcggaaatgttcacatgcatgcgagcaccttctgagcgaacaaaaatagcttaccaaggatccttttagagaagaaagacaacaaagccttttaacggcccgaacaataataaaccacacatgggggccaccacaaaaaatggaagcatacaccccctatagccatcacatctacatgggccctatggtagtgcctaaaatggaccaaaggcgatgtaacgaccatgtgtctgggacccacaccctcggtacgaccacccacgctagcgctg

SEQ ID NO: 46349 - DNA, 416 bp, Zea mays
  Clone ID: MRT4577_142276C.1
acgatcgcgagcgcaagcacgtacgttgtcggaagctcaagttagaagaagcaccagtgcctgatcgatggcggcccaggctctcctctccggccggcagctgctgggccgccccgtgcagtcggccgtctctaggtcgtcggcgaggaaggcgcccttcgtcgtcagggccagctccagccctccagccaaggtctgtgcgccgtaccctactatagctagtaatccgtccgtcgtcaatctcaacgatggcaagctcgttcgttcttgagaggactacgtactgctgagtgctgactcgattgttttcgtttcgcagcaaggtgccgacaggcagctgtggttcgcgtccaagcagtccctctcctacctcgatggcacgtacgtacctgcgctcgttgcccgccccgcgcgca

SEQ ID NO: 46350 - DNA, 373 bp, Zea mays
  Clone ID: MRT4577_142277C.1
actttgacgcgtgggcggacgcgtggggcaccttgtttggaaacaaaccatgggtggacgaagaagacgttaagtagctcttagctactctgaacgatgtgtgtgtgaatagatgaacttttacggattccactccactcggggactcttgtttgagtttccactggtgcagactctatcgaggatgcttgttgttcatttggtcggtctactgactgttgctgctcagtgcacataggatttttctgtgaactgtttagggctaattggcgataggggactgcctaagctatcttggtgattctgctcctggagtgatgtttcagttcctcgatgatggttctgatgtggaacgttccatgtttcgtacttt

SEQ ID NO: 46351 - DNA, 429 bp, Zea mays
  unsure (1)..(429): unsure at all n locations
  Clone ID: MRT4577_142278C.1
tccgccccgnncgtccgcccacgcgtccggccatgnagnacggcngctcaaggccgcgnacggccgcgnnaccttcgnngcgggtcgatgnnctggtgctgtnnccgggctnngatcctggnnccggcaccgtgnnatcgcgctttcacggtgnngccaccccnncgtgctggtgatnncttcagcccggtgctttggtgncccggccgcgcatcgcggccttggcgctttcatgggcggcnncgggtnntcgtcacgctttccgggcggccttcgnngcgtcgctttgcgctttgtccccgtgttcttccgtggnatttgtacaagnntacctgnacnngggcagagcacccccgcgcgggcgcccgnacnncagctggnacnncacggccaaggnncggaggcttggcnnngtccaagggggcccgc

SEQ ID NO: 46352 - DNA, 215 bp, Zea mays
  Clone ID: MRT4577_142279C.1
aacaaagacaagcggaagaaggaaaagggaacaaacatgaatattataaacagggctgggaacacagagactgatagatgcgaaaacgtgacaagacttgtgagatgatggactaacaccatctgcattggaaggcatggcatatgtgatcaataccgagatacctatgcagaactgaaggggcgagggaagcataagcaagcatatgagggaaa

SEQ ID NO: 46353 - DNA, 330 bp, Zea mays
  unsure (1)..(330): unsure at all n locations
  Clone ID: MRT4577_14227C.1
ccgtcatgcatccgcgaccccncgaggccagggcgggtacaataaacgggcgggggggcacaaccaactcacagaagaaggaccggcacccgcacaccccccacaccacacacggccagaggtacacaaaaggaacagggcccggaacacaagagcgcgaacggcccgcgccacgcgcaacaggaacaccacgaacaacgacgccccagactgggggcacaacgagcaaaaacagccacccaggcgaccagggcaaagaccggatcaaactaccgcagaagcagagcctcgacaaaggccatgacacaaaaccacacagtgcccgcgcgg

SEQ ID NO: 46354 - DNA, 673 bp, Zea mays
  unsure (1)..(673): unsure at all n locations
  Clone ID: MRT4577_142280C.1
ttttaacattcctcgcagatccccttccgctgctatctatcgaccctccgtccagtctaccatcaattcttctatactactcagcttacatcatgatgaactcatctataatgctgcctacattggcaccccctccaaagaaatacctcgctgctgaagaaccgacagcgcccattggaaatagactttccactctcacatgtccacagacgacctcagacacgtcttcccctccgtgacctccaattctgctcgacatggtgctctccaggacatcaatggcgtgctcctacatccatggagaccctgaaccagaagactcctgacgggaaacacatctgtagaagtcctcacagatctacacatcctccctgttgtcccggataacatgggaaccattgatggtgtcgacaatgataagaacaccaccaaccaagggcatgacgaccttaggatccgtcactacatgtactaagatcgtccatcgcccactttgccaagaggcgcggtgtgctcaagatcggcgccaccgagtcctcacagcttgacatctacctgagagctcangctctggctcgctatgccatcatcagtcatgagaatggtctgtcgccaatctggagatcctgacatccctgtggacggccctgctgacattgatcactgagctgac

SEQ ID NO: 46355 - DNA, 560 bp, Zea mays
  Clone ID: MRT4577_142281C.1
gcgtgcccgaccgccgcgacacctaccacgtcgtgtcgctggccttcggcgcgctctccgacgacacggccttccccgcgtgcgaggcggcgagcgccacgctctcgcccgccgtgctcgcgctcccgcacctccgctccctcttcttctaccgctgcttcacgggcaacccgcagcccgtcgcggcattgctcggccgcctcggccccgcgttccgctccctcgtgctccgacagaacggccacgtcggcccgatccccgcggagctcgggaacctcaaggagctgcgcgtgctcgacctccacggcaaccagctcacctccgccgtgccggccaccctccagtccctgagccacctccagctgctcgacctcagctacaaccgtctcgccggcccggtgccgcgcttcgagttcccgcgcctcagcatcctggacctcagccacaacgcgctccagggtggcgtgccgtggagcctcggccaatgccgctctctgctgaagattgacctcagccagaaccgcctcaccgggacaatccctgacgcgctcggggacttg

SEQ ID NO: 46356 - DNA, 491 bp, Zea mays
  Clone ID: MRT4577_142282C.1
caagcaagcatcccccaaaaatataatcttttaattctctcctaaccaagggcagaaacagtctaataaaggcccttttaaacggacactggatttgcccctgaagaaatgctcaacatccccaattggatgatccccctaccaagaacaaaggcagttggggttccatcaccagccgagtaattcgtttggctagcaacttcacaaataaaggaagccccagctttctccaggggatcagcaagctaaatagcgcgggcaagggaaaccccatcattgaccacttggggggttccaaactcatccaaaaaacattccttcctttgggtccgagggggaccccaaccgggggggcaagcttttcaaccccggcctaaagggcggctctggacccctggtaaaaggcaatctccttggcggaggcacccacaaggagctgcgggcaacggcgggcaacggttggcaccctggcggtaacggatgaggcggcc

SEQ ID NO: 46357 - DNA, 1454 bp, Zea mays
  unsure (1)..(1454): unsure at all n locations
  Clone ID: MRT4577_142283C.1
cattgggtacctcgaggccggccgggagaagtcgaccggcatcacagttcacatccgacaactaatcagtccatcgcgttcgcgtccacggtcagttgccggcgccatccctgttccctgcccctgctcacccctccccgcctggcgtccacgatcggcgacggcatgtctcgcgacgcccatctcggagtcggagtcggagtcgagggagacgccgccaaggaaaagaacggcgccgctgacgaagaagtcgggtccaggtcaggcggcggcggcggcggccacaagctgtccctggtgccgctcatcttcctcatcttcttcgaggtggcggggggtccctacggcgcggagccggcggtgcaggccgcgggcccgctgtacgcgctgctgggcttcctcatcttccccttcatctgggccatcccggaggcgctggtcaccgcggagctctccacgccgatgccgggcaacggcggcttcgtgctgtgggccgaccgcgccttcggcccgttctcgggctccctcatgggcacctggaagtacgtgtccagcgccatcaacggcgccgcgttcccggcgctgtgcgccgactacctggcccgcgtcgcgcccgccgtgtccgggggcggggcccgcgtcgccaccatcgtcgccttcaacgtggcgctcacgttcgtcaactacacggggctcaccgtcgtgggctggtccgcggtggggctcggcgtggcctcgctctcgccgttcctcgtcatgtccggcgccgcgctgcccaagatccgcccgcggcggtggcgcgtcgtcgccgccgagagggactggaagctcttcttcaacacgctcttctggaacctcaactactgggacagcgtcagcaccatggccggcgaggtggagcggcccgggaagacgctccccaaggcgctcgtgtccgcagtctccatgacgtcgctcggctacctgctgccgctcatggcggccactggcgccatcgacgtcgcgcctgacagctgggggaacggcttcttcgccgatgccgcaggcatgatcggcgggcgttggctcaagtactggatagaggtgggcgcggtgctgtcctccatcggcctctactcggcgacgctgagcagcgcggcgttccagctgctggggatggcggacctgggcctgctcccgcgcgccttcgcggcgcgcgcccccgtcttccgcacgccctgggtcagcatcgtggccaccagcgccatcatcctcggcatgtccttcctcagcttcaacagcatcgtggcggccgccaacttcctctatcgcctgggcatgctcctcgagttcgccgccttcgtctggctccgcgtcaagcggnccgccatgccccgcccgtaccgcgtccccgcgcgcctgcccgccgncgtcgcgctctgcctcgtcccctccgcgttcctcgtcttcgtcat

SEQ ID NO: 46358 - DNA, 331 bp, Zea mays
  unsure (1)..(331): unsure at all n locations
  Clone ID: MRT4577_142284C.1
caaaacganagaagaatatggacacagtgaagtggtggaatattattgcaatcctagatttctaatgaagggacctaatacaattcagtgtgttgatggagagtggacaactttaccagtgtgtattgtggaggagagtacctgtggagatatacctgaacttgaacatggctgggcccagctttcttcccctccttattactatggagattcagtggaattcaattgctcagaatcatttacaatgattggacacagatcaattacgtgtattcatggagtatggacccaacttccccagtgtgtggcaatagataaacttaagaagtgc

SEQ ID NO: 46359 - DNA, 322 bp, Zea mays
  Clone ID: MRT4577_142285C.1
aaaccccccacaaaaaggggggggaaaataaacctgtgggaagatggcttaattaccaacagggaaaaacttaaaacccaccccacaaccacaatggggggggccaaaacccccaaggggggggggaaaaaaaaaaaagaaaaaggcctcatttttcttctagcccgtccaatacaatacaatccccagggcatattacaggccccacaacagtccttgtttaacagggggccatttccaaaacccaacaacccgggcgggcaccgggcgaaaaaaaaaacaaagaccccccgacccctgggtccccccggaaattccggac

SEQ ID NO: 46360 - DNA, 844 bp, Zea mays
  unsure (1)..(844): unsure at all n locations
  Clone ID: MRT4577_142286C.1
agaggaaagacgancacacggcgtgcgtccctaggctccacccccccccccccctccccccactccatctccatctccatctagtcttcttccccgaaagggagaaagcacttgcctccgatccagcaccaccagtatgcaagccatcaagaagacgatcgttctgtaccccggtctcttcgtcagccacttcgtcccgatgatgcaactcgctgacgtcctcctggaggagggctacgctgttgcggtcgcgctcatcgacctcaccatggaccaggacgtcactttggcagccgccgtcgaccgcgtcgcctccgccaagccgtcggtcaccatccacaggctccctcggatccagaaccctcccgcgatcacggactgcggtggcgacggactcctctggtacttcaagaccgtgaaacgctacaacgatcccctccgtgagttcctctgctccctgcagcagcagcagcctgcccgaagcgtcgtccacgcggtgatcctggacgggccctccgccgacgcgctcgacgtcaccaaggagctcgggatcccggcctacaccttctacgccaccaacgcctccgncccgtcgcggtgttcctccagcttccttggacccacgcggaaggccagccaagcttcaaggagctcggagacacccctctcagcatctccggcgtcccacccatggccggcgtcgtacctcatgccaccgatgctcgacgacccggccagcgagacgtacaagacgatgatgcgtgtgtcgcgccggaacccggagcccgaaggcatcttggtgaaacgttcgcgtcgctggaaggcccggtgctgaaagctctca

SEQ ID NO: 46361 - DNA, 587 bp, Zea mays
  unsure (1)..(587): unsure at all n locations
  Clone ID: MRT4577_142287C.1
aattcggcacgaggccctcccccacacagagtgacagcgcgcaccaaaccaaatcccatcgcgagataacaaaaccaggccaacggattcttttggctgcggtggcgttgccggtgccggtgctgcagcagctgctgttggtgccctgtcgctgtgccgccgccgaggtcggctcgcgtgtccggcggcctaaaccctagccggcgctggagccgctgaggcgggcgccctgcagcacccctcgtctgtctcggccaggtgcgcgcccggccgcgccgctcgaatcgccggattcgagcttcggcgcgacgtggaacgggccggcgccgcggaggggatgctcccccgtcccttctagattcccgcggatctcgctggcgtgcttgggggtggggtgaaacgatgcccaggtgagtacatgccgcgcgcgatcttctagtggttggtgcgagtggtggacgaccaagatgatgccgtcgggtccgccgaacccgatggggcacgggcagccagtgggcggcgcagccccgtcgctactccggacgagttcttccctgctcagtggcggnggtcagcccggtatgggc

SEQ ID NO: 46362 - DNA, 1201 bp, Zea mays
  Clone ID: MRT4577_142288C.1
actcctaagggcgattgggccggccgaggccggccggggcctcggccggcgtcgccacccgcaccccgcctcatccatccaccaatccaccgcctttcgcaggattgcgcttgctaccccgggtccccaccacacgcacgcgagcccgcggccaccacctcgatgccactgacgggctggaatccgctggcgcccgtcctccagaccgtcgccgctttctcccgccacatcctcatcgcccccgacgccgggctcgacgaccaccgcctccgcccccttctagcgctctccctctccccgccttcgccggcaccaccgcaaccggaggtccggaaggagaagaaggatgccaaggaggcgccactgacgaaggaggaggtcggccgggccacgtggatgctgcttcacaccatcgcagcgcagttccctgacgaacctacgaggcaacaaagacgggatgcaaaggagttgatgcatataatctcgagactatatccttgcaaagaatgtgctgatcacttcaaggaagttttgaaagcaaatcctgtgcaggcaggatctcaggctgatttctcccagtggttatgttatgtccataacgtggttaatcgaagccttgggaagccaatatttccctgccaaagagtaactgcacgttggggtaaactggattgtcctgagcgctcgtgtgatctagaaggcagcatcgacatcatgccaaaccgatgacatggccaagaaatcgcttgaactttctacccgtagatgatttcatttcaataccactcattgatgagcacttgagcaataccagggagataagaaagagaattcaggactccgtgctgacatagcagggcgtccatatgcttctgtatctttggcgttggaccgttggtagtaaaagatatgaatgtctcgtgatatttgtacttgtctatgcctagtctgatgtctgacgactcttccataacccataccagtccgtgcagattttcatttttgtgcaaccgtcttatgtctgagcagtttttttataatatcacaggagtcagaagtgtactcccctttcgaggggaggaagatgtgtcgtcctttctaatacttaaatttctgtatcacaggagtcagaagtgtactcctttctatatagaattctggaaaacaagatgctgatgacacttctactagagggatccat

SEQ ID NO: 46363 - DNA, 155 bp, Zea mays
  Clone ID: MRT4577_142289C.1
tcctccgattagcgtagagctactggtttttagatcagctagggatgtcaacatagtatgacacgtcagagctactgtagacagagttagataggaggcaactacggtctgataaatactacaactttccaaccaaaccctgactattatagtgc

SEQ ID NO: 46364 - DNA, 2928 bp, Zea mays
  Clone ID: MRT4577_14228C.1
gcgccaagtcccggaggcggaggcggtgatctttgttcgtttcctcgcctctcctctcctcccctctcctttcattccctgtcccgtggacggcaatggcgggcaccgcgcggcttcttcctgccgcggcggcggcgctgctgctgctgctctgcatcgcgggcggcgcgcgggcggccaacgtgacgtacgaccaccgcgcgctggtcatcgacggcgtgcggcgcgtgctcgtctccggctccatccactatccgcggagcacacccgacatgtggccggggctgatccagggggtgccgtgctgttattgcctctcttttgtgacacccatcctgacggcaacgaggttcgccgacatggcagtacgacttcgagggccgcaaggacctggccgcgttcgtcaagaccgtcgccgacgccggcctctacgtgcacctccgcatcggacccgccgtctgcgccgagtggaactgcagaggcttcccgctgtggctgcacttcatccccggcatcaagttccgcaccgacaacgagcctttcaaggcggagatgcagcgcttcacagccaaggtggtggacaccatgaagggggcggggctgtacgcgtcgcagggcgggcccatcatcttgtcccagatcgagaacgaatacggcaacatcgactcggcgtacggggcgcccggaaaggcgtacatgcggtgggcggccgggatggccgtctcgctcgacaccggcgtgccctgggtcatgtgccagcaggccgacgcgccggaccccctcatcaacacctgcaacggcttctactgcgaccagttcacgcccaactccgccgccaagcccaagatgtggaccgagaactggagcggctggttcctctcgtttggcggcgccgtcccctaccgccccgtcgaggacctggccttcgccgtcgccaggttctaccagcgcggcggcaccttcccacgcgtctgcatgtaccatggagggaccaacctcgaccgcagctcaggggggcccttcatcgccaccagttacgactacgatgcccccatcgacgagtacggactagtcaggcagccaaagtggggccacctaagggatgtgcacaaggccataaagctctgcgaaccagcgctcatagcaactgatccgtcatacacttctctaggtccaaatgttgaggcagcagtatacaaagctggttcagtttgcgcagcattccttgccaacatagatggtcaatctgataaaaccgtcaccttcaatgggaagatgtacaggcttcccgcttggtctgtcagcatcctccctgactgcaagaatgtggtacttaatacagctcagatcaattctcaaacgacaggttcagaaatgagatacttggagtcgagcaacgtcgcatcagatggctcatttgtcacgccagaactggcagtatctgactggagctacgccatagagcctgtaggtatcacaaaggacaatgcacttacaaaggctggactgatggagcagataaacaccacagcagatgccagtgatttcctctggtactcaacaagcatcacagttaaaggtgatgaaccctatctaaatggcagccagtctaatctggcagtcaactcacttggacatgttcttcaggtctacatcaatggtaaaattgcaggaagtgcacaaggtagtgcaagcagctcactcatctcatggcagaaaccaattgaacttgtacctgggaagaacaaaatagatcttctaagtgcaacagttgggctgtcgaattatggtgcattctttgacctggtaggtgctggaattactggcccagtaaaactgagtggactaaacggtgcgctcgatctgtcttctgcagaatggacatatcagattggactcagaggagaagatttgcacctatatgatccttcagaagcttcaccagaatgggtctcagccaatgcttatccaatcaatcatccactgatttggtacaagaccaagttcacacctcctgcaggtgatgatcctgtcgcgattgacttcacgggaatggggaaaggtgaagcatgggtgaatggacagagcattggtcgatactggccaacaaatctggctccacagagcggttgcgtcaactcttgcaactatagaggagcctacagttcaagcaaatgcctcaagaagtgtggccagccatcacagactttgtaccatgttccccgttcgtttctccaaccaggcagcaatgatctagtccttttcgagcattttggtggtgacccaagcaagatatcctttgtgatgaggcagacaggaagtgtgtgcgcacaagtatcagaggcacatccagcccaaattgatagttggagttctcaacagccgatgcagagatatggacctgcacttcgcctggaatgcccaaaagaaggccaggtcatcagcagcatcaagtttgcaagctttgggacaccgagtggcacatgtggaagctacagccatggcgaatgcagcagcactcaggctctctcagttgttcaggaggcttgcatcggagtgagcagctgcagcgtgccagtgtcatcgaattattttggaaatccatgtacaggggtcacaaaaagccttgcagttgaagctgcatgctcgtgacatgtctgattaatattggttcataggaagcaaatcacctaggacaaggtgaaaccttctctgtaggcaagcaggcaaaaaggaataaatgttcccatcctgatcaaaaggaataaaaatattctgaaaattgccacatccaagctattagatggtatgcttaggaagtattgttattgttaagatataaatccatccatcatgacaaagaaggtgatctttttgtaatccttcttgaaaaaatagaatgatttgaatttcgacaagttacccctc

SEQ ID NO: 46365 - DNA, 277 bp, Zea mays
  unsure (1)..(277): unsure at all n locations
  Clone ID: MRT4577_142290C.1
ggctcttttaccacacaaccggggccataacgactttttaggactctacgagatctncagcttccaaagcaaggcgcacaccatgcacacgctgatcagactatagtgagtgcactgcagcctttgcttacgatggacttctacacgccggggtctcacaagacgaccagcaccatgcacctctactacgacgcatacgacacgggactcgcattggccacccccatagcatacggtcagtatgccacaacggcgcactagaacgaacgtcgaccat

SEQ ID NO: 46366 - DNA, 436 bp, Zea mays
  Clone ID: MRT4577_142291C.1
acattcaccattcctttatttgtttatatgtttacggggggggaccactggtcacaaagaacaccaagaaccagcccggacccttgggccggcgcgggacccccagcccgggaccggcgccccggcccacgatggctttgcagcaaccaaatagggggggtgcttgacaagcccaaaaacgatgccggagagcaagggttgaccgacgagaattccacaacccccccgagcgcgaaaccaaaagccaaaaaccaggggggcaaaatgttggagaaaaagcaagaacattgagggcctccaaaaaaacccctacaggccggggaacacccccccccacttcggcctgtaaaaaacaactcaccccgggggggccctagggcgtatcacccccccatggggggggtgcaatcccaccggacccttacaagagccaaac

SEQ ID NO: 46367 - DNA, 620 bp, Zea mays
  Clone ID: MRT4577_142292C.1
gttcctacagtacaaaataaaaatgcagagataattacaacagatttacatgcctagcatccggacttgatacacagaaaatgcaacagatttacgacgcgtagatgggttcctacagtatcaacgccagaagacccttgtaattacaacagatttacatgcctaggggtttccatatttcagagcaaataaaaatgcagcacagataattgcgtccggactaaaaaatcccattctttttaccgaaactattgtcagctcgggtattgatcgaagaccgggtctccataaaatccccatgccagtagtttttgccgttccccttcacaacccattccaacaatccattcgtcggaggcccttttagttttagcagcaatacaaacgtccctccatttgcatttccctacagtctttggacggggatctcttctactagggattcagttggggcccaatcctgcctcatccacttccttccatcagttaggggaatcccccaaaagcagttcttagcgctgaataccttctttgcgagacttggcggtcccacaacgggccgaaatggccatcggaaagcagatccatttttctgatagagaaaaaagccactttctcga

SEQ ID NO: 46368 - DNA, 753 bp, Zea mays
  Clone ID: MRT4577_142293C.1
gtctcgcaaaccctaaccctagcaagcccgcttcgctcctcctcctccaacaagatctctctccgaatctttggatgcaccggctccgatgtctgccccgccgccccccgcctcctccgatgatgatggtaagcccgccgacgaggagggcgtagagatccgcgaggtatgggcgaacaacctcgaggcggagttcgccgtgatccgtgacatcgtcgacgattacccgtacatcgccatggacaccgagttcccgggcatcgtgtgccgcccgctcgggagctttcgctccaatgacgagtacaactacgccaccctcaaggccaacgtcgacatgctgagcctcatccagcttggtctcaccctctccgacgagaacggcgcactcccggccaggggcaccggggggcgcccctgcacctggcagttcaactttcggggcttcgatccgcgctcagaccccgccaacgctgactccatcgacctgctacgcaacagcgggatcgacttcgaccgcttcaccaccgagggtgctgacacaggccacttcgccgagctgctcatgtcgtcgggcgtcctgctcaacgctgagctccagtgggtcacattccacagtgggtacgacttcgggtacctgctcaagctgctaaccgggcggaacctacccgacaccatgcctggattctttgacctcatcagaatctacttccctgtgctgtacgacatcaagcatctcatgaagtactgcggcag

SEQ ID NO: 46369 - DNA, 383 bp, Zea mays
  Clone ID: MRT4577_142294C.1
cccattcattccgggaacgggaccagggtcatattggatttgctaaccccttaccataccatctgaagggctagttttgttttggccatacatacaaacaaccagatccagtcaactacccccgggggtctacacaacacagttggacagggatcctaaaacccccatttcccttgggcatgctgggggcatgaccaggcgattttttatacagcaggggggcgagggttatcattggcagcagggccgaaaccaaactgttgccctgtaccgtttgtagttacaaaagggggcatcccttttgcacctttttctccctttttttttgcttggggggcgggaaaaccaccttaattgttgggtaaaacactgcttttatgttc

SEQ ID NO: 46370 - DNA, 387 bp, Zea mays
  Clone ID: MRT4577_142295C.1
aaagatcattacccgttgccgttcgtcgacaaaatgctcgagcgtctagccaagcattcttacttctgcttcctagacggctactccgggtttctgcaaattccgattcgaccggaggatcaggagaagacgactttcacatgtccttatggaacgttcgcatgtcgaagaaataccttcgggctctgcaatgcaccggcgactttccagagatgtatgactgctatcttctctgatttcatcgaaggaatcatcgaagtattcatggatgatttcagcgtatgtggaccttccttcgatggttgtctagacaacttggctaaagtcctccagcgatgcgaagacacgaacctcgtcctcaactgggagaagtgtcattttatggta

SEQ ID NO: 46371 - DNA, 357 bp, Zea mays
  unsure (1)..(357): unsure at all n locations
  Clone ID: MRT4577_142296C.1
gaagcncggaanncggcncgaggagcacaagacgancattttagattttcgngacncgcnnannacgcccggacaaagggaggnggcncancanccaccaaacagccgccgaagaggaaccgcngagccacccaangaccnngangancacnggcanacaaaccncncannaagncnggaagacagcacnacaccgccgaaaggngcaggagagaaagnacgnggaaacggagagccacgngganaccggaccnccggccgaggaagnaaaaaggaaacaagaggacnnagccgcggcccaaggcgcnngcngcanncaccaaccgnccgaagcggagagggagagagccaaacaac

SEQ ID NO: 46372 - DNA, 391 bp, Zea mays
  Clone ID: MRT4577_142297C.1
cccacgcgtccgccgcgagaaccctcccacattgacaagacctaaaacatccgctagctcacgaggactgcaccacgggagaatcggtcgtcgtcgttgggatgacttcgcggtggctgctcctcggtggttctggggattatcggaggcggagggcgtgccttagcagggagcacgttgcgaccggagcaagttcgccggagaagaacatgcggtcgaagaggagccgcctaacgaggagttcgacttgatcttggtggcgtctcccagtcagcttttgtgtcgccggggaaataatatttagttcgttttatattaatcattcattttgtaagacttatgctatgtaataagtacatttataatatttatgacatttatctctatgcac

SEQ ID NO: 46373 - DNA, 361 bp, Zea mays
  Clone ID: MRT4577_142298C.1
gtaaatttcaatccagcagaacaaatccgggcgggctttataacacagagggctgtccacccactatcttctggcacacacttatttcgttttcctgcttaacaattattccacccttcacatttgttttctttttctatttatactgatcctaatttatacctatctcattatgtttttgttttaagtcattttattttatactgtaccctttatttatttttaattcatttttaaccatattcttaaattttaacttttatatataccttttttttttatttgtatattttatttataatttttatatttcttttcattttttttctttttaattattatttttaatctaaattttttt

SEQ ID NO: 46374 - DNA, 191 bp, Zea mays
  Clone ID: MRT4577_142299C.1
gagctctctagtcggcggccgcccttgctcggtgagcgtgtctcggggccgggattctgatttcttgggcggaggcgggtacccggctaccctgaccttgtggccgaccacaccttcagggaagccatatgggatgaccatcatctccatcttgagcgcgcccggcacatcccatagcggaggagaatttt

SEQ ID NO: 46375 - DNA, 1728 bp, Zea mays
  Clone ID: MRT4577_14229C.1
ggtaaataaccttcactatagaaaacatgaaatataccactccattttgcaatgtgacctggtcctggtgtaacagattttataacataaatttcccttcaccttctctgttcgtacagaattatggtgcattctttgacctggtaggtgctggaattactggcccagtaaaactgagtggactaaacggtgcgctcgatctgtcttctgcagaatggacatatcagattggactcagaggagaagatttgcacctatatgatccttcagaagcttcaccagaatgggtctcagccaatgcttatccaatcaatcatccactggtttggtacaaggtcagtatggaattcaaatgatcatacattcatagaccagggaaccaatccatatgagacatttaaacacagccagtatggcttaaaaaaacaagatatatacattctatttgtttggctaacccatttctcgagttgctaccttgggttgatgtgctaactgtaatttccaaaacagaccaagttcacacctcctgcaggtgatgatcctgtcgcgattgacttcacgggaatggggaaaggtgaagcatgggtgaatggacagagcattggtcgatactggccaacaaatctggctccacagagcggttgcgtcaactcttgcaactatagaggagcctacagttcaagcaaatgcctcaagaagtgtggccagccatcacagactttgtaagacttccacatagccccccagacaatgctctataatattttcattagttccttttgttccctacctgcagagccagttctattatttcatctgtgtcaattttgtgttcagctctgtctgtaacttataggtcttaatagcagatttacaccctactagatttgaagtactgaaactatggcacaaaaagcatgcagtttcaaaattgcaatactagtgcacactgtaacgctgagcagtttgagcagcgtattctgatgttgcagagaaatatagcaactgcaagaactgaatgactattgattaattggatttgtaccttgttaaacaggtaccatgttccccgttcgtttctccaaccaggcagcaatgatctagtccttttcgagcattttggtggtgacccaagcaagatatcctttgtgatgaggcagacaggaagtgtgtgcgcacaagtatcagaggcacatccagcccaaattgatagttggagttctcaacagccgatgcagagatatggacctgcacttcgcctggaatgcccaaaagaaggccaggtcatcagcagcatcaagtttgcaagctttgggacaccgagtggcacatgtggaagctacagccatggcgaatgcagcagcactcaggctctctcagttgttcaggaggtaactacaagctacccattctcatgtttcaatgtatcaactgaattcttgtgggtcgctgacagtgttactgcgaactctgcaggcttgcatcggagtgagcagctgcagcgtgccagtgtcatcgaattattttggaaatccatgtacaggggtcacaaaaagccttgcagttgaagctgcatgctcgtgacatgtctgattaatattggttcataggaagcaaatcacctaggacaaggtgaaaccttctctgtaggcaagcaggcaaaaaggaataaatgttcccatcctgatcaaaaggaataaaaatattctgaaaattgccacatcc

SEQ ID NO: 46376 - DNA, 312 bp, Zea mays
  Clone ID: MRT4577_1422C.1
atcgaatttaaacatggatcaagggtacatattaggaatagctggcttggtcaagaaaccaaatatataggaaatgtttctgtccccaaaacatttacttacatttagttctgttaagggcacgttgatacggctgggacgtttaggggaatggataggggagattagcagagcttgggactgagggatggagcagattggatagggagatcggcgagaacagctactatcacccacgaccgatgaagccacgatgaccaaagccctctccgaaaggaaagcaacttcttcgatgaaatccctgcctttgat

SEQ ID NO: 46377 - DNA, 159 bp, Zea mays
  Clone ID: MRT4577_142300C.1
agagagctaccacagatacatattcctgatgcaaagagatggtggaatgccatgtaggatgagtataccaatgtaatagtaatctcttaactcttcaagagatcaatatgtaataccaagtcattctccatttttggagcttctgacagaacaattaaa

SEQ ID NO: 46378 - DNA, 4593 bp, Zea mays
  Clone ID: MRT4577_142301C.1
aattccgaatggcgggctccccaacccaatcctccagctgcggaatggcggcggcggagccgtgctgcatctcgcacgcgttcgagcgcgccactcgccaggaacccggccgcctcgccgtcatccacgcagcggcctcgggcgccgacagcgaggagcgccgcttcacttgcggcgacctcctcgccgccgtcggctccctctcctgccgcatcgcctccgcgctcggcagcaccgccaccgatacccgccgcgaccgcgagcaaggctcagggtttcgggccgccggcgccgtagtgccgagggttgtcggggtgtacgcctcgccatcgttggagtacgtcgccgccgtcctcgcggtgctcaggtgcggcgcggcgttcctcccgctcgacccgttgtggccggaggagagggtctcgtgggctatctcggcgtccaacgcggcgctcgtcgtgtcttcagttgggtcgcgaggagccacgctgtttgagagcagcgcctgccctgttctgcgcttttatggtggcatccggcggcgatttcgggatggaaatggcggggatgacggggaggagcttgtctggccgtgcgagcacgagtggcaccgcaagttctgctacgtgatgttcacctctggttctaccggaaaaccgaagggtgtttgcggcactgagaaaggtcttctgaatcgttttttgtggatgcaaagaaggaatcctctgtgttcagatgatgttttgttgtttaagacatctgtcagctttgttgaccatctacaggagttcctttctgcggtcttgacttgctcaacacttgtcattcctcccagtgagtggagagctaatccagcatccttggccaacttaattaaggtttatcggatatcaaggatgacattggttccatcacttatggagataatactacctaccctggcggaaaaactttctgatggctgtaacccacttaagatcctaatatttagtggggaagttctgtctgtatcgctgtggaagagagtctatgaatttctgccagaggctactatcataaatctgtatggaacaacagaggtttccggtgactgtgcattctttgattgcaaaaaattgcctacaattttggagcaagaagaactaaacagtgtaccaattgggtttcctatttcaaattgtgaggtttctcttgtcaccaatgatggactatcagatgaaggtgaaatctctgtcagtggagcatgcttgtttactggatatttagctgatcccatgacaagtaactgccctgaaggcagtgaagttttagcatactacagaacaggtgactttgcccggcgcctaaagacaggcgaacttattttccttggaagaaaggaccgaattgttaaaatttatgggcaccgtttctcacttgaggaggtagaatccacattgagggatcatcctgatgtcagtgacgctgctgttacttttcaaagtaatggatctctggattttaaggcatacttggtgctgaggagtaataataaatttcttaaatgtactcagggttatagtggattacattcttcccgagatatcattgcaccacttcgaaactggctcatcatgaagttctcacattctccttgcagcatctgtattcagcccatgtggaacctttgccactgtccttgcaagactggtcagtcatgccgctgttcccttcagtggaaattaactgataggaagaccagtgatttgcggagactgtaaaaattgttccacatagatctatactatttcctaaaaggagtttatgacagggacaatattctccaagaaatggttcgagtcgatccagcttcctgcaccagaaatgtactagtctctaggagtagaagttttttctttgcattaggtttcatatgtattttttcacttctcttgcatgcttccagaaacctcgctgggaatgcacacatttttcatctcctttggttattagtagggatgccaacgtggaattatatgccgggttttggctctcctttggcccagtttctgaatatttggacagtaactttcatgaccaagggcagataagtaaagagggtgcatacgatcactttgcagggaatcattggcagaccatggatactaaattttcacttacaaaaggtgtggtctattggccgttgcaatagatttatgcatggttctgaagggatggtacaccttgaagatatttgttcatatgttccatataacaaaaagggttacctcgtgaaaatttggagcattcttctagattcatgtgttgatgcctcacctttgcttgtcataaacaatggaatgatgtccatctttattggttctcattcatatttgtttctttgcattgatggttataggtgagtgttgcctattacatggaattctatgcttctttttttctgatgtacctcatgctctatttttctatcatttaagattattgtatcagtaatttgtttaaattatatttgatgagaaaattagtaccatctggtgtgtggatactgacttttcttagaacttgtttcctattggttttgtagtggttcagtgaggtggagtgtcaaattggaaggccgtatcgagtgttctgccgctataactggtgatttctcagaggttgttgttggatgctataaagggaaaatttacttccttgatatgtctacgggaaaattatcctggacctttcaaactgatggggaggtaaaaatgcaaccagttgtggacaagatgaggaatttaatatggtgtggctcgtatgaccattacttgtatgcgttaaattacaaagatcgctgctgcacatacaaagttttttgtggtggaagcatttatggatctcctgctattgacatggcacaaaatgtaatctatgtcgcatctacgagtggccttgtgactgcagtatcatttaaggaaccatccttcagagttctttggcaatatgaagctggtgcgccaatttttggttctctcgccatagatcatcaaagtggaacagttatttgttgtttagtgaatggcctagttatgacattgaactcacaaggttctgttgtttggaaggcaactgttggtggtcctatttttgctggtgcatgtttgtcacccaccctccctcatcaggtgcttataccttcccgtgatggcaacttgtactcttttgatactgtgtctggtgcccttctttgggtatacaaggctggggatccaattactgcatccacttttgttgatgagctgttaacatcagtgtcatttggaccatctgagagatttgcttgtatctgcacgagttccgggaaggtccatgtcatcagaattagagtagacatcagaactagagtagatgctaagtacaatcaggagcaaggtggtgacggtgttaaatctgaggagttagttcaaggactggatgctaagtacaatcaggagcaagctggtgaaggtgctaaatctgaggagttagttcaaggactggcatccattgatcttccgggggacatattttcgtctcccttgatggttggtggacgcatctttgttggatgccgagatgatcgattacattgtctcaccgtcaccacatagtttcaagtgattttgctggaggtgatatagttttgcccatgcctgctgcccgacaacctctcttccgcgacaagggcctttggcctttcctattggtaaggtgcgtggcaggctggcagcacaacacaggccacgaatgagtttggttgaagctcctgattgcatttggtgatttgggtctccaatgattgctttccatgtctacacaagaagctttccacagcctgctctcgcctaagcaagtgctacttgatgtcttgatcaaagtgagtggaaacctctcaacctcacattctccttgcagcatctgtattcagcccatgtggaacctttgccactgtcctgcaaggctggtcagtcatgccgctgttcccttcagtggaaattaactgataggaagaccagtgatttgcggagactgtaaaaattgttccacatagatctatactatttcctaaaaggagtttatgacagggacaatattctccaagaaatggttcgagtcgatccagcttcctgccccagaaatgtactagtctttaggagtagaagttttttctttgcattaggtttcatgtttttttacttaccttgcatgcttccaaaactctcgctgggaatgcacacatttttcatttcctttggctattagtagggatgccaatggagaattccccgtcgggttttggctcccctataaaaaacgatccccccggggatccctacgaactcttcctaattccccgttctctcgcggggataaattcccgtcggggatctctgtccccgtttaaattataatcatgatatacttttttttgttatgaatacaaaatattgtcacttgtattgtaatcctaatacttttttttccgttagggttttaaaaaaaaaaaaaaaaaaaaaaaaaaaaaaaaaaaaaaaaaaaaaaaaaaaaaaaaaaaaaaaactcgagaggggg

SEQ ID NO: 46379 - DNA, 2623 bp, Zea mays
  Clone ID: MRT4577_142302C.1
aattcggcacgagggcggcgcggcgttcctcccgctcgacccgtcgtggccggaggagagggtctcgtgggctatctcggcgtccaacgcggcgctcgtcgtgtcttcagttgggtcgcgaggagccacgctgtttgagagcagcgcctgcccttttctgcgcttttatggtggcatccggcggcgatttcgggatggaaatggcggggatgacggggaggagcttgtctggccgtgcgagcacgagtggcaccgcaagttctgctacgtgatgttcacctctggttctaccggaaaaccgaagggtgtttgcggcactgagaaaggtttatcggatatcaaggatgacattggttccatcacttatggagataatactacctaccctggcggaaaaactttctgatggctgtaacccacttaagatcctaatatttagtggggaagttctgtctgtatcgctgtggaagagagtctatgaatttctgccagaggctactatcataaatctgtatggaacaacagaggtttccggtgactgtgcattctttgattgcaaaaaattgcctacaattttggagcaagaagaactaaacagtgtaccaattgggtttcctatttcaaattgtgaggtttctcttgtcaccaatgatggactatcagatgaaggtgaaatctctgtcagtggagcatgcttgtttactggatatttagctgatcccatgacaagtaactgccctgaaggcagtgaagttttagcatactacagaacaggtgactttgcccggcgcctaaagacaggcgaacttattttccttggaagaaaggaccgaattgttaaaatttatgggcaccgtttctcacttgaggaggtagaatccacattgagggatcatcctgatgtcagtgacgctgctgttacttttcaaagtaatggatctctggattttaaggcatacttggtgctgaggagtaataataaatttcttaaatgtactcagggttatagtggattacattcttcccgagatatcattgcaccacttcgaaactggctcatcatgaagtttccactagctatggtcccaaggctttttatccccatgaaatcattacctttgactttgtcaggaaagattgactatgtcaagttatctagcttggtttgtgcatttgagccttgtgaaattcatccagaaagcagtccagctgatcctcatatgcaagttatcaaaaaggcattttctgatgccctactggttcatgaagtgtctgagtatgatgatttcttctccttgggtggtaactcaattactgcagcacatgtggcccacaaattggagattgacatgagattactttatatttataccttcccgtgatggcaacttgtactcttttgatactgtgtctggtgcccttctttgggtatacaaggctggggatccaattactgcatccacttttgttgatgagctgttaacatcagtgtccatgtcatcagaattagagtagacatcagaactagagtagatgctaagtacaatcaggagcaaggtggtgacggtgttaaatctgaggagttagttcaaggactggatgctaagtacaatcaggagcaagctggtgaaggtgctaaatctgaggagttagttcaaggactggcatccattgatcttccgggggacatattttcgtctcccttgatggttggtggacgcatctttgttggatgccgagatgatcgattacattgtctcaccgtcaccacatagtttcaagtgattttgctggaggtgatatagttttgcccatgcctgctgcccgacaacctctcttccgcgacaagggcctttggcctttcctattggtaaggtgcgtggcaggctggcagcacaacacaggccacgaatgagtttggttgaagctcctgattgcatttggtgatttgggtctccaatgattgctttccatgtctacacaagaagctttccacagcctgctctcgcctaagcaagtgctacttgatgtcttgatcaaagtgagtggaaacctctcaacctcacattctccttgcagcatctgtattcagcccatgtggaacctttgccactgtcctgcaaggctggtcagtcatgccgctgttcccttcagtggaaattaactgataggaagaccagtgatttgcggagactgtaaaaattgttccacatagatctatactatttcctaaaaggagtttatgacagggacaatattctccaagaaatggttcgagtcgatccagcttcctgcaccagaaatgtactagtctctaggagtagaagttttttctttgcattaggtttcatgtttttttacttaccttgcatgcttccagaactctcgctgggaatgcacacatttttcatttcctttggctattagtagggatgccaatggagaattccccgtcgggttttggctccactatagaaaacgatccccgcggggatccctacgaactcttcctaattccccgttctctcgcggggataaattcccgtcggggatctctgtccccgtttaaattataatcatgatatacttttttttgttatgaatacaaaatattgtcacttgt

SEQ ID NO: 46380 - DNA, 1810 bp, Zea mays
  Clone ID: MRT4577_142303C.1
agggaatcattggcagaccatggatactaaattttcacttacaaaaggtgtggtctattggccgttgcaatagatttatgcatggttctgaagggatggtacaccttgaagatatttgttcatatgttccatataacaaaaagggttacctcgtgaaaatttggagcattcttctagattcatgtgttgatgcctcacctttgcttgtcataaacaatggaatgatgtccatctttattggttctcattcatatttgtttctttgcattgatggttatagtggttcagtgaggtggagtgtcaaattggaaggccgtatcgagtgttctgccgctataactggtgatttctcagaggttgttgttggatgctataaagggaaaatttacttccttgatatgtctacgggaaaattatcctggacctttcaaactgatggggaggtaaaaatgcaaccagttgtggacaagatgaggaatttaatatggtgtggctcgtatgaccattacttgtatgcgttaaattacaaagatcgctgctgcacatacaaagttttttgtggtggaagcatttatggatctcctgctattgacatggcacaaaatgtaatctatgtcgcatctacgagtggccttgtgactgcagtatcatttaaggaaccatccttcagagttctttggcaatatgaagctggtgcgccaatttttggttctctcgccatagatcatcaaagtggaacagttatttgttgtttagtgaatggcctagttatgacattgaactcacaaggttctgttgtttggaaggcaactgttggtggtcctatttttgctggtgcatgtttgtcacccaccctccctcatcaggtgcttataccttcccgtgatggcaacttgtactcttttgatactgtgtctggtgcccttctttgggtatacaaggctggggatccaattactgcatccacttttgttgatgagctgttaacatcagtgtcatttggaccatctgagagatttgcttgtatctgcacgagttccgggaaggtccatgtcatcagaattagagtagacatcagaactagagtagatgctaagtacaatcaggagcaaggtggtgacggtgttaaatctgaggagttagttcaaggactggatgctaagtacaatcaggagcaagctggtgaaggtgctaaatctgaggagttagttcaaggactggcatccattgatcttccgggggacatattttcgtctcccttgatggttggtggacgcatctttgttggatgccgagatgatcgattacattgtctcaccgtcaccacatagtttcaagtgattttgctggaggtgatatagttttgcccatgcctgctgcccgacaacctctcttccgcgacaagggcctttggcctttcctattggtaaggtgcgtggcaggctggcagcacaacacaggccacgaatgagtttggttgaagctcctgattgcatttggtgatttgggtctccaatgattgctttccatgtctacacaagaagctttccacagcctgctctcgcctaagcaagtgctacttgatgtcttgatcaaagtgagtggaaacctctcaacctcacattctccttgcagcatctgtattcagcccatgtggaacctttgccactgtcctgcaaggctggtcagtcatgccgctgttcccttcagtggaaattaactgataggaagaccagtgatttgcggagactgtaaaaattgttccacatagatctatactatttcctaaaaggagtttatgacagggccc

SEQ ID NO: 46381 - DNA, 195 bp, Zea mays
  Clone ID: MRT4577_142304C.1
ttgttcataccagccacagccaactcaggacgacgccgttatataggccgtgccagccagcaacctacagactcccctctagcatacctgtcaagcatcgagaagacatggacatagccctggctgccaagagttacattcccgcacgctagacaaaaatcgtgtagctcaccctacatacatagcaacagctct

SEQ ID NO: 46382 - DNA, 516 bp, Zea mays
  Clone ID: MRT4577_142305C.1
ttttcgcgtccggtttcaatgagaagaaaaatgcacatttttcactctgatgttgtacatttgacccagtttttcttgtgtggttcattctccacatatttattagtgtctgtccaaaatccataacttgctattaaaaatgcaggcaactgttggtggtcctatttttgctggtgcatgtttgtcacccaccctccctcatcaggtgcttataccttcccgtgatggcaacttgtactctttcgatactgtgtctggtgcccttctttgggtatacaaggctggggatccaattactgcatccacttttgttgatgagctgttaacatcagtgtcatttggaccatctgagagatttgcttgtatctgcacgagttccgggaaggtccatgtcatcagaattagagtagacatcagaactagagtagatgctaagtacaatcaggagcaaggtggtgaccggcgttaaatctgaggagttagttcaaggactggatgctaagtacaatcaggagc

SEQ ID NO: 46383 - DNA, 2119 bp, Zea mays
  Clone ID: MRT4577_142306C.1
ccggccgggggacgactctgcgcgcttcgatcccatccccccacagtcccacaccacctgcatatctccgtgcggccgtgccaagtcaaagtcgcacctcaggtctgccgaggttggcattggtggtggtgtggtgacccggcgatggcagcggagcgggatatcgacgacctgccgcggaacgacgccaactacacggcgctcacgccgctctggttcctcgagcgcgccgcgctgacccacccggccagggcctccgtcgtgcacgggcccgtgcgctacacctgggccgacacctacagccgctgccgccgcctcgcctccgccctcgcgcgccgatccgtcggccacggaagcacggtagctgtaatagccccaaacatcccagcgatctatgaagctcattttggagtgcccatggctggggcagtggtcaactgtgtcaacattcgactaaatgctgccactgtagcatttctcttggagcactcctcagcagaagttgtcatggttgaccaagaatttttcaccctggcagaggattctttgaggattatcgcagataaaaagaaaggcactttcaaacagccacttctaatagttattggtgacgcaacttgcgatccaacagccctccaagacgctttgagaaaaggagccatcgattatgaggcattcttggaaagtggagatcctgaatttgcttggagaccaccacaggatgaatggaagagtatcgcgctaggttatacttctgggacaacttccaacccaaagggtgtggtattgcatcacaggggggcttacctaatgtcactgagtggtgctttgatatggggaatgaacgaaggcgctgtttacttgtggactttgccaatgttccattgcaacggttggtgctatacatggacacttgctgctctctgcgggacaagcatatgtcttcgtcaggtttcagcgaaggccatcttctcagctatagccaacgagggcgtgactcacttctgtggggcaccggtcgtcctgaacaccatcatcaacgcccctccagccgacacgattctccccctacctcgtgtcgtcaacgtcatgaccgctggcgctgctccgccaccctctgtcctggcggcaatgtcgaagcttgggttccgtatcactcacacctacggcctgtcggagacctatggaccatccacggtgtgcgcctggaagccggaatgggacaggctgccagccgacgagcgcgcccggctccacgcgcgtcagggcgtccgttacgtcggcctggagggcctggacgtggtggacccgaagacgatggtgccggtcccggccgacggcaccacgatgggggagatcgtgatgcgcgggaacggcgtcatgaaggggtacctgaagaacccggaggcgaacgcggaggcgttcgagaacgggtggttccactcgggcgacctgagcgtgcggcacggcgacgggtacgtcgaggtgagggaccgcgccaaggacatcatcatctccggcggggagaacatcagcagcctggaggtggagaaggcggtgtacctgcacccggcggtgctggaggcgtcggtcgtggcccgcgccgacgagcggtggggggagtcgccgtgcgcgttcgtgacgctcaaggacgccgtggaccgctccgacgaggcggcgctggcgcgggacatcatgcggttctgccgcgagaagctgcccggttactgggtgcccaagtccgtggtgttcgggccgctgcccaagacagcgaccggcaagatcaagaagcatgagctcagggccaaggccaaggaactgggcccggtcgggaagagcaggatgtgatcgagcctcgagctcgtcttgctttgctacactgtactattcgtaggatggatggaagttgtatactacagactacagtgcaaactgcgtttcttctgtataacaccactactgtacgaacaatacagtcgtgtctgagcttttcttttgccagtgaggactgaactttgtatgaagtatgaactcgcgaagggcgctgcaacactgctcccccttgtatattccaaatttccaagggtacagtaatggcaagacagttaagaagttgccc

SEQ ID NO: 46384 - DNA, 497 bp, Zea mays
  Clone ID: MRT4577_142307C.1
cgccgaacgccaggaaacctgatcgattttgtaatcgtttttattcacggaatctctgccgaactcaggcttcacgaagtttatactatggcagattatttgactactgggccgaattaaatacccggtccagtgaggcccatctagctagcacccctgggctccacgttggtgagcagcagccgcaccccgtgctcgggctccacgatgagcctgagcgccggcgagtgcacgtaggccggcgacagcgcgagccggaacctggacagcacgagcgccagcaggaccttgagctcggccatggcgaaggcctggccgaggcaggtgcgcccgccggcgccgaaggggaggtacccgtgcggctgccgctgccgctgggggtcgtccgcgaaccgccccgggtcgaactcccgcgcgtcggcgccccacagctccgggtccaggtgcatagtcgggacgggcgggtagatgttgacgcccgccggtacgcgcacgcc

SEQ ID NO: 46385 - DNA, 381 bp, Zea mays
  Clone ID: MRT4577_142308C.1
ctccgctctcttaataggttgtagagactagggaccgaatcagaaatcttaacaatcgatataaagcccggctagaagaaggggactaaggtcacattcacggacaagggcaatgagcagccaaaccaactccctgacggcgataaaaagttcagcataaaactaactaaattacctttggaaaaataggcaaaagagcccccttcactgtttcatatgttaaggcataaattgcagtttgctagcgggtcctccatatagccctagaccacctttactgatcatcaagcactaaattaatataggtaattatattattctcaatgggtaacaatacatggaaattggaaataaaatttagattgtgggaattagctcaag

SEQ ID NO: 46386 - DNA, 825 bp, Zea mays
  unsure (1)..(825): unsure at all n locations
  Clone ID: MRT4577_142309C.1
gcctgccccaccccgcggttcagtcggcagcacccccgctcttcgctcgacccctccacccgctctccctcctcgaccgccggcggacccgtccaggagcggagcatgtgacttcgaccacaaacgaaggatacatgcttcgttgctagagcgcttgctgttgttggatttgggctcgggatcatggctcctgctcgggttggccggttccagatgtctaatctcccagagccctcaaaagaagatggttcaatcgagaaaactggagcttggaataacacatggagcactcttctgcgccatgcttcggtctatggtgtggctgctggttattgtctgtcagcatctctgctctccattatcaacaaatgggcaatcatgaagtttccctaccctggagcactgacagctttacagtacctcactagtgttgctggagttctcctgtgtggacagctaaagcttattgagccagataggctgaatttgaggancatgtggaagttcctacctgctgctgttatgttctacatctcaatcttcacaaacagcgagctcctgatgcatgccaatgtggacactttcatcgtgtttcggtctgctgtgccgatatttgtggccattggggagacactttacctccaccaaccatgcccatcattcaagacatggctctcactctccactantacttggtggaagtgtgatatatgttttcactgataaccagttcaccctgactgcttacagctgngcgatagcctatctagcgagcatgtctattgatttcgtgtacatcaagcacgttgtcatgaccatcgggtt

SEQ ID NO: 46387 - DNA, 381 bp, Zea mays
  Clone ID: MRT4577_14230C.1
gtggttgcggaacgtccgaaagggatccatcaatggtttatgggcatacacactaaaacatagtttcagaacattattttggattttgcatggataggccaggccaatgaaccataacctacttttggaggggctcaactgaaacaattaacatttttgccaacaaaacaaatggacacctgggggccttgtgttccaacaggcccaaaatctccataaactggggctcttggaccgccaaaagtttggatggcaaggacataaaaaatgcgaaattatatgccgacaacatttatcaaatgtgcgtaagcaagcctcttttagggcttaactcacggatggtggtgcgagtcacgtttagagacaagacttacttgatgc

SEQ ID NO: 46388 - DNA, 363 bp, Zea mays
  Clone ID: MRT4577_142310C.1
acggacgcgtgggcggacgcgtgggcgaacgcaagtaagagaggctcgagctcatccaggccaagggcggccagtacgctgagtcgctcaccaagtacgccggcgcgctcaactgccgcgtccgtaggaagtgctagtgcgtgtgcatcactaggctgcagctttcatcattggagatcgatcgcaacagtgcacggttgtgttgtagataaatcgtgtgtttggaatgctgcccgtacatactggacaactcgaacagtgcttgcctttgcctgctggccagcatcaccattggcgatggcgcagcctgcggcgggtgctacgaggtgcggtgcgtggacagccccagcgggtgcaagccca

SEQ ID NO: 46389 - DNA, 426 bp, Zea mays
  unsure (1)..(426): unsure at all n locations
  Clone ID: MRT4577_142311C.1
cgtccgcagcagngcaacaagcaagnattacctgcccatcgatcatatcgtcaactggtccggcagttcgcgacaccatgagctccacggagtgcggcggcggcggcggcggcgcccagacttcgtggtctgtaggcggtcgggctgcatcgtggtaggtactctcagaaggtgatcctcaaggacaagccggacgccgtcgtctgggtgctgcccgtccgctccgtggtgaccgctgattatcgcccctaaccgtgtccgcatcttgaatttcatctgctccccgacgccccacatcggctgataatatataagctaccctctatttcctcccctcttccccacaacttgcattcaatatatatacctattatataacgtccgccttgccgaataatgctatgtctgaattttcattaattaaga

SEQ ID NO: 46390 - DNA, 311 bp, Zea mays
  unsure (1)..(311): unsure at all n locations
  Clone ID: MRT4577_142312C.1
nnncgtccgaaaaaaaaaaaaaaaaaaaaaaaaaaaaaaaaaaaaaaaaaagggcggaaaaatatgaggggatccttctttacgtaccagtctttgctacgcgttaattctactatatagttatctaattgcaatacattggtcgaatttattcaccgtcgttattgaacaaaaccctgtggtaaaacactttagtcgcctagcttaatatccttgtttcacatgctggtttagtaaggaggaggcctacacaaaaggcccttaccaacagttgttcacactaaatggccaatgtgaatggccatggagac

SEQ ID NO: 46391 - DNA, 422 bp, Zea mays
  Clone ID: MRT4577_142313C.1
cgcagcttggcgccgggccggtttccgaccggcgctcgttgccggatccgcgcctccccggggccactctggtccccgccccgttgcgccgcgccggattgcggaccctgtggcgggcgacggttctgcggcggtaggggttggggttggggaccgtggcggcggggtccgtgccggcttctggtcggggccgtggtcgggcagcgcgggatctgagccgcctttgatggacctttttcgagccttctgttgcgaatgagtggttttgagacattgggagttgggaggagttgttggagagttctcttccatcctgccgaaaaaaccaaatttgggagtgagttttgggaactattggagatgctctgtgcatattttcactactgctgactgatggaacatgcatacttttctctgatgcg

SEQ ID NO: 46392 - DNA, 579 bp, Zea mays
  Clone ID: MRT4577_142314C.1
agagagagaaagagagagagagagagagagagagcaagtagtcgttgtgcgcccgtgttgcgtgaaggaacaagggcgagggagggctgtgagtccttgttgcgcgaagaagaagatggctgcggtgattgccagcactcaaaactgtcgcgttcgtgtgccaccactgatcgtgttcactgccgtgctgctggtgacggcggcggcaaccgtggagccggcatcagccacgggctggtccagcgtcaccgacagccgcagcggcggttactcggcgttcagcctgcagggggcaagaaagctactgctgcaggacttgtgcatacctcaagggtatccctgcgcccttgcttacttcggtctcgggtgctgcagtggcgagacctgttatgatgcacagcagatctgcctctagttgttgtagtttcagggagagggttcttttcttgccgctacagctttggtttcagtatggtgcgtgttcagcgatgaacaccgtgctttgtttccctcaattagtttttatgtattgtacgcgtcttttggttgagtaataaagcaatgcgcttctttgtttcc

SEQ ID NO: 46393 - DNA, 551 bp, Zea mays
  Clone ID: MRT4577_142315C.1
gataaagagagaccaagtagtcgtagtgcgcccgtgttgcgtgaaggaacaagggcgagggagggctgtgcgtccttgttgcgcgaagaagaagatggctgcggtgattgccagcactcaaaactgtcgcgttcgtgtgccagcactgatcgtgttcactgccgtgctgctggtgacggcggcggcaaccgtggagccggcatcagccacgggctggtccagcgtcaccgacagccgcagcggcggttactcggcgttcagcctgcagggggcaagaaagctactgctgcaggacctgtgcataccgcaagggtatccctgcgcccttgcttacttcggtctcgggtgctgcagtggcgagacctgttatgatgcacagcagatctgcctctagttgttgtagtttcagggagagggttcttttcttgccgctactgtcagcgtgctgtcatgctgtgctgtgctgtgctgtgctagctttggtttcagtatggtgcgtgttcagcgatgaacaccgtgctttgtttccctcagttattagtttttatgta

SEQ ID NO: 46394 - DNA, 353 bp, Zea mays
  Clone ID: MRT4577_142316C.1
aaacctcacgtactgatagccattaattgtcggttggagttcgtcagagaagatcgaaaagacatgtatagaatactgatcgtctgatcatatcgtccctacctatctgtctgtctctaccaaagcgggctacagtacgtaagctagctgtctctaccaagacactgataggatgtgtgattacaagttcaacagaaccacttgactgcatacgagaaccacttactcaggcaagaaaaaaaattgcattttctaattccaacccgaaatcggctagtgtacggtcttatggtcataaccaggtgggataacaaacatattaatccatgcgcatgtatatatatatacacaaa

SEQ ID NO: 46395 - DNA, 319 bp, Zea mays
  Clone ID: MRT4577_142317C.1
aacagaagggttaaaacccccaaaaacatgtgcccttggaaaataaaaacggggaacgtctaagttttttttttttcaggggggtaaacaaaaaaacgtttggaaaggggggaaaaaaaagcccacccggctggacaacgctcgaaaaatgaccgtcctaacaattactttattatggggcccggatccaacctttggatcaatacatttatgcaggggggggggatttgtagtacccaggtaacataatccttcaatgctggggggggggagactcgggggaaacccaatataaagccttgtttacttggaaaacccc

SEQ ID NO: 46396 - DNA, 344 bp, Zea mays
  unsure (1)..(344): unsure at all n locations
  Clone ID: MRT4577_142318C.1
cgatctagtttttgatccaccaggacanggaaaacaacaggaactttttttttgcttcaggtttccgagtttctcctggtgcggacaaagaagggaaacgtgtccctacttgcaatctacaaggccatgccctccatgaaactgcagaaccaatgggggggaaggaagcccgctgttggaccaaaagcccttaccgagtggaaaacaatgaaaacgaaaagattgtcctcccccaagagagcaatatgatggcaaaccgagcttggtggctttaaagccccctgcgaacccatttcactgcaacgggccacccccctcccccaggcccatgtctaggggggggc

SEQ ID NO: 46397 - DNA, 102 bp, Zea mays
  Clone ID: MRT4577_142319C.1
ccctggctaacaaggacagcctgacttggatcccactatgcaggaaggaaggcgactctccccgcacctcttgctacgattaggacttgcgacttggtgaaa

SEQ ID NO: 46398 - DNA, 326 bp, Zea mays
  unsure (1)..(326): unsure at all n locations
  Clone ID: MRT4577_14231C.1
gcgaaaggcaaggacgtaagaagtcntntnnttcnattgtctccnnttnnatgttttcttcctcctcctccttcttccccctcttcttcttcttcctgttcttcctcccttccttctcctccttcttctcctttcnctttctttcgttcttgttcttccccttgctgccctcgtccttgtgtgggcttgtcttgctctcctgtctggcgtttccccgtgtctgcctgctttggttcctggttctcttctgtttcttccttttctgttgtctgtggtcgctctgtgccccgcccttcttcgttttttgcctctcgggtgtcttcttc

SEQ ID NO: 46399 - DNA, 2239 bp, Zea mays
  Clone ID: MRT4577_142320C.1
ttggagcttgcctgccggggcccgagctgctgccggtgctcgaagcgatgaagctggtgacgggggtggatttggagacggaggtggagctgtcgccgatcgccaaggccgaggaagcggccgtgtttagcccctactccagcccgagcaccgccttattgctgcagaggagagtcgtgtcctggtccacggagaccgggtctccggcgacggtccgcgtgcgcctcggcgacagaagcttcgacctgcacaaggaccctctggtgtccaagtgcaagtacttcagcgaggcgtcgctccagtccggcggcgacgtcgtcgagctgcccgccagctccccgggggtccgcgaggcgttcgagtcggtcgcgctcttctgctacggcgacgccgtggcgctggaccccttcaacgtcgcggcggtgcggtgcgcggcggagctcctgggcgtgggcggcctcggcgcgcgctgcgacctgtacatcagccaggtggtgctgcagagctgggacgacgcgctcatcgtgctgcagcgctgcctgcccctgctccccgccgccgaggagctcctcgtcgtcagccgctgcgtcgaggcgctggcgttcatggcgtgcatggagatcctcgacccggagcagcggcgggaccagctgcccggcgccggcggcgcggcctcgcgcgcgctggtcggccgccgctgggacgccgagctcgtcaaggagctcgccgcgcgcgacctctgggtcaaggacctgctcgcgctcccgttccagttcttcgagcggatcgtgcgggcgctgcggcgccagggcatgaaggagaagtacgtcggccccgtcgtcctgttctacgccaacaagtgggtgctctccaagaagacgcacaggttctgggcgaccacggacgacgacgccgtcgacggcgagaccgacgccaacaggagggccgccgcgatcctggagggcgtggtcgggctgctcccggccgagtcgccggcagtggctgcgaacggcgccatccccgtggcgttctacttcgccctgctgtcgcggtcgctcaccctggagctgagcgacgaaagccggacaaaactgcgaggacatgttgcgtcgaatttgcggttcgctcgcgtggacgacctgccgctgccggaggaagaagccgacgggcggtccatcgcagatagcagggaggtgagggcaatggagagcatcgtgtcaaaccatgcctccgtccaaaggaaaggcgtggaggccgtctccgagctgtgggatcggtacctcctgcagtttgctggcgatcccaagctccggccggaaaggctagcagagctgatcggagcaattccggcaagcgaccggaagacgcacgaccacttgtacgaagcaatcaacacatatttagtggagcaccggggcctgtccggggaggagaaggcgacgctgtgcggccacctggattgccggaagctgtcgcacgaggcgtgcgtccaggccgtgcagaacgagcggatgccgctccggctgatcgtgcaggcgctgttcgtgcagcagatgcacacgcaccgcgccttcacggagtgctccgactcgttccggtgcacgcgctcaggggagctcgtcccgggcgccggcgggtacacgccgagccccgggtgccccgccatccccaccagccagcccctgagcggcagcagcccgtacgacagccaccaccacgccccgcgcgacgccaagctccgcgcccgggacgacgcttcgtcggactacgagacggccagcttcaggatccaggcgctggagcaggagatcatctcgctgaaacggaccctgcagcggcacaacaccctgaggggctcggcctcggctcgcggggaaggcaaggagccgagcttcagggtcgccgcagacgcgggcgcgccggcgaccatcaagcgtcgagccacggtctccggcagctgcatcggctccatgcgctggggctcgcagcgccggtgcgccagcaggatcctgcgcgtcttcgcgaggctagccgtgttcgggaggggtaggtcgagggggaagcagagcaagtgcagcgcatcaacagagcggcagaattgcatgtagaacggtagaacagtacaagcacacgtgaagaggaaattgaatcatttactcgtggaatagagagggcaggtgttacggtagatttgggaagcatgtatgtaagcagtggttttgtgtgtaaatatgctagc

SEQ ID NO: 46400 - DNA, 520 bp, Zea mays
  Clone ID: MRT4577_142321C.1
tttttttttgctaggtaacctataagaggccaccatagtttggagaagaaaccaaataaaaacacacttagtagaaacttagagtctctgtgtgcactgaactagtccagtgtgcaccaaaccggttatgcggaccctattctgtggctaaactaacataacatgcatcagactagtctgatgtgccaccagatcagttacatagggagcctgtttttggcatagttatcctgtgcacgtcgttcctgtctggtatgccaccaaacctttctatcacattccttaatgatgaatgggcatagtcaaagacctccttcacaccaactggttgttgtccatgctgccattctgacacgtggtacttctatcccttgtatggggccaggtatcctttccagtttgggtacccggaatcgataaggcaataattctctgcaattgtaattgttagggttagggttatcatgcattaccttttatagggacacacatagaaaacagacatgggaacataacactt

SEQ ID NO: 46401 - DNA, 356 bp, Zea mays
  Clone ID: MRT4577_142322C.1
tgataatttataaactaaaatgaaataaaatgaaaggactaaacattagtccctataaaccaaacaccctcatagatatgcatatactacatggggatacgcccatagcctatagatttgcaatcatgacgcatagaatgtatgcggtgtagtggaaaaaaggagggatcaaagcgatctacgtacaaatgattgcaatcatttgtacgtagatcgctttgaacaactcatcgatggtttagtatattctgcaagctagtctcgtcgtcgtgtgcttattagaactgcatttttaaatgatatatatattgtaaatggagttctattcaacagagcacaagattgacaactataca

SEQ ID NO: 46402 - DNA, 361 bp, Zea mays
  Clone ID: MRT4577_142323C.1
attcggctcgagttcataacgtgccttctattttctcctggatttgggaagctgcacgcgcgcacgttggaaacactcccgtacaattgtaccatgacaagtgatgaatataagagcgctgttctgcaagcaagcgctcataatatggccggggatatcttccacattgtacaaagccagaggagtctagagactaacatatgccaacccatagaaggattatcgagcattacagattgggaatcctaacccatacaatctgtatgctcaggcaagaggctgtgtatagaatgcgtttagcactgcaattctcacactagacagtgaggagcagattattaatccaccactctctggaact

SEQ ID NO: 46403 - DNA, 484 bp, Zea mays
  Clone ID: MRT4577_142324C.1
gaacagctgactaggaaggcggccttgacgcgcactctagcaacggcttctgaggttgtccgccctagcgacgccgagctactaaaggcacaagccgacatatggcggatcattctctgctaccttacgcccctagaactgaagtgcgccgtggagcttggcatccccacggtgatctattttcttgggggcgctgtctcaaccgctgagctggccacggtgctgactttccacttcactaagctgacgctcctacggcgcctgctgcggatcctagtcgagtggggcgtgttcaccgtcgacaagcagagcacggaggaggagccggaccgcatcagccccgtgacctacctgctggtggacggcctcccttacgaggaccacatgaaccacaccgttctggtgctcacctgcaccttgacgcgctacatccaggccgagatagggctggcggagtggttcaagagggacgcggacacgtcac

SEQ ID NO: 46404 - DNA, 406 bp, Zea mays
  Clone ID: MRT4577_142325C.1
cccgagggctttgggccccccaggagggggggacaaaacccaaaggaaatgggcggcaaattaaaaaccagttcagaaaggaaaacaaaagtttaaaaaccttaaaagaaacatactggagccgaggagccaagggcctaaacaggaaaacaaaaatttatggccgggaaaaaactcgggaaaaactaggagaaaccaaaactcctaaacctttaaaaggtttcgaaaaaaaaaaaagggaatattttcgagaaccaaaattgggaaaattgggccaaactcaaaaaaaagagcttatttttcctcctaagcctcctggagccatttgacaaaagggtccagagctttaaaaaaaaaaggccggcccttggggttggaacctttacggaaccaaaggactatagga

SEQ ID NO: 46405 - DNA, 187 bp, Zea mays
  Clone ID: MRT4577_142326C.1
agactcagaaccatggcaaactcattaactttagacaaaaaaacatcagtaccggtgtttttaagataaaagtttattgataaaaactggctctacttaacaatgaacttagaccaagttgtttattatagactcatctccgaacaacatttctgtaatagactagaagggtttaactggcttccta

SEQ ID NO: 46406 - DNA, 659 bp, Zea mays
  unsure (1)..(659): unsure at all n locations
  Clone ID: MRT4577_142327C.1
gtgcctggcatcacatctctctccctcacccctccttcttccctccggccgccgccatggccaggccgacgtggtggtgcgcctccgcgccatccatcaccagcaccaccgcaccccagcgcgccaccaacacctccaccatcaccctgcgcctccatccaccaccatccacagcgccgcctcatcacctcgcgccgccgcccatccatatccctgctgctgctcaacctttcttcttctcctaaccttcttcccgcatccccgctgcccttcttctttcctgaacctgctgctgctacctcctcttctttcttctccttcacctcgctgctccttaccacgctgctgctcttccctctcatctctgctgctgctcttccttgcgcctccctgctgctgcttttccttccctccgctgcttgttgcttcttctttgatccctttgctgctgctcttcttctccagcgtcccctgccgctcctcacttgctgaagctctgctctgaacctctcccttgtccctactgctactgcactcctcttgccgctctctgtttcaagaacaggaacacctgaatctctctctaatatattctgttgtgtatcagtactattcgtgtctgtatgtcagttagnttactttaataattcagatcactt

SEQ ID NO: 46407 - DNA, 393 bp, Zea mays
  Clone ID: MRT4577_142328C.1
gggaaacaccaaactcttaggtggggtgaccatatatatatagggccaatatggcttggaggacaagacaaatcaatatagcttagaatgcaagacaattacaaatctaaaagttatgcctaaatacaatttctaacactcgcccacagtcacaacagtagaatcacagacgcaaagactggactgaaaagcagtaaacaattgaacaaacaagcccttggtcatgatgtcggcgaataggtgagaggacaacacgtggagcacccgaacttggcccaaaggagaccttctcacgaacgaagtgcatgtcaatctcaatatgcttcatgcgacggtgatgcactggatttgtcgtcatacatacaacactcacattatcacaatacacaacgg

SEQ ID NO: 46408 - DNA, 829 bp, Zea mays
  unsure (1)..(829): unsure at all n locations
  Clone ID: MRT4577_142329C.1
gtcctacttctcctatctctcccagtcctagctgggggcatcactatactactaacagaccgcaacctcaacaccaccttccttacgaccccgccggaggaggagaccccattctataccaacacctattctgatttttcggtcaccctgaagtttatattcttatcctaccaggcttcggaataatctcccatattgtaacttactactccggaaaaaaagaaccatttggatacataggtatggtctgagctatgatatcaattggcttcctagggtttatcgtgtgagcacaccatatatttacagtaggaatagacgtagacacacgagcatatttcacctccgctaccataatcatcgctatccccaccggcgtcaaagtatttagctgactcgccacactccacggaagcaatatgaaatgatctgctgcagtgctctgagccctaggattcatctttcttttcaccgtagggggcctgactggcattgtattagcaaactcatcactagacatcgtactacacgacacgtactacgttgtagctcacttccactatgtcctatcaataggagctgtatttgccatcataggaggcttcattcactgatttcccctattctcaggctacaccctagaccaaacctacgccaaaatccatttcactatcatattcatcggcgtaaatctaactttcttcccacaacactttctcggcctatccggaatgccccgacgttactcggactaccccgatgcatacaccacatgaaacatcctatcatctgtaggctcattcatttctctaacagcagtnatattaat

SEQ ID NO: 46409 - DNA, 255 bp, Zea mays
  Clone ID: MRT4577_14232C.1
cggcggagaatcgcctggcctcctaaggccagggttgtttccgacgggaaaatggaacgaatatctgcacgagattgggctgccaaatgacacacatgaataatccgaggacaattttctggtgggctttctcccaagagaaaaggccaggaaacccgctggattttgggctgccaaaccagtcctgatatgtcttttttcccccctctagcgcgtctcagtaagacattaaggactaacgcggaggctttaaag

SEQ ID NO: 46410 - DNA, 293 bp, Zea mays
  Clone ID: MRT4577_142330C.1
ctctgttcctagcctcccctcatgccacagtccttatcaagtgctctcctgctcgccacttgcagtccttccaacagcttcacacacacccagtcccgcccgcctccatcccagccagccctagagttgagcttagtgtggatctgctttgtagccagctctcctcacttatcaggtactttctccaaaaacctaagaaccaaagtcttccgcttgcaacttgggatggtgatatggctgtgtcgccacccaaatctcatctccacctgtgaatcccccatgctgggggtggg

SEQ ID NO: 46411 - DNA, 531 bp, Zea mays
  unsure (1)..(531): unsure at all n locations
  Clone ID: MRT4577_142331C.1
cgaacaacaacaacaaccgcagcaccaacggcaacgggggcaacaacagcaccaacaacaacancaaggggaaggccaacaacaacancaccaacaancacaaggccangngcaacaacacgaacagagccangagcaacaccaaggacagagccangagcaacaacancaacaacaaggggaagggcaggacaagcagcaacaaccacaacagccaaagcaanancagcagggccaggaaaaancacaacagcaacaanggcanngccaggagcagcaacagaccacaaggngcagcnanaacnaccanagcagnagcncaaaacnaaaaaanngncangaannccnaaggcagcagngcagcccnnnggnaangccnnnncnccaancacggnnganacaaccaagnagcngccaggnanngcagcaacaanggngncangaacnnaggcaganngagccacaanacanncaccaagcaancnacaacaaggngcaanncanaaaccaggaggagcaacaacaacaacc

SEQ ID NO: 46412 - DNA, 739 bp, Zea mays
  Clone ID: MRT4577_142332C.1
cacatatgagcgcggacggctgggttgacctgttggttggtgcgaagccttctcaacataccctaggacatacgacctgatacatggcaatggcatcttcagtttatatcagaacaagtgtgatgcagaagacattcttctggagatggataggattttacggccagagggtgcagtcatactgcgggacaatgccgatgtactgaacaaggttagaagtatggtggcaggaatgcggtggaagtccaagttactagatcatgaggatggcccgcacgttcccgagaagattctgatttcagtgaaagaatattgggttggcagcgaggaacagaacagctgataggtacagaaccatgttgatgctggatgccagcctctttccctgatgcgatcccctgatgctgttttgtcggttaatagattttgttcatactgcatacgtacagtactaaagacccttagatgatcgggacatacctggatttttgctgtgcatatatagtaatcagagcgttaagtgaactgttggcgatttgccaaggcatattgtagtgtaggcaaaagttcgttttaaaaacatgtaggtacgagacaacttagtcgctactttgcccagagattaattatacagatgcacgcaagaagttttttgtgatttcgtatatgaacattatctgttgataatgcatgagattatttcttcgaaaaaaaaaaaaaaaaaagcggcccctcgagc

SEQ ID NO: 46413 - DNA, 698 bp, Zea mays
  Clone ID: MRT4577_142333C.1
ccggccggttcgccatgccgttccgtgacgccgccgtgctggcgctcatgctcaacatccggggcatcgtggaggtggcggccatcaacagctggggcgacagcatgaaggccaccgcggagcactactccacgctgaccctggccatggtgctcatcaccgccgtgtccacgccgctgatcaagctcctgtacgacccgtcggggcagttcgcgcgggcgaagcggcggtcgctggagcacgcgcgcatgagcgccgacctccgcgtcctcacctgcctctacagcgaggaccacgcggcgccgctgatcgacctgctggaggcgtcggggtcgtcccgcgactcgcccgtgtcgctcatcgtgctccacctcacggagctcgtcggccgcgccgcctccgtgctcaagccccaccggaagagcacgagcagcggcgggaacccgacgtcgtcggaccgcatcgtgaacgcattccggtacctggagcagcaggcggcgccaggggcggtgacggtgagcccgtacgtggcgcaggcgcccttcagctcgatgcaccacgacgtgtgctcgctggcgcacagccggaaggccaacctcatcctgctccccttcacaagtcctcggacggcgcgcggagcacgggcacaacgccatccgctccatcaaccggagcgtgctgcagtacgcgccctgctc

SEQ ID NO: 46414 - DNA, 282 bp, Zea mays
  Clone ID: MRT4577_142334C.1
gcggccgggtgttttttttttttttttttttttttttttttgatctatggacgaggggtctcacctttaggaaaagctccaagaagaaatgcacctgactgacaaaaggttgcatgaaggaaactctagaaagaaaggagggtacggaaacaaaatcgtcgggagggacgaaacttgctgtgagtgcgtacaccatatgtggagacagaataagaacatgcgggggtaacatgcatactgttgcgcgtccaaagacgtaaaatcctagctaggaaagaaggg

SEQ ID NO: 46415 - DNA, 301 bp, Zea mays
  unsure (1)..(301): unsure at all n locations
  Clone ID: MRT4577_142335C.1
gtctccaccgctgcaggaactccccccctccccgggggggggcgcgcccaccgagcagtggcgagggcaggncgccacccaccacctgcccgttgtgccgcaccggcttgtgccgggccgggacaccattggcagcccgccggcgcatccgggctcccgctgcgccgccggggggaagcgcggccggcagcgccacgcggggcaagcgagggggggggggtntcccccgcgcgtgtcgttcaacccttccgggactacgaccctggcctctccatgggcgaagacgaggaccccgaggggc

SEQ ID NO: 46416 - DNA, 1769 bp, Zea mays
  Clone ID: MRT4577_142336C.1
cgaggaggccacggtggacgtgggcgcccgcgcggtgtccagggaggtcatggcggaggttctgcaccgcctcggtccccgcggggtcatggccgccgccggggtcagccgaggctggcgggactgcgcgggccgggtctggcgcgcggccgaagagctccgccttcgcgtcctcgcctcctctggcgccggcctcctcgccgcgctgctcccccgctgccccgcgctctcccgcctccacctccggatggaaagtgatgttgatggcactaccctggcttgtattgcattttcctgcccaagtttaagaactctcgagattaccatggctgctgatgctgtcaacaggatgactggggaggatctaagtcgttttgtttcggagaagtcttctctctcagccctcaaaattggtggttgctctaatttggatattcttaatctgtgctcttcaagcctttcaattctttggttgtcagatctttgttccctttcgaaatcggttatgaactgtcctaatatgagcgagctatcactgtgcttcacagaacatagtagtgattgtaccaatctgattactttgatggatggcctaggtcgtacatgtcctaacttggaaaaaatgcacatatcatcaaaacaattatctaatgaagctgtatgtgctctagagaatgctaatctcaggggactgttcatgctatccctgattctaggttcaaaaataactgatgcagctgttgcatctattgttcggtcatgtgcaagcttggagttacttgatttaagtggatctagcattagtgacaatggtgttgggatgatatgtaaagcataccctcgtactttatcaaggctgctccttgctctttgcccaaatgtgaccacacgtgggatccagctagccacagcacagttgccatgtcttcaactcatggactgtggaatgagcctatgtgctaatgtgaagaatgaaaaagagggtccatattttggtgaaatcaatggaggtattagaattattcgaaaactgtccatcttaaagaggcaacctattcaccaaaagcttattataaagcatgggaatttgaagaagctcagcctgtggggctgttctgcattagatgctctatatctaaattgtccagagttaaatgatctcaatcttaactcttgcacaaatctacatccagaacgtctgcttcttcagtgcccaaatttaaagaatgtctatgcatccggatgccaagatatgttgattggagcaatcagaaatcaggttctgaatgagttcgctgcagttgaaccatctcttccatgcaagcggctagcggatggctccaaacgggttcaactccctcagttcctaaagcagcagccgtcgaaggacaacaaattaattgaattgagccagacccagtgcactgtgcatcttggttcataataacaccaccagagccagttaacggagcattgtacacaccgaattatgtgaatcatgcaccacataacattatcaattcgttgtatacttctgtattgcatcagaacctgtagtgattgttgtataagctgctaattgctgcatggacatgtctgaatccatcatggatttcttgcgaccgttagtctgttctaggaaacattatataggaataattcgtaaccatgacccgtattctctagggaaaaaaaataatgatcctaggtcactcattttggttggtgttattctgttattcttccgcaagtattttttttttgggggg

SEQ ID NO: 46417 - DNA, 425 bp, Zea mays
  Clone ID: MRT4577_142337C.1
gttgttgggtttgtttttttgggttgggttttttttttttttggggggggggggggtttttagttggtgttggggggggaaagaacgcacaaatggggggtaaatgggattggttgcagtaggggaaggtcgggggaatgggaatttaaaattgggggggggggggccgggattggacttgatcgatatgcttttgggggagtggtgcttaggagtgggggagttgaagcctttacccttgaagacatgggggagaggggcaccggaagttgaaaatttgacctttaccctccaaccattgggatttggggttggggttatggaaacgggaaaccaaaaaaaagaatgaggccagcccaaaaaaaattaaaggggggggggggactgggaaaggggagacccggggcagttttaattataaaccc

SEQ ID NO: 46418 - DNA, 290 bp, Zea mays
  Clone ID: MRT4577_142338C.1
aaaaaaaaaaaaaaaaaaaaaaaaaaatttttataaaaaaaaaaaaaaaaaaaaaaaaaaaaaaaaaaaaaaaaaaaaaaaaataaataaaaagggcggccgcccttttagatcaaacattattaccgcctccttcctacgtcttaattttttttttatagcgccaaaattaaataaaccaccggccgtttttaaacaaactgacttataaaaaaaccccgttaccccacatattaatcttttagaaaatcccccctttttcagctgtcgtaataataaaaaagaccccc

SEQ ID NO: 46419 - DNA, 1590 bp, Zea mays
  Clone ID: MRT4577_142339C.1
ccatcagcaccatcgtttccaaccctccatgatcgatccttcttcctctggggtttccggtggtgcttgtgggatgcttctttcttcttcttctttgtggaacccttggtcatttggccattcatgtcaaaagatgcaaggtcgtttagggcatgactgatgttaggttcagctcgattgatttcctcatcatcttcatcagaagcaccatcgtctgattgatcagctgctgcagtgcttgatccttctaggtcactgttgtcctctgcatcagtttcatcgtctatctcaccaggaggaagctcaaagtgcggaatctttccatcaatgtaatccttcagtatctgccgagcagccctggtctcatcaggcagcccagcatggctgacatgcccccgagatgtgcagtacgccatcaacaactcagcggcggttggtggtcgagatgcttcttcatatgccttgggctttggcagggtgattttgtaaacctgttccaggatatttcttggcacacgatttgctaccacttgaattgctcctctgtgctttggcaccgggaagctattcaattggcaagacaccacacgccaccatctcatgcctcgagcttgaaaaagaagggaagaccagaccagggcaatcacacagagtgagctcttcagagattatcagtgtctggaaatgttttgtcttgccaggtgtgtgagtaacaccagtcctcttctcgccaaccagagcatttatagttgaactcttcccaacatttggatagccaacaaatccaacaactacatgcttagtcactgaagaaacagaatctgaagaactggcttcgtgatcatctacagtaggtgagatcctcctctgagctacaatagattctgcctcagcttgcagcttcatcaagagttcatccctttcatatatcttggtatccaaatcaagtgaagcagattctccttcagagtatccacttaactttttgccttctaatgtggcagtggcagccttagccgaccagaacacatagagaatgtcatgtgccttaaaataatcagcccatctcttcctgatatttaacggcaacagatcagccttgttaacaaggagtattgttctcttgtgttccatcaatttcctttgtgaactggagcttccgctgtcaacaatgctgcttgtgagtgttgctccttaccaattcatggatctgaggggaactcaaggtggtgccgtactgtcacttgccatagctgcgtatctcgccttccagcacttcactagggtgggcggcccaggcaaagccttcgagcagggatccattgttgcgaccttggccatcatctgcatcatgattgtgcccttgatgctgctattctgatttgcattgagttggaatgaatttgcttctcattatgtgcgtatagaaggacaaataaatttaaccttgtaatgcagcatccgagttctctttcccaaaacgtatgcactgatatatccttatgccttgttagtgctcttcggtggttattgctcttcggtggttattgagttctctcagcatgtttattctctaaaaaaaaaaaaaaa

SEQ ID NO: 46420 - DNA, 317 bp, Zea mays
  Clone ID: MRT4577_14233C.1
tcttgttggtctgtggccaatggtatctggtcatattgtcaaacctggtgtgggtgccaatctcaacaaggaaatattttatgtgccccagagaccatatacagctgttggaacgcttcgcgaccagttaatctatccactcacagcagaccaagagactgaaccacttaactatggtggcatggtggatcttctaaagaatgttgatctggaatacttgctagaacgctatcctcttgataaggaagttaactggggtgacgaattgtctcttggtgagcagcaaagattaagaatggctagactgttctatcata

SEQ ID NO: 46421 - DNA, 397 bp, Zea mays
  Clone ID: MRT4577_142340C.1
ggccgtccttttcttttttttctttatgggctcctcactgaggtggggggctcttttcctgggggctggcgtttcccgcgttccgttcagccccgtccctttgcatggttcctgtttctgcgccttttatttttttctcttttattcatgggacctggctcctctccttttctcgcggcacattttcctgctgttccgtgggtccggcccttccttgttgtggtgcgggacctggcctggtcgtcggcttcctggttctcatcagtcagacccatccgcttcttcctcttgcgtgcctcaggcgtagtgttcatgttggcatgcgcacctcccgggtatatgtgaacttcatatggtctcccggacgatttgggcttctcctcccgggacttggctg

SEQ ID NO: 46422 - DNA, 238 bp, Zea mays
  Clone ID: MRT4577_142341C.1
ctatcaccctccaagttcagtcatctgacaccattgactacgtttatgccaatatccattactaggactgcatccatacagactagtagcagctcatattacctttcaaacagcttaacgacagtctcacgcttgctcactacatcatccacaatcagagcaccctccaccttgtgctccgtctcattttaggcatgcagatctttgtgaaaaccctgacctgctagactatcaccct

SEQ ID NO: 46423 - DNA, 796 bp, Zea mays
  Clone ID: MRT4577_142342C.1
agcctcccaaccgcccccctcctcggctctcctcatctcgcctgtgctctccacacgaccacaccaaaaaatccagacctgcccgcccgcctcgcctcgcctcctcgtctgcctcctctcctgcgcttcagtttccaggctaggttgctgttgttgttcacatggattcctttttccaaagagctttcggcgacccaatgtgctcggaagacagtaatgttgtccaacaaggaattgataaatgcccattcctgaggaacatcaacgagcctacaagtttttccttgacatccattaatttccccgctccggcaaccggagccaagggtccaatttttgaagacgggcccaactttgacacggcgtttcgagttttccatggcagagacggggttgttccactttcagaaggagcctttgcacatattgagaagcctctgccaaagcccactcctgaatttaaccccttggcagccaaagcagctaccatcagtctctcgggattcggaggctttttcagcttcggtgatttctcaaacaagcgcaataagcagaactccaacaagaagaatcccaacaacctcccccagaataaaggccagtctaataacaatcatgaagcgatgagcaatgactggctggaaaatggtcaatgccctcttgcaaagtcatatagagcaattggtggagtcgtgcctcttgtcgcaaagctgctgacacccccagctggtatgaaactgacgtgccctcctgcgattgttgctgccccgtgcagaatatcccgcacggcggttgc

SEQ ID NO: 46424 - DNA, 602 bp, Zea mays
  Clone ID: MRT4577_142343C.1
cccacgcgtccgcggacgcctggggtggcttgcttctccttcgctcggttacctgcttcctagctgttctatcattcatggcgtgcttcgcctccgccgtcctcctcgccgctgtcctgctcatggctggacggctgacccatgcgggtccgtcgacggccgaggtgttttggcggcgcgcagtcctgccgggctccgccgtgccgaacgccgtcctccggctcctacgcccctataaccacttcgtaagcgaagccaatgccgaggacaccgggcgatccaacgctccgttcaactaccaaaactacaagcgctcctgcgactgcgacctcgcctccaggtgaccgcagtgaagcagggctcgctggtggcagaggcgcgagagacgacacgccgttcagctacagctacagggcgccgagccaacaaggggtaccggccagcggcggcgcgagagacgacacgccgttcagctacagctacagagcgccgagccaacaagaggtaccggccagcggcggcgcgagagacgacacgccgttcagctacagctacagggcgccgagccaacaagaggtacccgtccagcgcagcgcgagaga

SEQ ID NO: 46425 - DNA, 328 bp, Zea mays
  Clone ID: MRT4577_142344C.1
ggaaaaaaaaaagcaatcaataaactttttttttggggctttacaaaggaacaagggccatattttgctaaccacgggggacaaacccaattttgaaggggaacaaaaaatgatgggatctaaaaaaaaatcatgtccttagctgaaaactgggcagtcaacaaaacccatttaggttacagaggccatagctccgccccaactacttggccttgttttccactggttcctgctcgaatagacgtttgaactttgcaatctggccgaggctttgacccatttggcgcttggccctcatggggaacactttgcctgtaggggccacctt

SEQ ID NO: 46426 - DNA, 1142 bp, Zea mays
  Clone ID: MRT4577_142345C.1
ccgggacgtttccatcaatgcatgaaaggatgcgcggtcgtcggatgcgtgttcacgtgtaggataggcatcggcgcgcgccattcgtgtggttactacacacaggaataataggacgcggccccggccgcctccgatctcagctctccgttacacgcaaacgcaagctcccaagcagctaccaaccagccgggagagggagcgcacgcactgcgagctagaactagaatggccaccacagccggcgccggaggcgccgggcagctgaagctgctgggcgcgtggccgagccccttcgtgaaccgcgtgcgcatggcgctgcacctcaaggggctggagtacgagaacgtggaggaggacctcaccaacaagagcgaccagctcctcgcctccaaccccgtccacaagaaggtgcccgtgctcctccacggcgacacgcccgtctccgagtcactcgtcatcgtggagtacctcgacgacgccttccccggcgccggccaagccctcctccccgccgacccctatgaacgcgccgtcgctcgcttctgggccgcctacgtcgatggcaagttgcacggcatgatggtgaaggcgatcctgggggcaacggaggaggagagggcggcggcgacagcggacgcgttggcagctatggaaacgctggagggtgcgttcgccgagtgctccggcgggaaagagttcttcgccggcgacgagcccgggtacctggacgtcgtgctggggggcttcatcggctggttgcgcgcctgggacaaggtgggcggcgtcaagctcctggacggcggccggaggaccccgcgcctcgccgcgtgggcggagcggttcgccgcgctcgacgtggccagggacgtcatcccggaccccgaccacatcgccgagttcgccaaggtgctgcaggcacgctccgcggcagcagccgccgccggcaactgagctcgatcacaagtgaatgctgctctgccttcctgagaagtcatggtttgtttggctggcgaggataaaacatggtttgttcactgaaatagctcgttggcttgccatctgttttagcaaaagtatgcatgcttgttatttattcataataattgatcgatgaacattggctcctgtgtcgattcgtt

SEQ ID NO: 46427 - DNA, 211 bp, Zea mays
  Clone ID: MRT4577_142346C.1
cttccgaggcaaacccccaagtaaaattccaaaaacaaatgaggcatgccccaacgtaaaactcaaaatttggaaaataagtgatcaaaaacaaaaggttgatgaataaaaaaaaaacaagtccttgcttggttacatgacccaattcctacaaaaacaaaaccccccccccaaaaaaaccacctacttttaactacaaaaaaaggggaac

SEQ ID NO: 46428 - DNA, 1175 bp, Zea mays
  Clone ID: MRT4577_142347C.1
cattgggtacctcgaggccggcagggatttccgtgtcgtgtggttactacacacaggaataataggacgcggccccggccgcctccgatctcagctctccgttaacacgcaaacgcaagctcccaagcagctaccaaccagccgggagagggagcgcacgcactgcgagaatggccacggccggcggaggggccgggcatctgaagctgctgggcgcgtggccgagccccttcgtgaaccgcgtacgcatggcgctgcacctcaaggggctggagtacgagaacgtggaggaggacctcaccaacaagagcgacctgctcctcgcctccaaccccgtccacaagctcgttcccgtcctcctccacggcgacaagcccatctccgagtcactcgtcatcgtggagtacctcgacgacgccttccccggcgctggccaggccgtcctccccgccgacccctatgaacgcgccgtcgctcgcttctgggccaaatacgtcgacggcaagttgcacggcatgatggtgaaggcgctcatgggggcaacggaggaggagagggcgacggcgacggtggacgcgctggccgctatggacacgctggagggcgcgttcgccgagtgctccggcgggaaaaagttcttcgccggcgacgcgcccgggtacctggacgtcgcgctgggaggcttcatcggctggctgcgcgcctgggacaaggtggggggcgtcaagctgctggacgccggccgggtcccgcgcctggccacgtgggcggagcgcttcgccgcgctcgacgtagccaaggaggtcatcccggaccccgaccacatcgccgagtttgccaaggtgctgcaggcacgctccgcggcagctgccaccagcaactgagctcgcaagtgaatgctgctgctctgccttcctgataaaatcatatcatggtacccggtttgttcgtttaatctggcgcggaaaaaacatggtttgttgtcgtaccaaactaagagtatgcatgcatgcttgttcttaattatatgtacattcgttcaagaaaaaacagattgttcatgtaacggttaggacttgctgtatatccatatgttgttgtttggttcctgcacaacttaattaagatgcgcagtttagcaaaaaaaaaaacccaagggcggccactctagagga

SEQ ID NO: 46429 - DNA, 728 bp, Zea mays
  Clone ID: MRT4577_142348C.1
actctgcgcccacatgccggctgcttctccgtgcgcgcgttgacaggctgccagccagccagcctagaggagaggggggaaaaatcatccgagagcagagcagagaggcagagagatggcggccatggcggacgccgaggcccccttcctgcagcccgctgaaggcgacgaggcggcggcgctcgccggcgtctgcgacttccgtggccgccccgtgcgccgcgccggctccggcggctggcgctccgccctcttcgtctgcgtggtggagatggccagcagcttcggctacttcggcgtgtcggcgaacctcatcacgtacctgacggggccgctgggccactccaacgccgccgcggcggccgccgtcaacgcctggtcggggacggcctgcctgatgccgctgctgggcgccttcgtcgccgactcatggctcggccgctaccgctccatcatcgtcgcctgcaccctctacgtcctgggatatggcatgatgactctagtgaccacgctccaggcacagcggtcatcgccggccggcgacatccattcctattcccgcccttcgtcgctgcaggtggacctcttctacgcctcgctctacctcattcccctcgcacagggagccgacaagccatgcggcctcgccttcgccgctgaccagttcgatgccgaccccccaaggagcgcgcgtcccccagctcccccttcaactggtggtacttctc

SEQ ID NO: 46430 - DNA, 351 bp, Zea mays
  Clone ID: MRT4577_142349C.1
cgctcgcttcaattcactagtgctcatcctgcgcattaggagacaggtagctcgagcgcgcgctacacctgctccgacacgatgcgggccatgtggaagaagaagaggatgccgatgctcaagaggaagcaccgcataatgaggcatagatctaagtgggcgcatcttgtgacgagcatggcgagcttctgctgcatcatggctgaggctcgatgggatgaaagtctaactttgcagacctgctttgcgtgctacgcaggcgatgtaaacgcgcctttatgatccattctagcatgttctgagactaggtttatatcgcaatcagaggataattatatgatgctctacgtg

SEQ ID NO: 46431 - DNA, 286 bp, Zea mays
  unsure (1)..(286): unsure at all n locations
  Clone ID: MRT4577_14234C.1
aaagggggggggggcccggtngaaaaagatataggangacagaaaagttgcaatccgggacttgggagcggtctggtgaaaagattcaatattcgaaggaataccagccgaagggattatggtggagtaattatggatgacggatgtggcagggagtttgatggagatgcagatgacacgtctcggttagtatggaacttttgggaagacagaagtaatttaggagggaataaaagattatggactggaaagagtggtgatgaaggagaagaaagtggaggggcag

SEQ ID NO: 46432 - DNA, 271 bp, Zea mays
  Clone ID: MRT4577_142350C.1
atttttgtttttttttttttgttttcttttttagggcagacaaaggagcgctaaatgaatgcccccatgttcgacaaattccacaggatgaagaacatttcatccttacaaaaatatgagccaacttcattcccgaactggggtatttcaccatccactttaatgacactgcgaccaataacctttgtcattccctgataactcataaaattgctaatcctcaaaacattaccccaaattcctttattagcaaataaatttgacagaagga

SEQ ID NO: 46433 - DNA, 249 bp, Zea mays
  Clone ID: MRT4577_142351C.1
gggtcgacgagctgctgcgcgacggcgacggccgtacgcggatccgactggtcgtcggccgcggcgagcttgtagacgaccggcttgccgccgatggtcggatgcttcgcgttcgcgtcgtcgatcgcgagttgcgcgccgttctgcaggtccttgccgatccgcgcggacgggccggtgagcggcgcggcgagaccgatcaggatcgtctgcggcgcggattgcgcgaacgcgggaacggatgcggcc

SEQ ID NO: 46434 - DNA, 201 bp, Zea mays
  Clone ID: MRT4577_142352C.1
aacaaacttgccattctcgccagcccattatttttgccaggacactacaaacaaagatggtgccttatctgatacacgccggaactctggctgttatcaccatcctcgtggctctcgccgaaggcaacacacactagccctgctgtaacaactgcggtgcttgcaacaagaagcagccttcggagtgccagcgcaacgaca

SEQ ID NO: 46435 - DNA, 843 bp, Zea mays
  unsure (1)..(843): unsure at all n locations
  Clone ID: MRT4577_142353C.1
tgacgagagccgtgatggtgtgaagaagaggagacgcagcccgggacgcggcagtgggtcgagtggcacaagcacggagaacggtgtcagccagccgaagctgattatgttcaactcaaggatcacttatgccgacactgttgaggcaacccgccagtttgacgaggagaacgtgctcagccgaggccgccatggcctcgtgttcaaggcttgttacagtgacggcaccgtgctagcgattctgcggcttccgtccacgtctgctgatggtgccgtggtgattgatgaagggtcgttcaggaaagaggctgaatctctcgggaaagtgaagcacaggaacctcactgtgctccgtggctactacgccggtcctccgccggatgtccggctgctggtctacgactacatgcccaacggcaacctcgccacgttgctgcaggaagcgtcacaccaggacgggcacatcctcaactggccaatgaggcacctcatcgcgctgggcgtctcgcgcggccttgcgttcctgcatcagtccggcgtcgtgcacggcgacgtgaagccgcagaacatcctcttcgacgccgacttcgagccgcacctgtccgactttcggcctggagccgatggtggtgaccgtgggnnnnnnnnnnnnnnnnnnnnnnnnnnnnncgacatcagctgcgacacccgtgggctcgctcggctacgnnnnnnnnnnnnnnnnnnnnnnnnnnnnnnnnnnnngggaaggcgacgtgtacagcttcggcatcgtgctgctggagctcctgatgtcccgtcggcccacggccggcactgccgcctgtcagattcattcggtag

SEQ ID NO: 46436 - DNA, 321 bp, Zea mays
  Clone ID: MRT4577_142354C.1
agtcatcttccctacccatatttatcatcctcttgaggaaagaaatctagtattatttgttgaaaatggttagaataaaactatgactctataaggttttcaaacatctgaggcatgataaatttattatccataattatagtaataataaccttaataagcataagaaaaacagagtcactctggatttcaaaaatgtcaaaaaatgagcaacagagggtccttatttaaacataagtgctgtgacttaggtgaattttcaatttaaggtagaaaataagtttttaggaggtttgtaaaagaagaatcaattttcagcag

SEQ ID NO: 46437 - DNA, 578 bp, Zea mays
  Clone ID: MRT4577_142355C.1
gaataacaaatagtgtaaacaaatttaatcaatcccattttctacagtgctatgtgttcaatcccagagacagacaaactcaatgtgatatccggtggattatcgccagagatcaccggagagaagagagaagaaagggaaagaacacaggcaagagaagcagacagaggtatgaatatttggtttctgttcttccatcccttcttcagcgcagatatttgcctcttatacgtgtggctgacccgcccacgaatacacggccacaatacggcccaataccagagattaacaaagtctaacaattgagattacaaggccaaatccggcccaacaggatccactaaaaccaaaccttgtccgcatacctctcctaccgccaactcagtcatccgcgacggtgtttgcctgatcctgatgcagcaccgatgtgacagtgccccctccagaagcaccagctggtccccagatggatgaattcgggaacctggattgcagcactgtataatcctcccaggaagccatctcaactggaattccctcccatttgatcaaaatttgagtaactgcagctgatcctt

SEQ ID NO: 46438 - DNA, 543 bp, Zea mays
  Clone ID: MRT4577_142356C.1
tcgagcggccgcccgggcaggtcgcagcctttttctcttcctttgttcattttgggacttaactgatactgtgtggttttacgttggtgctttaaataataaattgtagtttcggcttcttccaaaataaaaaaaactgttttctctgaaccctgctgttgggggggagggcaactattaccatacatcccgctagcttctgcctgcggtcagagacaacaacttctaacgttacaccaatagtgcgcgctgaaccccgctgcttatttgcagcactatatactacttccatttagcctgctagctgagccaaccgggcttacttcttgacacatccacagtagttgcctttctaccagcattctgcggctaaccccaaaaccctcttacaactagcgacaattgatgcccttggtccaacttgctctgacagacccatcggactcctaccaacaacacatcattggtggtgccctctttcatattgcttattagtggtaatttaataataaagtagtttggatgatgcgtgcggccaaccag

SEQ ID NO: 46439 - DNA, 319 bp, Zea mays
  unsure (1)..(319): unsure at all n locations
  Clone ID: MRT4577_142357C.1
ggaagccgctgcataggtgtatcaagtggttgatttcgtctcagttgattcctgcctggtcgtaggcctataattgtgttcttcgctatggtcttgctgatttcgtctagttctggttgtgtgtgcttgcttttctgtagccctcatagttgtgacgagcttaataaatgtctgtgtgctccagttgtggtagttgacaatagagttctttccttgtatctgtgtctagccaatagttttggatggttgttgactctccttttgtggtgattgttaagccatatatcgaactctnttacctaaaaagaaaaaaatatat

SEQ ID NO: 46440 - DNA, 286 bp, Zea mays
  Clone ID: MRT4577_142358C.1
ctcctttttataaatgtacttttttattctgggggattttcatagattatgccgaaaactacattatcgaactataactgataagcaatgtataagagggcaccccccatgatgggttgttggtagaacgttggagggcaagtcaaaacacgcagggtgaatggcaacaactgtaaccgctgtaacatggtgccagcgctaggcgcatcgtgccagttgaacgggtaccccagacggtgtgacaagaaggcaacaggggtcacattagctagctggctgcatggag

SEQ ID NO: 46441 - DNA, 124 bp, Zea mays
  Clone ID: MRT4577_142359C.1
ccatggtatagatctaaagtttggatctgttaatggtatagatccatttgttccaggaagaaagcgggaaccccagtgtaatcggtgctgactaagacagcttcttgagctgtccctgctatta

SEQ ID NO: 46442 - DNA, 3568 bp, Zea mays
  unsure (1)..(3568): unsure at all n locations
  Clone ID: MRT4577_14235C.1
acaaaatgtcacaggttcaaatcctgtcatccctacctattaattctctcttcgttatgggcagtagtggggagatcgattaaagtgggtataacttgaatttgtggatactatacggacgtgagacacgttaggaatagaaaaggattttcttttttttttttgttttgaaagcgctcttagttcagtttggtagaacgcgggtctccaaaacccgatgtcgtaggttcaaatcctacagagcgtgattccatatatcttatgtcgaaactaaaataacttaaaaaaaaaacaaagtagaattgcaactccaatttgacctcctccagaccagagaggaggtcaatcaaaaaagaaatattactcaatcaaagatccaactgatccccacgcctgtattgcaaatacgcagtcacgaataatcccgctaaagtaataggaattaggcctaagacgattccaaatagaaaaacttcaatcatttcgatttgttcgaggggataaaaaaagaggtacgatctatctctaaataatagtctaaactacccacgaatctcaatgaccaagaaaagaattggtaattagtgtggaaaagagtctagaataccaagaatccaaaagaaagattcttctattcaattcatttcaaataagacgtatcttgttcaagctaataaatagagctggggttatagttaaagcagccagtagaaaaccgaaataactagttatagtaagcatgaaggggttcaattccattttttttactacactacatatgttggtaaagcacttacctaagtttaagttatggaaaattcataattcatcggttattttagataatactaaaaaaacaagatagagtgagatacagaagtgtaaaaaaaagagaaaatcgattcatcagacggaacatgagtccctaattccgaatcaagagatttgttgtggaatctgtcagttaagtaaactaataatattaagaactagatcatctaaccccattgaaaaatgaaattggattttcgggagaattttggaataaaagataaataaagaattgaatttgaaaaaaaaaaaaaaaaattctttctatttcggattcggattatttcttttttaataggatggatttcatcctctttttggagcaaattttaactcattgtattccatatggaataagaggagaagaaaagcatttccacgaccccccgagggggccccctcaaaaggggaactattcctaaaatttacttttttttatttatttttattcgttttttgaaccccaacaaaagtggattcaaagttacttcaattatccttttcttttaagttcttcttgtaaagttccatgcttgctgtttggtcaagaaaattagacctaatccaacaaacaagacaaggattgattacgaatcttgattcttcaaagaatgtattccgtttctttcataacggattatccgctattcgattttctatttattagatattattttatgctaaccaattaaattcctttaactaaaaagggatcgattttgcatatacttatctttgtattgcgtcaatatgagaatatccttcctaaattctttatcttattaatcattaacttagattttcccaagatcttggccgctattccaaattaaattattctactattccgaagacaatgaaaataagtaggacccaaaaaattgtggggttctattgatgccttgaataacatgtaattttcctatagacaaggaacaaaaaagagaaaaaaaggaattctgtttcgggaccaagcaaaactggattgctgtgccataggaaggatagctatactaattcggtatactcaaaatacacctttggtacaaaattgacaatctcacaaggatgaaatatcagtaattttctatttactggtggatcccatcttttacggaatcaattccttttttgaataaaaattttgggagctcagcatgtctggaagcacgggagaacgttcttttgctgatattattaccagtattcgatactgggttattcatagcattactataccttccctattcattgcgggttggttatttgtcagtacgggtttagcttatgacgtgtttggaagtcctcgaccaaacgagtatttcacggaaagccgacaaggaattccattaataaccgaccgttttgattctttagaacaactagatgaatttagtagatccttttaggaggcccccaatgaccatagatcgaacctatcctatttttacagtgcgatggctggctgttcacggattagctgtacccacggtttttttcttgggatcaatatcagcaatgcagttcatccaacgataaaccaaattccaactatagaactatgacacaatcaaacccgaatgaacaaaatgttgaattgaatcgtaccagtctatactggggtttattactcattttggtacttgctgttttattttccaattacttcttcaattgagagaaagaaagagagtagtaagaattctcttatcccatttggaaggataccatctttataactatccatgactgtttttgtctctagcatgaccacttgagaaaatgtggaggaaagtaggggaaatggccgatactactggaagaattcctctttggctgataagtactgtaactggtattcttgtgattggtttaataggtgttttcttttacggttcgtattctggattgggttcatctctatagtaatcggaggatccagattgtaaacatgaaaaagtaggaacttagcgggtccttactcccctttatctgattagagcggaaagggcccgcggaattcttattgttataacgcggttttgttccataatctagaaattggttacctatttctatttgtaaaaataacaaagagaaaacctttgctctgatggttggaatccctccatttattcttttgtttgttaatgatgttagtgagtgaagcaatccatcggtcgatttaaagcccccgcctttcgcccataaaatggattcactcttatgaagcaacaagaaagaggggagaggatccagtattttattccatgaaggaagtatcctgcaaatcgttgatttagtttagagtaataaactaataaaaccttaatcaaaactactcaactagcctaaaaatcaaaaccacccttccatgggagggtatagattttttttttacaaaatttctgtaagttcaaagttgaacttaattcaaaaagtaaagcaattctatttgctcacaagaaatgcgtcccccgccataccttctttccctctgtttgtccactaccgcgcccgaacctaagcaaaggaagtccaaaagacagacccgaataaagaataaatagtaatctttgacaaaacaaataagaagaaaaatgattcttacttcgatacaagaagaatcgacacacgaaaaacgcttttttgcctttttcttgtgnccaatagaggattaagaagacccaccattcctcctaaaaggacttgttgcttttattggttctcgcctttg

SEQ ID NO: 46443 - DNA, 454 bp, Zea mays
  Clone ID: MRT4577_142360C.1
aggtcctgtgtaccctcccgtagtacgagtagcgtcggatcctacgatccaaatctctggctgcttgtagggagcagccatggggaaaaactacccgaccgcgagcgccgagtacacgtgacgctggggagaatgccaggggcgagctgcgagccccttatcgactgagaagagctgcgccccgttcatagcctccgcctctgcgacggcactccgtggagacgagcggcgcgttttggacgaccggggctgcattcggtacagggatctatctgtgggctttggctaacagcgctattggcgcgctgtgcatcgcggtgatcgtgatcgacccgctcaagggctgattacaagctcctctcttacgaccgcttggtaccaacctcgccgcaggcgcggaccaggacggctccgggggcccatgatgatctcatttccaccactactgaccggc

SEQ ID NO: 46444 - DNA, 477 bp, Zea mays
  Clone ID: MRT4577_142361C.1
ctggagctgaaaaatccatttgttcgtaactggatcgatcatctgtggtttgaactacgcgtcgttaaatctgatggtgctctttctgcagaaatggtttatatgtttgcagaatggtacaaaccaggatgcttgcttgagtaccctctgggtggaactggagcaataatagatgcccttgtgagcggtattgaaaaatttggtggcagacttgctcttcgttctcatgttgaaaagatcttaatagagaatggtcgagcagttggtgtcaagctacaaagtggacaagttatccgtgcaaagaatgcggttgttaagcatgcatctatgtgggacactcagaataaaaaagagccgatgctgtatgaaaatcatatggagattaacagcaagcacctccacaatgttaatcgaggtggcatctcctcatcatagacgatgatttggttgggtgtataattctcggtatttatcaca

SEQ ID NO: 46445 - DNA, 163 bp, Zea mays
  Clone ID: MRT4577_142362C.1
gaagcttccataagtttccatggggggttcctctcccggagggcgatccacaggggtcttctaccccgtccggcacttctcgcgctccctctttcgccccgtccaagggagggcttccttcatataatttttaaaatgcctggaaaagtctttggtcaaagtc

SEQ ID NO: 46446 - DNA, 205 bp, Zea mays
  Clone ID: MRT4577_142363C.1
gggaacaaaacttttttcttttcatttcaattgtccattcagggcattgctcacactgaccctgccccccagggggaggggggacacattattacccaaacatcgccgctaaaggacccaactagctagctagccaggggttatactacagcacaaagttttttcagggggggacaccgccggcacctgcccggggggccgttca

SEQ ID NO: 46447 - DNA, 1184 bp, Zea mays
  Clone ID: MRT4577_142364C.1
aaaagaattccacgcaaatctcaagtgctgacctgtgttccttaataagtgtagtgcttatttacgttaaaggaacaaatagcagttcactagatacacttatttgtttttttaggaatgtaacagttcatgagttccttttaaatgatctggtttcaggggcacaagcagtggttggctgaagtccagttcctgggtgttcttgagcacccgaacctcgtaaagctgataggctactgcgccgtggattcagaagccagcaagcacaggctgctggtctacgagttcatgcccaacaagagcttggacgaccacctgttcaaccgagctcaccctccgctttcatggagactgaggctgcagatcatgctgggcgctgcgcggggcctggattacctccatgaaggagtgccagaagttcaggtgatctacagggatttcaaggcatccaacgtccttctggacgctgaattcaagccgaagctgtcggatttcggcctcgcaagagagggcccaacagaagggaagacacatgtctccaccgcggtggtggggacgcacgggtacgcggcgccggactacatcgagacggggcacctgacggtgaagagcgacgtgtggagcttcggcgtggtgctgtacgagatcctgacggggcgacgctcgctggagcgcagccgcccccgcggaggagcagaagctgctggggtgggtgcggcagcacccgcccggacggcgccgggttccgggccatcatggacccgcggctgggcgggcggtacccgctggccgccgcgcgcgaggtggccaggctcgccgaccgttgtctcggcaagaaccccaaggagcggcctgcgatgagggacgtcgtcgaggtgctcgagcgggttgtgcagatggagccgacgactacgaccgcagacaagagaggaggtgacggcaggctgccggcgaagaggtgacggacggcggcggcggcggcgttgccgggatacgccgctccgtcgtcccgttctggccctccgggtgtgttctaacttccgaagtttgtatgtatcggaaagtatacgtcaggagaaacgaacaattttctgaacaggctatatactacatgtgagattcaatggtgattttgtgatttgaacacgcaaatgaagattcagtaaaaattcacataactaact

SEQ ID NO: 46448 - DNA, 260 bp, Zea mays
  unsure (1)..(260): unsure at all n locations
  Clone ID: MRT4577_142365C.1
cggccggggggcgcagatggntaaatcgctagatacctngggagagatagataatctctcctacgcgttgagagcaacatttgacagtttgccacttgtaccaacgatgacctaatttactatccttgtatgcactcttggtctnaaggaacattacgtggcgtttcacgggcacagggggaagtcgggggactcctttgctaacttctccaactccgacatgtctgtgctttgagtatggatgatataattccagtgtg

SEQ ID NO: 46449 - DNA, 192 bp, Zea mays
  Clone ID: MRT4577_142366C.1
atgcgctctgctctgaggactggaggtagtgctggtaagctttctttgcttctggaacaacatccggtaatgtgtaactttacgtgctagcaactacttgctgtttgatctcagacactttaatgatccacttcctgatatactctacattctataacctttcggtctctcccttaacattatgctagccac

SEQ ID NO: 46450 - DNA, 479 bp, Zea mays
  Clone ID: MRT4577_142368C.1
cagaaataagaaagtacatttctaaaaaaaaaaaaaaaaaaaaaaaaaaaaaaaaaaaaaaaaaaaaaaaaaaaaaaaaaaaaaaattaaaaaaataaataaaaaaaaaatatttttttttataaaataaaaccttaaaaaaaaattttttttccttgccgggggggccttttaaaggggcgttttttgcatttttccttccccctgggggcggtttggcctttctttttggggccccttttccccttttggggggtttttttccatttcctgggcctgttttttacccgggtttacttggaaaacctttgggtttccccaattttatcggtttgaggaaattccctttttccccagttgtgtttttagtgaaagggcccccccggtccgccttttccatcatttggcccccctcttgtggaattggcccccccttttgttggtgctttttgcgggggggggggggggtttccccccgg

SEQ ID NO: 46451 - DNA, 393 bp, Zea mays
  unsure (1)..(393): unsure at all n locations
  Clone ID: MRT4577_142369C.1
cgaatcacagacgcgtctatctcagcgggcggcactgcactaccctgccctgccatcatatcgnacgagagcccggccgaccaaaaccaagggaaaggcttggttgttccaaacctccgaaccctgcccctgcccggcctcttgccggcaacggggtggcttcccccgccccagttccccccgcgatttcctgttccaacgtgttcaagacgcttataccctgccttgcggtcgttcaaataggccgggccataccgccccaaccctgctctggcgagatccgcagcctgctgcagcaggccaacaacacccccgaccgccgcaccatctgcggctgcctcaagaacgtcgccaacggcgccaacgggagcggcacctacatcagccgcgccg

SEQ ID NO: 46452 - DNA, 322 bp, Zea mays
  Clone ID: MRT4577_14236C.1
attcggctcgagcgttgttttaccacagtatatttatatccgctacgaaaggcaggaacagggtggccctaatcgggaccctgctgcattttagggtggtcaggaacacaaatatgggataggatctatattgcatgcaagcctaaccgcacagggggagaaccttgttggtatgtctgggtgcatttccaggggcgagcaagaccttatgatcagaaaaaaaatgatgaccgcgccccctatgtacgggggcgtttccactgcacgcatacgctagtatgtgaggcgactacaacgcgacacatgcttcaatgggtgaacc

SEQ ID NO: 46453 - DNA, 365 bp, Zea mays
  Clone ID: MRT4577_142370C.1
tttttggggggtgtattaaggctatgcccataactttctactatgcaatgagcccattctctatcctttctttcatgcttgtacttctatatacccaaacttacataagactagatgaattttaagaggactcttccaactagaaaaaaatctatcatgggcagcaaagttgattctttatttgtgattgctctgttagataacaatttcaatttcattaagaaaaactaacttaataaatggaaaataaaaattgatcgagttccttttattttattcttctaatccaaaaaatttctcttttttttataacataggtcgtcgattcggcattggaaaaagggctgcgtgcccttttaataaat

SEQ ID NO: 46454 - DNA, 916 bp, Zea mays
  Clone ID: MRT4577_142371C.1
gccggcggccgcgggcctactcctcttccgacacacacacactcgtcgtcgacgacgagcacgagcacagcgtcaggcgcgcgtcgatggcgatgagtgacacaggctcgagcttcgcgcagtgggctgcgctctaccaccaccaccaccacgacgacgccggcccggtcctgctgccccccgacgacgacgccggcatcaccgctgcggccgccgccgtagcgagcccgacgtcgggcgggtccagcggcggaagccccaccaaggccgcggcccatctgctgcacggggtagaggggccgcggatcgggaagccggcggcgcggcggcggtcccgcgcgtcgcggcgcgcgcccgtgacgctgctgaacacggacacggccaacttccgcgccatggtgcagcagttcacgggcatccccgcgccccccgcgggggcgttcggggccccggtcatcaacttcgccgccgaatacggcttcccgccgtcctcggccgccgtcatgtccttcgaccaccagctgcaccggagccagcaccccgcgccgctccaggagcagctccgcaggcagcagcagcagcagcagtacgccggcgcggcgtcgccattcggctatagcaacggcggcggcggcggcctgctgcaagaacggcggcgacgtcttcgcccccgccgcctcccacgggttcgccgcgtcggcggaggagaggatgttcctgcagagcatccaggcggcccagatgccgcacatgcccgccgctaacactagcactaatggcttctttgcttgaccaaggcttgacgggcatccacgccacgtgcatggaatggaagcttgggaaggggaagcgaagattagcagcagccaaaaaaaaaagggtaatcagagtcagttaagtttctcctggttgtgtg

SEQ ID NO: 46455 - DNA, 296 bp, Zea mays
  Clone ID: MRT4577_142372C.1
acggagaggagaaccagcagcctccaataagagccagccagagaaactaatataactctcgccgtcgtcatccgagcgaacaagccaaccgaccccgtccccaaggcaatccgccgccgacgtaccaccaccaccgcatgagcgagatggagatgaagaggatcctcttcgccgtcctcgtcgtcatcgccgcctcgtccaccgcagtgctggcctgcaccgaggccgtcgacgcgggcgccccaactgcctccgagtcgtccgccgaggcttccgatggctctggcgctggcgct

SEQ ID NO: 46456 - DNA, 1021 bp, Zea mays
  Clone ID: MRT4577_142373C.1
gccggccgggccggggacacacacactcgtcgacgaacgacgacgacgagcacgagcacgagcagcgcctgacgctcggctccgacccgcgcgcgtcgatggcgatgagtgacacaggctcgagcttcgcgcagtgggccgcgctctaccaccaccaccaccacgacgccgggccggtcctgctgccccccgacgacgacgccggcaccaccgctgcggccgccgccgtagcgagcccgacgtcgggcgggtccagcggaggaagccccaccaaggccggggcccatctgctgcacggggtagaggggccgcggatcgggaagccggcggcgcggcggcggtcccgcgcgtcgcggcgcgcgcccgtgacgctgctgaacacggacacggccaacttccgtgccatggtgcagcagttcacgggcatccccgcgccccccgcgggggcgttcggggccccggtcatcaacttcgccgccgactacggcttcccgccgtcctcggccgccgtcatgtccttcgaccaccagctgcaccggagccagcaccccgcgccgctccaggagcagctccgcaggcagcagcagcagcagcagtacgctggcgcggcgtcgccattcggctatagcaacggcggcggcgacgtcttcgcccccgccgcctcccacgggttcgccgcgtcggcggaggagaggatgttcctgcagagcatccaggcggcccagatgccgcacatgcccgccgctaacaccagcactaacggcttctttgcttgaccaaggctcgacgggcatccacggctccccgccacgtgcatggaagcttgggaaggggaagcgaagattagcagcggcaaaaaaaaagggggtaatcagagtcagtcagttaagtttctcctgggtgggtgtagttaggttgctcctccgcttgcttaattcgcgcagccttggttctccgctgcctgcagagacgatgtaaatatcttgtgttttctgatgatgtgggagtcttgtgtcctaac

SEQ ID NO: 46457 - DNA, 594 bp, Zea mays
  Clone ID: MRT4577_142374C.1
ggcgttggagtacccgtcttttacagcgaaggaagtttacacctgtttcctgacgttgatcgagtggaggagcactctcaaactcttcctacccttctacttcttcttcctagtaatattaaaagtctgggtaataccgacagtcggcaaccttccagtcgactgttttgttgtcgactgttcaagagtcgtgttagtataataagtggtagaagcagttgtagtcggttttgtagtagaattagaactggaagcaattgtccttagtttcgacctaattttaaaagtgcaagtattcattacagtgcaagaactgttggtagaagcagttggtttcaacctactaaaataatcactaaaccttagtttctgcttacgctgagcagcgtctcaagtgaggcgtactaggcctggactgctgtcctgagctgaggagtactaggcctggactgcggggggtgtcctgagctgaggagtactaggcctggactgcggggggtgtcctgagctcgtgaactccgaggggttacgagtagcgctagcgtagggtagggtagggtctacaggagtggggttttagggagctagtcaaag

SEQ ID NO: 46458 - DNA, 102 bp, Zea mays
  unsure (1)..(102): unsure at all n locations
  Clone ID: MRT4577_142375C.1
ttctcgagcgcgctatacgctggtcctccagcacacatgccctatgcagccttctaactaccatatgagaggcacanaatccttacacgtccttcaacgttc

SEQ ID NO: 46459 - DNA, 317 bp, Zea mays
  Clone ID: MRT4577_142376C.1
catcccacttccggtgcgggcttcacctcctttgcctagtatcttgagggctacctatcgccgctccgctcgttcttgccttccacaacctgctaatcgacgccgcggcacgatccgggcacgtgcgcgtgtcactctagctcttccaccgcctgcggtcactccatgtataccgcgacgccgacacctaccggattcttacccaatcactctgccggatggcccaggttcgcaccggagactacacttgctggacgaaatgctgtgcaggggcaaccctgccgatccggtgggcgtacaccaccgtgcctgaacgc

SEQ ID NO: 46460 - DNA, 480 bp, Zea mays
  unsure (1)..(480): unsure at all n locations
  Clone ID: MRT4577_142377C.1
gaaatgcagggcggaggttgtgcccaggacgacttcttcgaccagatgctgtccacgctgccggccgcgtggtccgaccttggctccggcaagtcgccctgggagctccccgcggcggcgggggccgtgaccgaggacaccgccgcgctcgacgagcctgcgctcctcgcgtcgcgcctccgccaccaccagatcggcggcggggagaagcccctcatgctccacctcagcgacctgcacggcctcggcgccggcgccggcgacgacgcggggttcatgccgctaccgctgttcacccagcacctcgccagggacgacgtggatgccgccttcaagtcccccaatgccgccggaggcgaccgggagctgtacaacgggttcggagccgctgggaatatgcacaccgtcgccgtgcatcagnccgcgtcgttcgggcagggcgggtcaatgccggcggcgccgcagagcttcgggggtggc

SEQ ID NO: 46461 - DNA, 542 bp, Zea mays
  unsure (1)..(542): unsure at all n locations
  Clone ID: MRT4577_142378C.1
tgagtggagcgtcgggcggtttctctcccggtgggggcctttcctctcccctggggctccctataaaatttggttgagccctactccgggggggggggaggcgagccccctccggcttcttcctccccttggcggaaagctcgccggcggagctcgccggtgggcccttggcgttcggcgttcgatcgccggagccgtgccccgtccgagccccggcgagcctagccacgcccacgcagtggcccagctgcgccggagccctcgcagtccgctggcgaccgcgcctcgcctcgtcggcgggccgtacgggaagggtgaagacaacccaaaattttgatttatttttcaaaacggggtttcaattagtttatgaattttgcaattattggggtataatatgagaatggtgggattcagaattcatgcgtatgtgaactattgatttttagtatatatgcgatgaattagtggaattatcncnccccccccccccccccccccgacccccccccccgccaaaaaaaaaaaaaaaaggggcggcc

SEQ ID NO: 46462 - DNA, 231 bp, Zea mays
  unsure (1)..(231): unsure at all n locations
  Clone ID: MRT4577_142379C.1
ctcacacagacggcaactacctttaatctatactttcatgcacacctcgcgcagacgtgtggggtcatctttgggagggtcagcggcctatatgacactatcttcnccctatacaactcttaaaagatacacctacttcctgtaattaccacacctgcatactataatatacatatcatactaaccaccattcttcgcctttcttacatacccgagtctgactaacaaaat

SEQ ID NO: 46463 - DNA, 367 bp, Zea mays
  Clone ID: MRT4577_14237C.1
aaaaccaaaagtgtttaaagggacagactttaattacaaatgcaaatactagagcagtttaacaaggggggatggaaggaaacacccaaacattacccaggggggccaggaaaaaaaaaaaggtttttaaaaaacaaaacctggtttgacaggcaaaaaaatttatgcaagcagatcaatatttcttcttcttgtaaacggaataaatggcgccctttgggggaaactttttgaaattctttttcaaggggggcaagttcttgcgtgccttggaaaaattcccctttttaatgcccttgccgacgtaccaatgaacaaacgcgcgcttggggtaaataaaggcaaacttgttgttgatgcgggaaaa

SEQ ID NO: 46464 - DNA, 431 bp, Zea mays
  Clone ID: MRT4577_142380C.1
cccacgcgtccgaaatgctcaacctcaagacgaacaagcgattgttgatttgcagacggtgggagattttctcaccgacaaaatgctcaacctcaagacggtgggagatgcaccatacaaccggcagtggtgttctggacaaagaaagcttgtaccttaaaacaggaggatacaagaagctggagtggttgtctgaaggcttttgaactgcttgaagcattagtgtagcttttgtgcttttgtgactgatcagctctggagcagctagagtgatgtagttgtgggcttttgaacaatagctggagtgatatgaaacattagtgatgtagttgtgggcttttgaactgcttcaagctggagtgatgtcgttgtggtgcttttgtgactgatcatctctggagcttttgtgaatgatctagctagctatctat

SEQ ID NO: 46465 - DNA, 200 bp, Zea mays
  Clone ID: MRT4577_142381C.1
tccggctcgaccaagcgtcaagtcccatccatgtgcgctgaaacatactcactaacatgtctgtcttcatcgtaaggatgtagcagtgcctccacagcttcggccacaacatcgatgcgcagcagcacacgaaaggctatgtacagcacgagacgggctaggagcagctcatgatggaccattgggaccacatggagggc

SEQ ID NO: 46466 - DNA, 1047 bp, Zea mays
  Clone ID: MRT4577_142382C.1
ctacgtgcctatggatcgaaggctcccgtccccaaggtcacgctcgtcagcgaggccttgacggttttccttgaacaagactctagatgcaatcggaggtattgtgaggttccgccggcgtctcggcacaagtgaaccacgatctgcatctcagtcgtctccccaagcaccatcgcctatcatggatgcctacaggcaccagttgcagccagcaaaagcaaacttacaagtgagctggttcctcccgcggattcaccagtaataaattatccaatgctttagacctagcaaagtgctacaaagaaaaggtcgtgcacatcacctacagggaggcctacaaagaagctttttgttaatgacgttgattagaaggatggaggggctgactgtgctgcagccaaagctaggcttattagctcctgcaagatcactggaatagatagttcagaacaaataagtgacattttgcgtggcattgaaagaagagtgatactgctttggtcatgtcttcttccacatgtgcattgagatctgtggtgagctatgtaattgacccaaaaggcacttcaagcgggcaggaaagtctaaggcccttacttagtacttccaaatttatatgagccatcaacttaatgatgattaaccttgattgcaccagctgaagttggtgcataaggctgcaacaccgtctagtggagggtgttctggacaaagaaagcttgtaccttaaaataggaggatacaagaagctagagtggttgtctgaaggcttaactgcttgaagcattagtgtagctttggtgcttttgtgactgatcagctctggagcagctagagtgatgtagttgtgggcttttgaacaatagctggagtaatatgaaacgttagtgatgtagttgtgggcttttgaactgtttcaagctggagtgatgtcgctgtggtgcttttgtgactgatcatctctggagcctttgtgaatgatctagctagctatctataaatgatctagttatgaataatattataattgtgatgcttttgtgaatc

SEQ ID NO: 46467 - DNA, 768 bp, Zea mays
  Clone ID: MRT4577_142383C.1
ctagattggtatcgaatacaattcttccaagagatatacgtcgggaatatacttattttggaaaggggacttggatctattgatgcggtcgctggcgctcatgctgacgtggtccgtcgccaccgtgctcactctcctcgccgtgggctcgccccatccaccacctcagcaatgctagaacggaaaaccaggttgtgcaaaagagtacttgcgactttgaaggtcttatggtcagtaatagaggatatgacgaagtacatatcaccagaggatgcaaaaagattgatatctaaagagactgtattttgtaatgtaacatttggtgtggtggatgcaattccatgatagcgaatggcataagatttaatgctaagaagaaacaagttggaaattattactctaccaaggtatatactagagcgaagagcgaacaacaatctaagattgcagcaagaaaggtccagcaaggatggagtcaggacttttatccatgcgagaaggaaccagattatgtacatgtatatgtgtggatagaactaaccgccgatattatcctaaatctaagcacggtcacccacaaaaaatgtgtaatttgcttcttcccagacatacgaaatgtgttatgcggactatgttggctattggaaaggcattctaaatgccgtctgtaatgtttgatggttataaactattgtcgtgctatgtaatatgcggtcttgacataaccgctaggtttgtgatgttgttgcatgttacagctgcaacttt

SEQ ID NO: 46468 - DNA, 961 bp, Zea mays
  Clone ID: MRT4577_142384C.1
aaatcaaacgtatccttacagattaagaaatcaccaatgcaacaactattttggattccaagcaatttcggtgttgcaaatgaggctagcatctcacctgaagttctcaaaatatattttttcctgatcatgggttgtatcattgtctgattgacattttcatgattactctaaggtatatacattttagtccactctgatctgctccaccttcatccttaattacattccaaacatttataaggcgaacgttgtttattagattctttttaaaaaaactgaaaatatagcagagttgtatgtcctattaaaaagaggatggtcatattgcatgaactgttattgcctgaactttttattttgaaacggagtggtcttattgcctgaacctgatattttgagctctgaaatatgtgattgactgtagaattatttcaagaacagactgtattgtagtaacctttttctcctggagtataattatctgtattcgaatgctcctttttatatgatgatgaattgttctacagtatctttatttgcaaatgtagcaacaatatactaatttgatgtacttttttctagggtgttctggacaatgaaagcttgtaccttaaaacaggaggatacaagaagctggagtggttgtctgaaggcttttgaactgcttgaagcattagtgtagctttggtgcttttgtgactgatcagctctggagcagctagagtgatgtagttgtgggcttttgaacaatacctagagtgatatgaaacattagtgatgtagttgtgggcttttgaactgcttcacgctggagtgatgtcgctgtggtgcttttgtgactgatcatctctggagcttttgtgaatgatctagctagctatctgtaaatgatctagttgtgaatgatattataattgtgatgcttttgtgaataaataattgtggtgtttttgtgttt

SEQ ID NO: 46469 - DNA, 2813 bp, Zea mays
  Clone ID: MRT4577_142385C.1
cattgtacccctcgaggccggccgggagagcgagtgtgctagtgagcgtgcgtcgcgtcgtgcactgcagtagcctcagctcctgtctcgtctagatcgatggaggttgccacgcacatggcaaggtccagcaccgtgtactggtcgctgctcgccgtgttctcttggttggccgccgccggcgcaggccttggcgacggcgggaggtcgccgccgcaggtgtacgtcgtgtacatgggcgccgtgccgccccggacatcccccagcctgctcttggaaagccacctgcgcctcgtcagcacggtactcaagaggggccggagggcagacagcttagtggtgcaccagtacaagcacggcttctctgggttcgcggcgcggctgtccaaggacgaggccgccgcgctgaggcggaagcccggcgtcgtctccgtgttcgccgacccggtgtaccagctgcacaccaccaggtcctgggacttcctgcagcagacgacgacggccgtcaagatcgacgacgccgccggcgccggccctgctagacgcagcggcaacaagaagggtaaggccgccgcacccgccaacgacccgtcgtcgtcgtctccggcggcggacactatcatcgggctgctcgactccggcatctggcccgagtcacccagcttcaacgacgccggctttgggcgcccacccagccggtggaagggagtgtgcatggctggggatgacttcaactcatccaactgcaacaataagctgatcggcgcgagatactacgacctcagcagcgtaagggggccggcaccgagcggcggcgggtcgccgcgggacgacgtgggccacggcacgcacacgtcgtccacggccgccgggagcgcggtgaccggcgcctcgtactacggcctcgccccggggaccgccaaggggggctccgcggcctccagggtcgccatgtaccgggtctgctcccaggcgggctgcgcggggtcggccatcctcgccggcttcgacgacgccatcgccgacggcgtcgacgtcatctccgtctcgctgggcgcgtcgccctacttccgcccggacttctccgcggaccccatcgccatcggctccttccacgccgtcgccaagggggtcacggtcgtgtgctcggcggggaactccggcccgggcgccgccaccgtcgtcaacgcggcgccctggatactcaccgtcgccgccaccaccatcgaccgcgacttcgagtccgacgtcttgctcggtggaaataacagcgccgtcaagggtgtagctataaacttctcgaacctggacagatcccccaagtatccattgatcaccggcgcagcggcgaagtccagctcagtttctgacaccgactcagcaagccactgtgagcccggcacgctggacagcagcaagatacgagggaagatcgtgctgtgccaccactcgcagagcgacacgtcgaagctggtgaaggcggacgagctccagagcgccggggcggcggggtgcatcttggtgatgaacgacaacgagagctcggtggccaccgcctacctcgacttcccggtcaccgaggtcacctccgccgccgccgcggcgatccacaagtacatcgccgccgccagcgaaccggtggcgacgatcacggcggcggccaccgtgacggagtgcaagccggcgcccgtggtggcctacttctcgtcgagggggccgtcggggcagaccgggaacgtgttaaagccggacatcgcagctccgggggtgaacatcctggcgtcgtggatcccggcgtcgtcgctcccgccggggcagaagcagccctcgcagttcaacctcgtgtccgggacgtccatggcctgcccgcacgtcgccggggccgccgctaccgtcaaggcgtggaaccccacgtggagccccgcggcggtccggtcggccatcatgaccacggcgaccacgctgaacaacgagcgcgagcccatgacgacggactccgggtcgccggcgacgccgtacgactacggcgccgggcaggtgcacccggcgggcgcgctggaccccgggctggtgtacgacgccggggaggacgactacctccgcttcctctgcaactacggctacaacgcgtccactgtgaggctcgtcgcctccaccctccccagcgggttcagctgcgcggccaacgttagcaaggacctcatctccgacctcaactacccgtcgatcgccgtgacggggctcctcggcaataaatcggctgcggcgggccgaagccggaccgtgacccgcaccgtcaccaacgtgggggcgcaagaggcggcctcctacacggtcgccgtcagcgcgccgcccggcctggacgtgaaggtcacgcccagtaagctcgagttcaccagaggcgtcaagaagctggccttccaggtgagcttctcccgtagcgggaacgacgacgacgcggcggcggccaagggcgccctttcgggctccataacatggtcagacggaaagcacatggtccgcagcccgtttgtggtcaccagctgaaacatcatggcaatacctgacgcgcaggcacgtcaagaaatgctgtgatctcagatataaagtataggatacgatgttgaaagccactgctagtggcaaactcagaatcatcgaagattctgaaactgggccttccaaaacgccttggtcagaaatgacggttaaacattctaatataatgtcgaaaccttaggctcatgtacaatgggaaatagtaagcatcatgacagctggaagtattcagtggaactcgatgcacagtttgc

SEQ ID NO: 46470 - DNA, 1002 bp, Zea mays
  Clone ID: MRT4577_142386C.1
gaccatttaaattcccatctttaaatggtacatatctgaagaattcgcacagatcttgtgagtgccatttaaagttttgttgctttcatttattaaaaaatgatctgcttaattcttacatgttcctcctctcttgggcaaatagcagtgctccgtggtgtcatctggttatggagaaatttaggacaaaagggcaggttaagcgcaaggctggaatcaactaagaggagagaatttgaatgtgcatgagatatcttatcgagtataactgtttaaggagaagctgatttttttcttagcataatctaatacacttactgatatgatttatccgtatctgttgggaggatgaaatctcatcaatttttattttagtttattatgattgtatttttagtctaatgtacaattttctagcacttggctttgctagatctcgataatgacactgcattatttggcgttttttatggatatggagcatgaaagtaactagatgcaaagaatagtactttttacgtctatgatttatttcacatcaaaactgtatttttatttgcaaatgtagcaacaatatactaatttgatgtactttttcctagggtgttctcgacaaagaaagcttgtaccttaaaacaggaggatacaagaagctggagtggttgtctgaaggcttttgaactgcttgaagcattagtgtaactttggtgcttttgtgactgatcaactatggagcagctagagtgatgtagttgtgggcttttgaacaatagctggagtgatatgaaacattagtgatgtagttgtgggcttttgaacaatagctggagtgatatgaaacattagtgatgtagttgtgggcttttgaactgcttcaagctggagtgatgtcactgtggtgcttttgtgattgatcatctctggagcttttgtgaatgatttagctagctatctggtaaatgatctagttgtgaatgatattataattgtgatgcttttgtg

SEQ ID NO: 46471 - DNA, 807 bp, Zea mays
  Clone ID: MRT4577_142387C.1
ggccgccacccaccccactcggccactcccccaggcggcgaggcgcggcgcccatgcgccaacccctgttcgcaggtcgcagcagccgctagcacccagatcccagagtcccagaccatgccgccactgtgccttcttattttgtccgccgaacaagccagtagtggctacatcgtgaagggcggcaaggcagatctagggcgatcatggcttacgtcgagagaggtgttggaaggtctcgtttatctgcatgaacaaggtgtcattcatagagatatcaagggcgcaaatatactgagtaccaaagaggttaatagaatgtaccatgaatcacatgaatttggtggtcatatgttcaacactctcctagagggtgttctcgacaaagaaagcttgtaccttaaaacaggaggatacaagaagctggagtggttgtctgaaggcttttgaactgcttgaagcattagtgtaactttggtgcttttgtgactgatcaactatggagcagctagagtgatgtagttgtgggcttttgaacaatagctggagtgatatgaaacattagtgatgtagttgtgggcttttgaacaatagctggagtgatatgaaacattagtgatgtagttgtgggcttttgaactgcttcaagctggagtgatgtcactgtggtgcttttgtgattgatcatctctggagcttttgtgaatgatttagctagctatctgtaaatgatctagttgtgaatgatattataattgtgatgcttttgtgaatatataattgtggtgcttttgtgtttatgtgatg

SEQ ID NO: 46472 - DNA, 1254 bp, Zea mays
  Clone ID: MRT4577_142388C.1
attgggacctcgagccggccgggaaacccgacccaactgttgccgccaccgctgccgacgtagtcgcacggccgctccctgacccacacctcgcacaatgcccccccctagatcctcaatgcaccgctaggtcccgtccacagcctctcactgccgccacctctaacgcgcctaggaccatcgccacctccacatctagcttctggagtcgagatccatggtcgactccactggaggagcccggatctggcctaccgggcatggtctcgagctttaggcatctcagcaggcagcggtgtactccgtcatcgcccaatggagcagccgaccaagcaagaactctatccatgctcgtgccgaggcgctgtctctactctctactccatccgttctgctcctgcgcctgcgcgtcgtcctctacggatccgtccaccgtcgcgccagcacgatgtgaaccaagacacgcctccgcctatgcgtccaagacatgcctctgcatctgcgtccgtgcactggctacgcagcatcgattacggagtggagtctacctactcgcaattctctacatatgaggacttgaggatttagagcaagacctaaagtaagttactctgaggtatacccttgaagggacacactttatgattccatggtttgaatgaccaatcatttatgatgtccgtgctcgactgattccttgtactatggtattcaatataaggtattcaatattttcattcatgctgctgaggatgaggtttatatcttatcttgtttatgtttatatttatatgagccatcaacttaatgatgattaaccttgattgcaccagctgaagttggtgcataagttttgcctcgcactaatttgatgtacttttttctagggtgttctggacaaagaaagcttgtaccttaaaacaagaggatacaagaagctggagtggttgtctaaaggcttttgaactgcttgaagcattagtgtagctttggtgattttgtgactgatcagctctggagcagctagagtgatgtagttgtgggcttttgaacaatagctggagtgatatgaaacattagtgatgtggttgtgggcttttgaactgcttcaagctggagtgatgtcgctgtgttgcttttgtgactgatcatctctggagcttttgtgaatgatctagctagctatctgtaaatgatctagttgtgaatgatattataactgtgatgcttttgtgaatatataattgttgtgct

SEQ ID NO: 46473 - DNA, 805 bp, Zea mays
  Clone ID: MRT4577_142389C.1
ccacccggccatgcccaggctcccacccgccaggccgccacccaccccactcggccactcccccaggcggcgaggcgtggcgcccatgccccaacccctgttcgcaggtcgcagcagccgccagcacccagatcccagagtcccagaccatgccgccactgcgccttcttattttgtccgccgaacaagccagtagtggctacatcgcgaagggcggcaaggcagatctagggcgatcatggcttacgtcgagagaggtgttggaaggtcttgtttatctgcatgaacaaggtgtcattcatagagatatcaagggcgcaaatatactgagtaccaaagagggaatgtaccatgaatcacatgaatttggtggtcatatgttcaacaccctcctagagggtgttctcgacaaagaaagcttgtaccttaaaacaggaggatacaagaagctgaagtggttgtctgaaggcttttgaactgcttgaagcattagtgtagctttggtgcttttgtgactgatcaactctggagcagctagagtgatgtagttgtgggcttttgaacaatagctggagtgatatgaaacattagtgatgtagttgtgggcttttgaactgcttcaagctggagtgatgtcactgtggtgcttttgtgattgatcatctctggagcttttgtgaatgatctagctagctatctgtaaatgatctagttgtgaatgatattataattgtgatgcttttgtgaatatataattgtggtgcttttgtgtttaaaaaaaaaaaaaaaaaaaaggggggggggc

SEQ ID NO: 46474 - DNA, 692 bp, Zea mays
  Clone ID: MRT4577_14238C.1
tttttttttttttttttcctaacattaaaaacatgtattcctaattgatttcgttagtacaaatcaaggaaaactgaaaacattggcgacctgcctgagcaattagtgaggaccttttggtttcttcttcagaagaggaatacacatgacaagactagtacacacacggcaggaatacacacggttgttcttttttattgaaccaaagattgacgtgcctgttaactgaagaatcagctgtttaccccagccttgtacagttgcacagactcagggccagacgtcgcttttcattggtgtatggggggacaaagaaaacatcaaaaaccacatatcatccattgttgcacataagtcgtcgttgaacaaggccccaccaattggatgcagctcgcttccgtcgtcgagatctagttctctggtcgtggccatctgccagtgcgggatcccgccgccgaaggacaacacctcccgtattagctggctgtcacaacgtacttgtggttgtgcattcatagcagatgatcgtggtggctgcatctcgagacttcaaccgtccaaccaccacctctgctttctctcccgctgtcgccgctttccactcctccgcctgagcgcaagggtgaaaaataaagcgggaaatgactggtgaagcgcgcacgtaaggattggggaagaaatcacgtcacgga

SEQ ID NO: 46475 - DNA, 420 bp, Zea mays
  unsure (1)..(420): unsure at all n locations
  Clone ID: MRT4577_142390C.1
aaaaaaaaanaccatattattgagnaccaacaagcaacatagaaagtggaatccagtagcgacaatagagcaacaatggcgaccaagatattttccctccttatgctccttgctctttctacatggggtgctaacgcgacaattttccctcaatggtcacaagctcctatagcttcccttttttccccataccttccatcaattatagcttcaatatgggggagggcgggtcttcaaccatataggctttaacaagcaattgcagcaaggaacatacctttattgcccttgttggtttaacaattggcagccctatttttggtgcagagattggtacaaaccataaggggacaacaggtgtagcaactcgtggtatttgtgatgaaccaaggaggtttgggaaaattttttgtgtatttt

SEQ ID NO: 46476 - DNA, 262 bp, Zea mays
  unsure (1)..(262): unsure at all n locations
  Clone ID: MRT4577_142391C.1
aaaccccnccgaccggccgcggagacccagggcggacccacgcatactgattacctgttatagctcaataataaagacccttgtgccgacgctcgtgcttgtgtcaaaagacaaaatgcgcgtacgttagatagaacgaagcaaacggcgcggatgtacacggtcgaagaggacgtccggaagcatgcggcgaccaaggtggtgtatagggtgacctaaagttaacggaggtgggcataaatctacaacggttgcgactggg

SEQ ID NO: 46477 - DNA, 472 bp, Zea mays
  unsure (1)..(472): unsure at all n locations
  Clone ID: MRT4577_142392C.1
naaaaaaaaaaaaaaaaaaaaaaaaaaaaaaaaaaaaaaaaaaaaaaaaaaaaaaagaaaaaaaagaaaataaaaaaaaaaaagggttcgtccgttgtgcaggacgccaacttacctggtcctttggtggcccacgactttgcattttattgtgccgtcagctttacttcattgcactcgggggtaaactttagaaggccggggactgaataaaccttggggcccacccaactttctcgagttgcagtacttcccctttggcccgcctggttttttattggcaacgccctgaccgtttgcctttccaatgggacgccccgtgtgaacgtgcattgggcccctccctgttgggggtcactcgcagcgggaccttttactttccacgtgcttgaccccttccttgccatttcttcccttcctttttcttttcgttgcttccttttccggctcgacccctaagccggttgttccc

SEQ ID NO: 46478 - DNA, 346 bp, Zea mays
  Clone ID: MRT4577_142393C.1
cggcaactgggtctactgggtcggccccctcatcggcggcggcctggccgggctcgtctacggcgacgtgttcatcgcctcctaccagccggtcggccagcaggagtacccatgaaagtcgatccggacccgacccgacccgtcgtgttgatctcaccatcgtcgtcatgtcatcgccttgtgcttgtgaagttgtgattatgtttgatcttatttgcatttcccttctggttttcattcattcagcaacggtgccaagatgctgtaagcgagaggaccgtcgttcgatctatatttatgtatataaatctctattcttataaaaaaaaaaccccccacaccacgc

SEQ ID NO: 46479 - DNA, 307 bp, Zea mays
  Clone ID: MRT4577_142394C.1
atcgggaatttacggctcgcagtgttaacacttcgtaaaagaggagggaaaattatcccaaaaccctagttccggtctcgatggcggaccctcgcgtcctcttcgacatgaacgtcggcggcgccccggcgggccggatcgtgatggagctgtacgccaacgaggtgcccaagaccgcggagaacttccgcgcgctgtgcacgggcgagaagggcgtgggcaagtccgggaagccgtccactacaagggctccaccttccaccgcgtcatccccgagttcagtgtgcagggcggcgacttcacccgc

SEQ ID NO: 46480 - DNA, 252 bp, Zea mays
  Clone ID: MRT4577_142395C.1
tacaagactctaaagtgagtcgtattagcgctcgcggacaggacaaaggcgctcgatagccgcatgatcatcatcgcccgcgccaagcattacaccgaggaatactacgcgcagcaaaaggaggttgtgcagctcaagcgtgacgcccggttgaagggtgcgctcgatgtgagcctgcaggtcaagcttctgtatgtggatcagatccatggtagcaatggcatgcacctcaagagcctcaagatcttgcag

SEQ ID NO: 46481 - DNA, 385 bp, Zea mays
  Clone ID: MRT4577_142396C.1
taatatttatctaacatcaacattttagaagggggggattttacattaggtgcgcttgtttccacacaacacaaccaagtgaggtcaaaggacatacaagccaacgccgacactagatgggcaaaaaattatttgccagctttttccaaatataaaagatccgcgagagccttaagaaagcatccaacggtatgtgctcagatccatggccatccatgaataccgtaggcacacccaccctctttatttatgaaataagtaacgccaaggcaatgcaaatgcgacccaacacacgatacaatatgtatttgcatgtaaatatatatggatagtccaggggcaaacttacggaaagacttagaaggcaacacgaggctccaaaaat

SEQ ID NO: 46482 - DNA, 395 bp, Zea mays
  Clone ID: MRT4577_142397C.1
gtccaaaccctagctaagctcccccaatcccctctgcaccgagatccgatctcgcccttctggccgcgggacagtcgccgccatggcctccggcggcaaccccaacccgaccggcgcccccagtcagccgcgtccgccgcatacgcagcagcagcctccaccgggcggctcaccggcggcgcccatgacccacctccgccctccctccctctccggctcccccttcaagggcctcttccacacgccgcccacccacaatcccgccttccagatccacatgggcgcctcgtcctcgccccagaatccgctcatgaccgccaccgcaggctcggccaagcggcccccgcaaaagccccctatccgacccccggcacccggctctacctcgtcggcgg

SEQ ID NO: 46483 - DNA, 387 bp, Zea mays
  Clone ID: MRT4577_142398C.1
gggcataaattcaggggcacaatattttaattaggtcccggaacccggatcgaaggggggtattggggggtttcacgaacaaaacaaaatgggaactacaggagcagcggatgaatacaagagggaatttcccaagggctaaacgttttaaccaatgctgggagggggagccatagttttttaacacacacaccccccccaaatatttattttttattcattaacgccataaaacaaaatggctcccatttgccacggggggtattggacttctttccttgatgtccaattgctgaggaaatatggcataggatttggtgggggtgcccccgatgtgaattctcttcatattttagctttaggggctttccggacaaaaaaagattt

SEQ ID NO: 46484 - DNA, 316 bp, Zea mays
  Clone ID: MRT4577_142399C.1
atggggaaagctgcgcgcgctctgtaggctcggatcctgtatagcgggcgcgatccacgcgtccggctaaagggaggcacccgtgacggacgacaacgactgcaatatggctatggtcagcaggagtatacaactgcgacctccatgcagtgctatgtacaagagcgagagcacgtcagccatagatatgttgcatctgagagatgtatagactgtgaagttgtgtccgaacagcatttacttgatgcacatgacgccaccatcattcattgtagattagcatatcatcgctgaacactaccatgcacgtgtagag

SEQ ID NO: 46485 - DNA, 180 bp, Zea mays
  Clone ID: MRT4577_14239C.1
acccccactcttacgcctatttttcgcttcacatgttaccccaaaatcttctcaatgagctgagattgtttatcaacctgattatgccaaataccaatatgttacttcaccacctctactcacattgcttcctatttccaactaatatacttcctatcttatatcaataatacttactta

SEQ ID NO: 46486 - DNA, 2861 bp, Zea mays
  Clone ID: MRT4577_1423C.1
ggcacgagccgtcgttgggcaggatgctatcaaaactgctctgctgcttggggcgattgatcgtgagatcggaggcattgccatctcagggaagcgtgggacggcaaagacagtgatggctcgtggtttgcatgctatgcttccacccattgaagtggtggttggttccattgcaaatgctgaccctaactcccctgacgaatgggaggatggtttagctgatcaaatacagtatgactctgatggtaatgtcaaatccgagattgtcaaaacaccttttgtgcagattccacttggtgtgacggaggataggctcattggatcagttgatgttgaagcatctgtgagatcagggactactgtatttcaacctggtcttcttgctgaagcacatagaggtgttctttatgttgatgaaataaatctattggatgatggcataagcaatctacttctgaatgtcttgacggagggagttaacattgtggaaagagagggcattagctttcgccatccctgcaaaccacttctaattgctacttacaatccagaggaaggatctgtacgtgaacacttgcttgatcgtattgcaattaatttaagtgctgatcttccaatgagttttgatgaccgcgttgaagcagtggatattgcaacacggtttcaggagtctagcaaagaagttttcaaattggtggaagaaaaaactgaaactgcaaaaactcagataatttttgcaagagagtatctgaaggatgttactattagcacagagcagctcaaatatcttgtcatggaagctatacgaggtggctgtcaggggcatcgtgctgagttgtatgctgcccgagttgcaaaatgtctagctgctatggaaggacgtgaaaaagtatttgtggatgacctcaagaaagctgtagagctggtcattctacctcgctccatcctatctgataatccacaggatcagcagcaagagcaaccacccccacccccgccgccaccacctccagaaaatcaagattcttcagaagaccaagatgaggaagacgaagaccaagaggatgatgaagaagaaaatgaacaacaagaccaacagatacctgaggagttcatttttgatgctgaaggtggtttagtagatgacaaacttcttttctttgcccagcaagcacagagacgacgtggaaaagctgggcgagcaaagaatgtcatcttctcagaagataggggccgttacataaagcctatgcttcctaagggtccagtaaggaggttagctgttgatgccacgcttagagcagctgcaccataccaaaaactgcgcagagagaaagaacgtgacaaaacaagaaaggtttttgttgaaaagactgacatgagagccaaaagaatggctcgaaaagcaggtgctctagtcatatttgttgtggacgctagtggtagcatggctctgaatcgtatgcagaatgctaaaggtgcggcgttgaagttgcttgcagaaagctacaccagcagagatcagctttgtgccttggcatctctctcaggtttcaattattccttttcgtggagattatgctgaggttttgcttccaccatcaagatctatagcaatggcccggaaacgtcttgagaagctaccatgtggtggtggttctcctttagctcatggcctaagtacagctgtcagagtgggtctgaatgctgaaaagagtggcgatgttgggcgtatcatgattgttgcaatcaccgatggaagagctaatgtatcactgaagagatccactgacccagaagctgctgctgcttcagatgcaccaagaccttcttctcaagaactgaaggacgagatacttgaggtggctggcaaaatatacaaggcaggaatgtcccttcttgtcatcgacactgagaacaagtttgtatccacgggatttgccaaggaaattgcaagggttgcccaggggaaatattattacctccctaatgcttcggatgctgtaatttctgctgccaccaagaccgccctgacagacttgaagagctcatgattttgcagcagcggcacccgttttctgtaccttttgataggggtggtgaaccttcattcatgcagtagtttttgtgtaggcctctacaatgacagggggaaacaaacccgagcatggcatcgtgtaaagtgttaaggtccaatggcctcctgtccacgtttggcgatgtaaatcctccgtaacatagcttgaaccattgagtgtcacgtagtgccatggctagcagttaaaaaaacctcaattccgccccaccaaaaatttactcattttatcccaaacaaaacacacactcgaaacaacggaaccgtaaaatttcgcaattccggcaacttgtcaacggcggctggaaaaggtgcgcccgccctacgggtcccccgattccggaaagggaagcggcggcgtatatggaaacgagcctcattgtctcccttgatgcaaaaaggaggccccacggttatttttaaaggaggccaactatcaccataccgcaaaaatacactacaccctctttaaataaaaaaaggtgactcctaaacaaggtctaaatctccctccactgatataacgcccaaaatactttataactttataccgctaataactcttaccagcatggttcccgtgtcctacgtcactactcatgacaaataaaacccctaaaacacaaacatcccctccctccctgaaacccccttagttactcatcactcccttatactcctcatacctatatctcctcaacccctaccccttccctccctcactcccactccaaaccaccgcattctttttaaccgacccttccct

SEQ ID NO: 46487 - DNA, 401 bp, Zea mays
  Clone ID: MRT4577_142400C.1
cacacgcgtgcgcattgaaccattctaactatgggaacgcagctgcaacaagcactgggcgacgtagccacgttgtactctatcgcttacttggaacaactgctggttgcattcaaccgactcgctttggcaaacgtagctgcataccaacaacaacaacatgttgcaacagttggtgtcagggctcaatcaactagtcatggtgaacatctatcgactacctacaacagcggcagcttgcatcatttagcccgatcactattggcaatgcatgtacatacatgcaataacaggcgttgcaacaactgaagctgtaacaaattgtaccagctcttactgagctagctgactcaaaccctgctgcctacttgccacatctacttgcattcaaccaactgact

SEQ ID NO: 46488 - DNA, 689 bp, Zea mays
  Clone ID: MRT4577_142401C.1
gatacacgcacgatgcctaagagatctatgttaagtctgaaagattcacgcgagttccagttacatcttctatttttgctcctcagaatctgtgatccactaggcatcatatccatattcacgaggacaaccacgaccagcaccatccttcaaacttccatcgctctcctcttcgagagaatgaaacatttgctctactgtattgcacatgctccgcattcgattcaacctgctgttattccaatacacggagtatccatggaggtaaactatgggacgaataagaagaaggtattcatctacacccaccccggaattgaccaccatatgaccatcctatggttactgcgcacgacgtcagcttgagctgctgggactctccactaacttgcggcagacctcttaagcgtcctcgccacggacaatgcaactacaactattgcaggatgttggaaggactgacatctccgtgcgctgagttatctcatggaagaatcacgagaagccaccacggtgatgaccgcatcctcagtgcacgcattagaagatatgacgaaccataatttacctccaccgactacctatcctatagatgattctagtgctgtcttcccagctgagaaatcatatgctgaacctggatgagttacgatggtgtccctcggtccaataaccaaccttgatctggc

SEQ ID NO: 46489 - DNA, 485 bp, Zea mays
  unsure (1)..(485): unsure at all n locations
  Clone ID: MRT4577_142402C.1
ggaaggaacatgattcttggtcggggggagactgggggggttgtaaaacgcactatccaagctggggttactggtgccctgctacggggggggcgggggggagcaaaccaactcgatggcaaatttgaagcccccttcattccctctatctctcattttttttctttctttttctagcgatgggcctggccttggggggggccgcagcggctagctagcctccacagtctcggggtggccgggcggcaatggcgaattccctggggacgaatcacgggccctcactggtggcgtttggcgggcgcctgccgcngcccgggccggaacttggggggggtggcggggacgtcctgcttcctggcgggctgggcgggcccctgccccccctgcttgtggggcgccccggggccccccgccccgtgggccgccccgggtttccccgcccgggccctggcgggggccccgcttcccctgtgggggggtgg

SEQ ID NO: 46490 - DNA, 544 bp, Zea mays
  Clone ID: MRT4577_142403C.1
atttattgtaggttgggatatgtccagtgatgtcaacatgttttgtattcgcaaataattaccattttgtgctcatttacaaccctaataattgtagtgttggaagtttgttagcaataggtattatagcacatgctggattttgagaagtataagctgctacatcttgtgttgttttattttgtttgtgtttgtatgtcagtacgattttcttgctttatttgttaaccttgaagatcactatgtacttagatctttgtttacatgaaaaattgctaatatattattgctgtctatcagttgcggaccgtatgtgcagatctggagcaatagatcttatctgtattgattcggtgtcagcgctcaccccacgtgcagaaattgaaggtgagataggaatgcagcagatgggtctacaagctcgtctgatgagtcaagcattgagaaaaatgtcaggcaatgcctcaaaggctggctgtactcttatgttcttgaatcaaataagatacaagattggagtgttctatgggaatcctgaagtcac

SEQ ID NO: 46491 - DNA, 561 bp, Zea mays
  unsure (1)..(561): unsure at all n locations
  Clone ID: MRT4577_142404C.1
ccgagtccatcctcgacgtcggtgacgccgcggccgggaacctcgacggcatcatgggcagcctcaccgtcgacgtcgagagcggcaccgccgccacgtccgatgactccatcctttccagctccggcatacacccctacctcaggaggctcatggtggtcggcctcgccggcaggttcgagctcggcctcgggtcccagcacggcgctcggcccaacctcaaccgcgcactgaagcggcgggacgacgacggcgcctggtggatgtggccggcagtgccggtaaaggacttgacgatcgcaccaccggcaccgccagcaccaccggcgccgaacgccgcagtgccgcaggccgccgccgccgccgccgccgcgccaganaagaagaaaagcaagaagaagaaggtggtgaaggccatggcgaagggaaatgaggagcttcttcccaacgcgaaatgcaaggaggaagaagctgacgcctctgttgatgatgccgtcgctaatggcgacggtgacgccaacagtgcgccgacgaacgcaccaaaagcccgtctggggctga

SEQ ID NO: 46492 - DNA, 431 bp, Zea mays
  Clone ID: MRT4577_142405C.1
cagtgacactgccgaggcaccgactcagtactctaacgactctctaaggaccgctatacctgaaacactatacttgggcactgtcctgcgaatgaacgagatgccgactggaatgcggcggtaaattgccaccaaaatgccggtgtggtaaatatggcatacgcacgctaactctggagttactcatctgttccacccgacatcttatccaaggacgcaacactagaactcgacacagatgactgactcaattctagatcaaatgtggaacgagcatgatttacttacattataacacatacaattggcaatgcaatatacctacatactattagtatttattattctttcgtgcggatctgcgccatgtatgcgatgaatctctacataccgctgctatcttaacttggtcgtatttcactgcttcacga

SEQ ID NO: 46493 - DNA, 305 bp, Zea mays
  Clone ID: MRT4577_142406C.1
tgccggtccggaaaccccgggctttattgctctcactctcggcatatcgaacacaatgctaggggtcgcacactagcgccgccccgcctccccatcagacatggcgctggccgctcgcctggactcgcgctcctgccagctatattcggcttaagccactttggggaaaggaggtgtcactcaagctccctccttatcctaagatgcagattcagctgaccgtcctactgtcggcagggatgatctgccgaagggcatattctttgaggtcaataaaaatttgagacagctcttggtgttcttaa

SEQ ID NO: 46494 - DNA, 522 bp, Zea mays
  Clone ID: MRT4577_142407C.1
ggtgcatgttttgttctttttccatttcacgtttgtgcttttattctacgctctttatatgtttttcctatgttgctttctcagagccgtctgcgcgctgtttatgtgtccccctgcgactttagccataacctggagtctggtaccgggggctctctaggaccggatacaccccccgctgatactgctaatttcagccggcgcgagcattatgggttgcggcaccgcattgtttctaccctccagcgttgtgcaaaggctggcttactggctgattcggctcgcgttatgtattgctacaaatggtggcgcatggatggcgactgccgtcctcaccaccaacatgaggaacttaccgcttattttatgtgccggtgctggcattctcaaagggtactggggtttaagtgcctctggtccacactgaagtatacaccggagagctacgcttattgacacatgaaccatcgactctctctaggtctgttaattcctgccgagtgcctcctggaaatgtacttt

SEQ ID NO: 46495 - DNA, 602 bp, Zea mays
  Clone ID: MRT4577_142408C.1
gagtaattaatcatgtctgaattttgataataatgatacgcgtactgatttccaccaccgtccatattgccagctcagtccacaggcccgcccgcccggctccatccggctatataagacgatgagcaacaactgccaaggcgacaagcaagaacagctgtcgatccaattgtcacttgctctccctccaacaagctaattaaggccggtgcatccctgttctagctcgtttcattatccatggctgaggagaagcaccaccaccaccacctgttccaccacaagaaggacgaggagcaggaggagcagctcgccgccggcgggtacggcgagtccgccgagtacacggaggccacggtgacggaggtcgtgtccacgggcgagaacgagtacgacgagtacaagaaggaggagaagcagcacaagcacaagcagcacctcggcgaggccggcgccatcgccgccggcgccttcgcactcgtacgtagtccgtccgatccgatcctccttgagtagtatatatatacataaatgaacgacgagaacgaataatatatatatattaatcgaacgaactgaatgacggtcacctcgtgtgacgt

SEQ ID NO: 46496 - DNA, 1372 bp, Zea mays
  unsure (1)..(1372): unsure at all n locations
  Clone ID: MRT4577_142409C.1
ccaattgtcacttgctctccctccaacaagctaattaaggccggtcgtcatccctcttctagctcgttttattatccatggcggaggagaagcaccaccaccaccacctgttccaccataagaaggacgaggagcaggaggagcagctcgccggcggcgggtacggcgagtccgccgagtacacggaggccacggtgacggaggtggtgtccacgggcgagaacgagtacgacgagtacaaggaggagaagcagcataagcacaagcagcacctcggcgaggccggcgccatcgccgccggcgccttcgcactcgtacgtagtccgtccgatccgatcctccttgagtagtatatatatatacatacatgaacgagaaagaataatatatatattaatcgaacgaactgaatgacggtcacctcgtgtgacgtggacatgcacagtacgagaagcacgaggcgaagaaggacccggagcacgcgcaccgccacaagatcgaggaggaggtcgcggcggcggcggccgtcggctccggcggcttcgccttccacgagcaccacgagaagaagaaggaccacaaggaggccgaggaggccggcggcgagaagaagcaccacttcttcggctgattgatcctcccgtatcgtcgtccctccccgtgtgctacgcgtgcgtgtgagagtgatatcgagcgcccgccgtgttgtgcgcgcgtacgtatgtatgcgctcgtgtgatgcacgaataagcgtggctacgtaatctatcgtatgtatacgtgtgtgtatgcatgtgcttgtgtatgatcgtggtacgaggaccgaaaaaatgtatgcaactctgatttacttacatgtttagttgtttaaaaaaaaaaaaaaaaaaaaaaggaggtcgcggcggcggcggccgtcggttccggcggtttcgccttccacgagcaccacgagaagaagaaggaccacaaggaggccgaggaggccggcggcgagaagaagcaccacttcttcggctgattgatcctcccgtatcgtcgtccctccccgtgtgctacgcgtgcgtgtgagagtgatatcgagcgcccgccgtgttgtgcgcgcgtacgtatgtatgcgctcgtgtgatgcacgaataatcgtggctacgtaatctatcgtatgtatacgtgtgtgtatgcatgtgcttgtgtatgatcgtggtacgaggaccgaaaaaatgtatgcaactctgatttacttacatgtttagttgtttacgtttctccaaaagtattagtacccattatgttatattttactatattatattttattgattattaaactatggtatggatgaaatnnnnnnnnnaaaaaaaaaaaaaaaaaaaa

SEQ ID NO: 46497 - DNA, 325 bp, Zea mays
  Clone ID: MRT4577_14240C.1
gggggggggtttttttttttttgtggttgttttttttttttttttttttttttttttttttttttttttttttaaaataaattcaccccccccaaattttataaaaaaaccaattaggggttcccaaaattttttttacaaaaaaaaactcggggttggggacccaaaaacctttatcaaaaggtaaaaattttgggccttagaaaccgtgactttggctcttttaacgtttggaacaccattgggtctcaccccatggggggcctttgggggaataaaagggttttaaactttttttccaaagaaaattcccggccttgggggg

SEQ ID NO: 46498 - DNA, 371 bp, Zea mays
  Clone ID: MRT4577_142411C.1
cccgtttaaaaaaaaaaaaaaaaaaaattaaaaaaaaaaaaaaaaaaaaaaggaaaaaaggaaaaaaaaaaaaaaaaaaaaaaaaaaaaaaaaaaaaaaaaaaaaaaaaaaaaaaaaaaaaaggccagccgttttaaaggttccaagtttacttacccttccttccaacttcttaacttttctatagggtaccctaaataaaatccattggccgtatttttaaaaccttttaactggaaaaaccttgcctttccccaatttaatccccttgctccaaatccccttttcgccagttgcattattaccaaataggcccataccattagcctttcaaaaaatttgccaaacctgaatggcaaatggaacccccc

SEQ ID NO: 46499 - DNA, 325 bp, Zea mays
  Clone ID: MRT4577_142412C.1
cccatcgctgtgcagaacgcgcgggagtgatcacacttgtgcacaggtgttaagatgatcgctcgtagaatgtgatcatacattggctgcgctacatcttatgcataggtagaatgtcggcactcggagagagcttgataaaatgtgggctagctatcgcaggacgatgacatgggtcagaggcttattgagctattgacagcggtgctctgcgaggaggacacactggcttcggtctacaacactgctgatgcttctttctttgacccagccttgtgctactacacagatgaagcacgaacgagctgtcttactatgatccatc

SEQ ID NO: 46500 - DNA, 1436 bp, Zea mays
  unsure (1)..(1436): unsure at all n locations
  Clone ID: MRT4577_142414C.1
agccgcgtcccacgctcgcccgccgcgcccagaaaggttgcagctttcccccaatttttcgctgctaggaggccgcggcgaccatgggcaactgctgcgtcacgccgtcgacggagggaagcggcaaggaccgccccaagaagcagaaggagaacccctacaccgccgtcatgcgaaccatcgttgaggtcgtccagccgtcgtgatggcgccgtcagcagccacacagaagagctcccttgaagtcttgcttgagacgttaaagaagcgcgatgagcagcccaaggatgcacctccaacattgccagcccggccgacgtgccatggccagctgcccaccaccagacggtcatcactgcctgctggctttatgctcgagaacgacatggcaacagttgctgccacagaagctgtagtggttgacaagaaggcagatgctaagattgagattgctgggctggagaagtgccacaggtatggcgtcatgcaccgggatcttaaaccagagaactttttatatgcaagcaaggacagttcccctctaaaagcaattgatttttggcatgtttgtgttcttcaggccgggtgagcgatttacggaaattgtaggcagtccatactacatgggccccagaggttctaaagcgaaactatgtccctgaagttgatgtctggnagtgttggagtgatactttacatactttctttgtggtgtaccaccattttgngcagaaaccgaacagggagtagcgcaggcaatcatacgatctgtggtagatttcaaaagagaaccatgacccagagttaaagaagaaagcactaagggtgattgctgagcatctgtctgcggaggaagtagctgacataaagcaaatattcgataagatggacgtgaacaagaacagcaagctaacattcgaggaattcaaggtcggcctccgtaagctgggaaaccaaatgcatgattcagaccttcagatactgatggatgctgctgacgttgacagaaacgggaccttagattacgaggaattcgtcacggtgtctgtccacgtgaggaagataggcaacaacgaacacatccagaaggccttcgcatacttcgaccggaataagagtgggtacatagagatcgaggagcttagagaggcactggctgatgaactggatggcagtgatgaagacattatcggtggcatcatccgggacgtggacacagataaggtcaacaaaatctacctccctaggccgaaaaaaggtttagtctgtacaacacttgtgttggtaaaacgctagtgtattttgtttttagaaatgctaagcaacgaactcgtattatcgattgtggatctctagctttgatatcacgttagagtggacgcactgataaccagtttaacataaaagtttaagcaatccacttatacttttcttag

SEQ ID NO: 46501 - DNA, 669 bp, Zea mays
  Clone ID: MRT4577_142416C.1
aattcggcacgaggatctcccttatctcccgttcctttgagccaccgcccgccgccgcgccccacgctcgcccgccgcgcccagaaaggttgcagctttcccccaatttttcgctgctaggaggccgcggcgaccatgggcaactgctgcgtcacgccgtcgacggagggaagcggcaaggaccgccccaagaagcagaaggagaacccctacaccgccgtcatgcgaaccatcgttgaggtcgtccagccgtcgtgatggcgccgtcagcagccacacagaagagctcccttgaagtcttgcttgagacgttaaagaagcgcgatgagcagcccaaggatgcacctccaacattgccagcccggccgacgtgccatggccggctgcccaccaccagacggtcatcacttgcctgctggctttatgctcgagaacgacatggcaacagttgctgccacagaagctgtagtggttgacaagaaggcagatgctaagattgagattgctgggctggaggtcatcacctggacgtgctttcagctgagcgggataaacttcaatgggttttcaaccttttggttctagtttatgtaataaatgcttgattagaatcgtaataaattagcttgattaaggtcgtaataaattagcttgattatatcgtaataa

SEQ ID NO: 46502 - DNA, 299 bp, Zea mays
  Clone ID: MRT4577_142417C.1
ccacgcgtccggaccatgcaacatttaacgtgaaattttttttcaccaatagaccaccaacggcggcgaggatatttaccctgcggatgctcctcactctttctgcatgaaacgataacgcgacaatgatcactcaatgctgacaagctcctatagcttccattcttccaccataccttccatcaatgattgctacagtctgtgaaaacccagctcttcaaccctataggctacaacacgcaatcgcagcaagcaacatacctttatcacccttcgtttaacaatagccagccctatct

SEQ ID NO: 46503 - DNA, 4029 bp, Zea mays
  Clone ID: MRT4577_142419C.1
gccggccgggtcggaaagaatcgtggactcgcccccgctccgccccagctcacacgccaagtcccagtacaaagcctacggaatttccccccacctccaattcgagttgtccgcttccagtcagtcgccgccgccgccgtcgccgctgaaaccgaaacttgaaaaaccagctcgccgggggtccggccgatttcccccaaatttccctgctgctgctgataggaggccgcggcgaccaccatgggcaactgctgcgccacgccgtcgacgacggaggagagcggcaagagccgccagaagaagccgaagcagaagacgaacccctacaacgtggcgtacaaccgcggggcggcgccggcgccggcgcgcccgggcctggtggtgctgcgggacccgacggggcgggacctcggcgcgcagtacgagctgggcggcgagctgggccgcggcgagttcggcgtcacgtacctgtgcacggagtccgccacgggggcgcgctacgcgtgcaagtccatctccaagcgcaagctgcgcacgcccgtggacgtggaggacgtgcgccgggaggtggacatcatgcgccacatgcctccgcaccccaacatcgtcagcctccgcgccgcctacgaggacgaggacgccgtgcacctcgtcatggagctctgcgagggaggcgagctcttcgacaggatcgtcgcccggggccactacaccgagcgcgccgccgccgccgtcacgcgcaccatcgtcgaggtcgtccagatgtgccacaggcatggcgtcatgcaccgggatcttaaaccagagaactttttatatgcaaacaagaaggagagttcccctctgaaagcaatcgattttgggctgtcagtgttcttcaggcctggtgagcgatttactgaaatcgtaggcagtccatactacatggctccagaggttctaaagcgaaactatggccctgaagttgatgtttggagtgctggagtgatactttacatacttctctgtggtgtaccaccattttgggcagaaactgaacagggagtagcacaggcaattatacgatctgtggtagatttcaaaagagaaccatggcccagagtatctgagcctgctaaagatcttgtcaggcggatgctggacccaaatccattgacacggtttactgcagcacaagtacttgagcatccatggttacatgactctaaaaagatgccagacatttctcttggtgatactgtccgagcaagactgcaacaatttgctgcgatgaacaagttaaagaagaaagcattaagggtgattgccgagcatctgtcagtggaggaagtagctgacataaagcaaatgtttgacaagatggacgtgagcaagaatggcaagctaacattcgaggaattcaaggcgggccttcgtaaactggggaaccaaatgcctgattcagatcttcagataatgatggatgccgctgacatcgataaaaacgggaccctagattacgaggaattcgtcaccgtgtctgttcatgtgagaaaaataggcaacgatgagcacatccaaaaggccttcacatacttcgaccggaacaagagcgggtacatagagatcgaagagcttagacctttcagccagtcagtcgccgccggttccgctgaacttgaagtccaaactagctagctcactgggcaccgattccccctaaaattttcgctgcttccaggaggccgcggcgaccatgggcaactgctgcgccgcgccgtcgacggagggaagcggcaagacccgccccaagaagcagaaggagaacccctacaacgtcgcgtacaaccgcggcgcggcggcgccgccggcgcgcccgggcctggtggtgctgcgggacccgacggggcgggacctcggcgcggagtacgagctgggcggcgagctggggcgcggcgagttcggcgtcacgtacctgtgcacggagcccgccacgggggcgcgctacgcgtgcaagtccatatccaagcgcaagctgcgcacgcccgtggacgtggaggacgtgcgccgggaggtggacatcatgcgccacatgccgccgcaccccaacatcgtcagcctccgcgccgcctacgaggaccgagacgccgtgcacctcgtcatggagctctgcgagggaggggagctcttcgacaggatcgtcgcccgcgggcactacaccgagcgcgccgccgccgccgtcatgcgaaccatcgttgaggtcgtccagaagtgccacaggcatggcgtcatgcaccgggatcttaaaccagagaactttttatatgcaagcaaggacagttcccctctaaaagcaattgattttggcctgtctgtgttcttcaggcctggtgagcgatttacggaaattgtaggcagtccatactacatggccccagaggttctgaagcgaaactatggccctgaagttgatgtctggagtgctggagtgatactttacatacttctttgtggtgtaccaccattttgggcagaaaccgaacagggagtagcgcaggcaatcatacgatctgtggtagatttcaaaagagaaccatggcccagagtatctgagcctgctaaagatcttgtcaggcgcatgcttgacccaaatccattgacacggtttactgcagcacaagtacttgagcatccatggctacatgactctaaaaacacgccagacgtttctcttggcgatactgtccgagcaagactgcagcaatttgctgcgatgaacaagttaaagaagaaagcactaagggtgattgctgagcatctgtctgcggaggaagtagctgacataaagcaaatgttcgataagatggacgtgaacaagaacggcaagctaacattcgaggaattcaaggccggcctccgtaagctgggaaaccaaatgcatgattcagaccttcagatactgatggatgctgccgacgtcgacagaaacgggaccttagattacgaggaattcgtcacggtgtctgtccacgtgaggaagataggcaacgacgaacacatccagaaggccttcgcatacttcgaccggaataagagtgggtacatagagatcgaggagcttagagaggcactggctgatgaactggatggcagtgatgaagacatcatcggtggcatcatccgggacgtggacacagataaggacgggaagataggctacgacgagttcgcggcgatgatgaaggccggcactgactggaggaaggcctcccggcagtactcgcggcagcggttcagcaacctgagcctgaagctccagaaggacgggtccctcggcgccgacacacggtaggccgccgagtgtagtggtggtgctggtgttcgtccgtctctttgcttgcttgcttgttttgctgtgcggggtttttgttggttggtcagacagtcagtcaggtcattagattccacctccacgttctgtttccattacacggtgaaccctcagctggagctgtgattcttgggcttgtgattgtagaagaaagatgcacgtacaacgtacgtattgtagaatgtagatgggtgcagcagcgtgtgctgacaaagaacgctggagtagcacaagacacgagtagtcttgctttgcttgtaacttgtaagtagaatttgttttgtgtgcttgcaatgcatgacgatggtgattgccctgccaaaccgtgtgaatgcctgcacgcaagctgcttgctggttgtaaaggaggacgatgattttagctttatctcactagcccgaaaaaaggtttagtctgtacaacccttgtgttggtaaaacccatagtgtattttgtttttagaaatgctaagcaacgaactcgtattatcgattgtggatctctagctttgatatcacgttagagtggacgcactgataaccagtttaacataaaagtttaagcaatccacttatacttttcttgacccaaaaaaaaaaaaaaaaaaaaaaaaaaaaaaaaaaaaaaaaaaaaaactcgagggagaagcccgggtaccc

SEQ ID NO: 46504 - DNA, 405 bp, Zea mays
  unsure (1)..(405): unsure at all n locations
  Clone ID: MRT4577_14241C.1
cacgcccatagagaggtggagaacgaggcccaagcgtgttttttttctttgctttgttttcttgttttggagccgttggcccacccacctatgtgccttatgtattattgcctttcgctcggagtggccctggccggggcgtcggtcacgctgcctcccntggtgagggggggggggggggggnttttttctccccnctnnccttccctgtttgctcttgggcgcggccggcggcttgttctcccctggccgggccccggggcggccgccttccgcgggggcctccccccggctgggcgcccttgtgggctggggggggccgcccctggggggggggggggggtcccctgtgggtgggccggcggtcgccggtggcgggggggggctcccggggggggggcgggg

SEQ ID NO: 46505 - DNA, 340 bp, Zea mays
  unsure (1)..(340): unsure at all n locations
  Clone ID: MRT4577_142420C.1
gacccttctccgcgcgctcccactcctgcccaggaccaatccattcgcctgttcgtccactcagcgacagtcatggccacacctcgccgttgttcgtcctcgacagcgggatcaccatgcgtcgtggtcgtggtcagctctcatcgccgcttcaaactttcggtcaagaacaggtattgcaggatgaggcgcgtggaggatgctgnggcgagttcgtgagaggtctaggccgtcgtctcccagtcaactttgggttgctggaccgttgtctccttatgatgtaattatttatttattttatacaaaactccgattatatagtaaaaaaaaaaaaaaaaaa

SEQ ID NO: 46506 - DNA, 486 bp, Zea mays
  unsure (1)..(486): unsure at all n locations
  Clone ID: MRT4577_142421C.1
ccggccggaaccccacagatcaactaacgcacgtgcctctcctttactcgcagtgcatcccagacaacgacaatatatgctagatgcacattctcgaatgacacatgtaaatacatcctcgccggtggaataagtgcctcctaaactgccagagacacatctaggaaataaattggttccagatgaccatgaatgtgacaaaataactattgcttgcggtaaagcatacggattcttgtctacacgcctgctcatctgcagttctcataataaggtttgtattaagataaggaatccataaaacgtctctctccgatgatacataaccttcttacaatatataagagtggaacacttacacgccagaatgaaccgacacaaaaaactcctgaaaagtgacataacgactaatgatgattcctccgaggccgctgnccatgcgaaagccaattcaatgcgtccaaagatgccatcttgaaagtacca

SEQ ID NO: 46507 - DNA, 342 bp, Zea mays
  unsure (1)..(342): unsure at all n locations
  Clone ID: MRT4577_142422C.1
cgtcgccggnacaggaggatttgcgagcagcaagatgtgggggcaggcgtacgncnatnaccacctgctgggcggggtgctngctgcgggcctcagtgcttttcattcacccacnaggagctcgagaacggcgtcctgtgggaggccgagtgaaggtgggacacttagggttctgttgatgtggctcctgntgnctggggggggggggtgttgntgcttaggacgaatgtgatgatgacactgttgtgacggtggntgattttgttgacacattccggctacatgagcagactccttttgacaagacataatttggggtgttacctgtagagatacttgagg

SEQ ID NO: 46508 - DNA, 367 bp, Zea mays
  Clone ID: MRT4577_142423C.1
gggcgacacgacatgcaaggcgaggaactcgagggcaccaatcatggccggcgtgaactccagcgtcgtcgggctcaagcccgccgtggcagtgccgtaagccgccgccgcctcattaacggcgaagagggtgcagctggccgcgcccgaaggccgccgcgccactctgctcggcctggcggccggcttcgccagtacggtcaccaccgggtcggccaagggcacgatcttggatgagtaccctcgagaagagcaagggcaacaaggtcggagctgaacgacaagaagaggcttggcaccaatggcgccaactttgcgcgcgcctataccgtggagttcggagctgccagtcccctaaacttcactg

SEQ ID NO: 46509 - DNA, 832 bp, Zea mays
  Clone ID: MRT4577_142424C.1
gcgcttccggccttcacgaacaggttcgtctcctcggctcctccttggcttcgcaagagtggtgccgagtagctcctccgcgctccgccgggaccgacttgccgctggccgccaggggctccctcgcccaggaccggctccgccgtccaaccgtcctatcccctccggcctccgcccagatatgggttcttgggagggccaagctaggcagcttttgttggatgaggaagaagatgatgaagagtttttctttcttcttctccctgctatactttcattcctctctgaagagcaaagcgaaactggagcagctattgaaagtttcgtggaattcaagaggagcactgcagccaaaacgctggaagctcttgaagaaaagaagaagcatgatgaagatttctctattaaaaagtgtctagaggagttggatacaattgatgggctgacagatgaggatagatcatatgcaatggaagtctttgaatctgggttcaacagagaagtgtttatgagttcaaaaaaccacaatgttaggttgttttggctcaagagaaaaattaaagcgcttgctgctatcatgtgatgtgaagtgaatgtggttgtgaagagataggcttacagaaaccgaagaaatccaactgctagtaccgttccagcgagaagacttcagccctgctttcagagtgcttggtgaacgatggaaggcctaggatgctgtttttgtttatgttgcttagagacggatattggaacgaggatataccttgtttgtacggtatcgtgctgccaaaattaatgcgttttaagcaaaaaaaaaaaaaaaaaagcggcc

SEQ ID NO: 46510 - DNA, 162 bp, Zea mays
  Clone ID: MRT4577_142425C.1
gttatgtgtacggctaggagcaggatcattggaggcgccattaatggtgactaattgtgcattgtgaacacagaagttgagggtatgacgatagtacctatcaaaaaagatattctggtacagattgacaacgatttgaaccatgttgtcggagctgatgaa

SEQ ID NO: 46511 - DNA, 716 bp, Zea mays
  unsure (1)..(716): unsure at all n locations
  Clone ID: MRT4577_142426C.1
gggtaccctcggagccggcccccagnaggtagtgcgcttccggccttcacgaacaggttcgtctcctcggctcctccttggcttcgcaagagtggtgccgccagtagcccctccgcgctccgccgggaccgacttgccgctggccgccaggggctccctcgcccaggaccggctccgccgtccaaccgtcctatcccctccggcctccgcccaggtgattcatatcaaagatctgattcacataattaccaagttcagcagttttgcctctgacgatatgggttcttgggagggccaagctaggcagcttttgttggatgaggaagaagatgatgaagagtttttctttcttcttctccctgctatactttcattcctctctgaagagcaaagcgaaactggagcagctattgaaagtttcgtggaattcaagaggagcactgcagccaaaacgctcgaagctcttgaagaaaagaagaagcatgatgaagatttctctattaaaaagtgtctagaggagttggatacaattgatgggctgacagatgaggatagatcatatgcaatggaagtctttgaatctgggttcaacagagaagtgtttatgagttcaaaaacccacatgttagggtggtttggctcaagagaaaaattaaagcgcttgctgctatcatgtgatgtgaagtgaatgtggttgtgaagagataggcttacag

SEQ ID NO: 46512 - DNA, 780 bp, Zea mays
  Clone ID: MRT4577_142427C.1
gctcggcccaagaaggtagtgcgcttccggccttcacgaacaggttcgtctcttcggctcctccttggcttcgcaagagtggtgccgccagtagctcctccgcgctccgccgggaccgacttgccgctggccgccaggggctccctcgcccaggaccggctccgccgtccaaccgtcctatcccctccggcctccgcccagattttattcagtattcactatatggcatttggttgtaaatagactacgatcacgatgactcttgaataaggtgattcatatcaaagatctgattcacataattaccaagttcagcagttttgcctctgacgatatgggttcttgggagggccaagctaggcagcttttgttggatgaggaagaagacgatgaagagtttttctttcttcttctccctgctatactttcattcctctctgaagagcaaagcgaaactggagcagctattgaaagtttcgtggaattcaagaggagcaccgcagccaaaacgctcgaagctcttgaagaaaagaagaagcatgatgaagatttctctattaaaaagtgtctagaggagttggatacaattgatgggctgacagatgaggatagatcatatgcaatgggaagtctttgaatctgggttcacagagaagtgtttatgagttcaaaaaaccacaatgttaggttgttttggctcaagagagaaattaaagcgcttgctgctatcatgtgatgtgaagtgaatgtggttgtgaagagataggcttacagaaaccg

SEQ ID NO: 46513 - DNA, 389 bp, Zea mays
  Clone ID: MRT4577_142428C.1
agccgccgcaacaacgctacaccgcccaagcacgcgacctcctctctctctctccccctcgtgtgatccgctctcccacacagctagaagaacgccttcatctcgagcgggtgagtgggtgatcggagagggcggcgctggcggtttcgatccgtgatctttctcgacgcggatggcggcgtatcgatccggctgaagcggctggcggcttccggcccaggaggcttggggtgttcgtggcggctgcgaggaggtagcgatggggttcggcgactggatgagggaagggcgccgatctcgctcctcctgctcccagtcgctggcgcggccaccatcgaccagatcttcagaacctcagtgttgaagcacaaaatggaagggggtgaatg

SEQ ID NO: 46514 - DNA, 628 bp, Zea mays
  Clone ID: MRT4577_142429C.1
cccccccctcgagctcccccccccccccccccccccccccccccccccccccccccccccccccccccccccccccccccccccccccccccccttttgggctttttggggccctttttactttttatcccccttttaaaaaaacgggggacataacatgttttcctggggaacaaaattgggcccccgtataaaaaaagttaatcctttggatcccaccaaaaaaaagggggccctgctttaaaggaaactttttttacatccggccttgaaggccgcttggcaaaaaacttttttgccagaaatgttcaaaggggtttttactttacccaaacccccgaactgggggggggctgttacaattggggttgttcccccctttttttttcaaccaacacccttttcttcccaccggggggttaaagtgggaccaaccaaaaaccccttggaaaaaaacccccccaaacggcgttacagttcggtggaaaaatttggaccccaaatttctccctcctaccccggggaaagatgggccccccgggggccccagggaccccccccctgggaccccgattgggttttttgggggttcccaccccaattgcccttttttggctccgggcgcccc

SEQ ID NO: 46515 - DNA, 406 bp, Zea mays
  unsure (1)..(406): unsure at all n locations
  Clone ID: MRT4577_14242C.1
ttctgttccggcgatgtggtgcccggtttcttcgtcgccgaatcagctcttgatgagtggcgctccctgtttttggcctgaggtccaggtaagtagtagagttggaggatgaattagcggcggagtggccagaatctccacgtgaaccttgtccagaggacttcatttcccttgcagagcacatagaaaccttttggggcatcgagtacgactcagataatatgcctagtttctctgattagggggtagttcaggttatgtgatgagttatgtcatgaaccatgtttatgtatcagctatgaaccaagttatgtcatgnaaccatgttatgtctagtgtattagctgtgactagttngtatcagcaaaactgagttcatgtatgtgcttgtgacatgagtaaaact

SEQ ID NO: 46516 - DNA, 616 bp, Zea mays
  unsure (1)..(616): unsure at all n locations
  Clone ID: MRT4577_142430C.1
ccggccgggcagtgacatccttgagtttgatttggatggccagagtctagccatagttcggaagccagaggacgcccgtgttacaaacaattcaggcattcaggccctggcagtagaaggtaacaagcttggccttgcaactttgtcaaagatgagcatccaattgtggcggagagagaccaattcagatgctgccggccggtggatgccatggaaaactgttgaactagataagctccttccagtaagtcggtcaaccaggatatggccaacaaccattctggggtttgatgaggatagcaatgctttctttatttgtacgagtgttggcatctacatgatccagcttgagtcaacacagttcacgaaacttttggaaggtgattcgtttactgcctattatccctacacaagtttatatactgcaggcttgggcatagatgatggagatgatagagctgaaattttgaacgatacatgagatgattgtcccaatatatcttgtaaactgaggcttggatttggtggcagagactatataacagaccattcaatgccgtgagctacagggaagttgntgatggcaccatgttggcatgttcatgctagaaacatg

SEQ ID NO: 46517 - DNA, 255 bp, Zea mays
  unsure (1)..(255): unsure at all n locations
  Clone ID: MRT4577_142431C.1
tcgctccataccggcagagccaagctangggggggggttgattggagaatgcctccgttcgcccaccggcgggagggagaccaaccagtcccagacgctgccacgactaggatactggccagggggccgaaggcaacagacggaacagacccaaaggccgccgcgaaatggaccggaatgcgacctccagcgcgtggccaggcaatgaccacgccaggggggaactggacatggggaacccttgcggggtggggc

SEQ ID NO: 46518 - DNA, 317 bp, Zea mays
  Clone ID: MRT4577_142432C.1
gcgctccttcggagatgctcgttaaaagaacgcatgcattatgcgcccgcatgcatcagcgtgctacgaggggccggtgacagtccccggcttgcgcgactcgtcgcacggggcacagaccccggcaccctcggcgaggacgcgacgccgctaggccaagcgcaggagcgtgtgctcctcggccccgacttacgacgcgggcccggctgccggcgttggatcccctgcgctggccgcagcagcctggcgcatccagccaccggcgcgcgggcgcggctggccaccggctcgtgggcgcggctggccccggcgcggat

SEQ ID NO: 46519 - DNA, 758 bp, Zea mays
  unsure (1)..(758): unsure at all n locations
  Clone ID: MRT4577_142433C.1
aattaccattggcaagaaccccgcagttgagttagcacacaatgcctgcgacgatgacatccggcgctctgctgctcgttggcgtcgtcctgacggcgcacaagttcttgtgcacggcgtacgacggcggcgatgggtttagcgtggagttcatccaccgtgactccgtcaagtcgccgtaccgtgacccgtcgctcaccgcgcccccccgcgtgctccaggccgcgcgccggtccacatcgcgcgccgttgcgctctcgcgctcctacgcccgcgccaacgtagcatcaaccgtcggcgccgtgtccgagctcacctccaggccctccgagtacatgatggccgtgaacgtgggcacgccgcccacccgcatgctcgccatcgccgacaccggcagcgacctcatctggctcaactgcagcaatggagctggcgctcctggtctggcggctgcccgtcacgcccacgcgcacgctcccgctccctcccccgcgccaccgccgggcgtccagttcaactccgccaattcgacgacgttcggtctcgtgagctgcggctccggcgcatgccgcgcgctccccgaagcctcctgcgccgactccaagtgcgggtatctctactcctacggcgacggctcccagtcgacgagcggcctcctctccacagagaccttcaccttcgccgacgaccaaggcacccgcggcgatcgggcgatgcgcgtggncaacgtcaacttcggctgctccacgacatgatcg

SEQ ID NO: 46520 - DNA, 323 bp, Zea mays
  Clone ID: MRT4577_142434C.1
ctttctttttttttttattctacggaagtattcccggctttcgttgtcattttttttttacaacgtcaagaaccatccttgttatattagttctaatccgctgctggggcattaatcggctaaccttgtttttcacaaacaggagctgccacctccatcttcgtagagtcctttgcatccggggcaataacctcatcaacggcagtgccccagttcccacgccctgcgccattatactttattttaaacccacggccagtcccgccggggcgctcatagggtttccgtggtggcctctcagagccatcaccaaactcaacttt

SEQ ID NO: 46521 - DNA, 888 bp, Zea mays
  Clone ID: MRT4577_142435C.1
ttgggtacctcgaggccggccgggtcttcgatcgtggttgcgccatccctcactctcctccgaagccatcgtccacgtcccagcctccccggactctaggggcagaagctgcagcgtcgagatggtgaaggggcgcacggggcagcgcgtgaggctctacgtccggggcaccgtccttggatacaagcggtgagcttattatcctcctcccccctccaaggccgccgcgtagtgactctgcgtgctggtggtgtgcgtggctgactggctgatgcaggtccaagtcgaaccagtacgagactacgtcgctggtgcagatcgagggggtgaacaccaaggaggacgtcgcgtggtactgcgggaagcggatggcctacatctacaaggccaagaccaagagcagcggcacccactaccgctgcatctggggcaaggtcgcccgcccgcatggcaactccggcgtcgtccgcgccaagttcaggtccaacctgccgccggaatccatgggccgtaaggtcagggtgttcatgtaccccagcagcatctaaagataatctgaatgtgtggaggacccttttcttctagattttatcttcagctgtccttgtaagggttgtgttcaggttgagagttagcaggttgagctgtctatctgagaaccatttaaaagttctctgagttttggtgttatggatcactggaagtattatatgaagtttaagttagcactaatttgtttgcaatacttttgtatgatgactctttagtcgtataatatgctcttattgcatcttgatcaacggttctgtgatttcatgagcccatctccggctccatggtcacgcgatgttgtatttcaagagctttggatgtgcggttttgcttcaa

SEQ ID NO: 46522 - DNA, 763 bp, Zea mays
  Clone ID: MRT4577_142436C.1
ttttgcgagatgagtccccaatcgaatcagcaatagcagcagctcttttgggagcggcgatacgcaatcaagcggctcctctccgagctgcagccggcaatcgaagcaatcaagcggctcctctctgagccgcagtcggaaatcaaagcggctcccttttttagtggctaatccggaatcaaaccagtcctttccggattacaatcagaaacaggccctctttcgaattcaggctccgagtctcaattggtggcgaggacctagcggacaccgcgcttctcgcagccaatcttcggaggagacggcaactcgtgagccttcagctgccaaattcacggtgaccaattcttctctggcctcggcggatctacgcaggagccatggggaaaggcagtagagatgatatgctcagcgcattgcctgacgacattctggtcaacattcttgaccgactcaatgtccctgaggctgcaagaaccagcatcctcgccagacggtggggtcagctttgcggcaagctgtctcggcttataataagcgtgcaggacttcctgcccgagggtgtgttacacagcaacgtctctgttgatgaattggtccggaccaatgcggctgtggtccaagcgacagagagcatactggcacgcagaaatccaggtgaacacaccatccgcctactatctacgacattctacttgagagatgatgcccccctatccatcggacatgctgttggtcatgccatggcgacgcacttggttga

SEQ ID NO: 46523 - DNA, 248 bp, Zea mays
  Clone ID: MRT4577_142437C.1
cccacgcgtccgcccacgcgtccgattcactgtcgattcagctgcgttgaagcgtcgaggggtgctgcctgtggtcgttgaagccaaattgggggctgctggtgaccggaatcgccccactcagggcggattgctcaccgtagctggtctacgccggaccgctcgcttcatgaatgttgccacaccacaacctaaaccccgggcacactgttctaacgtcgcgctccctcctgagtcccaagcgggta

SEQ ID NO: 46524 - DNA, 294 bp, Zea mays
  Clone ID: MRT4577_142438C.1
ctggttataattggcggagccggaggcgtcgggccgaggacaagtgcggatgggagaacgccgcggacgggcaggcaacacgggcgaggggcatagaccgacccaccgcggacgccaacgagaacaaagcagtactcggagagagcccgaagggctacgaacagaccggcaccccgcctatggcagagaggaagatctgcaaaaacaagcgggagggggtgaaccccagaagggagggcaagcccgcggacccgacgacgaaaatcggcgacgggatcaggtggcaccggaacg

SEQ ID NO: 46525 - DNA, 773 bp, Zea mays
  unsure (1)..(773): unsure at all n locations
  Clone ID: MRT4577_142439C.1
actctccttacgaactcgacatgtctgccgaaaacatttacgagggtgccattggtattgatttgggtactacatactcctgcgttggtgtatgggaccaagaacgtgttgaaatcattgccaacgagcaaggtaaccgtaccactccctcatacgtcgctttctctgacaacgagcgccttgttggtgacgccgccaaaaaccaggctgctatgaaccccaagaacaccgtcttcgatgccaagcgtcttattggtcgtcgtttcgacgatgctgaagtcaaggctgatatgaagaactggcctttctccgttgttgagaaggactccaaccccttcattcaagtcgagtttgaaggagaaaccaagactttctctccccaagaaatctcttctatggttctcattaagatgaaggaaattgctgaggctaagctcggtaagactgtccaaaaggctgtcattactgttcctgcctacttcaacgactctcaacgtcaagctaccaaggatgccggtaccatttccggtatggaagttctcagaatcatcaacgaacctactgctgctgccattgcctacggtcttgatgccaacgacaagaaggagaagaacgtcctcatcttcgatttgggtggggggaccttcgatgtttctcttttgaccatctctgggggtgtcttccccgtcaagccaccgctggtgacaccatcttgttggtgaagatatcgataacactcttgtcaacactttgtccnagagttcagcgcaagc

SEQ ID NO: 46526 - DNA, 312 bp, Zea mays
  Clone ID: MRT4577_14243C.1
ccaacccttccgccaacccttccggaaggtttggaaaacctaaatgagttggccagggctggagggcccgtttacccactagggggtccagatgaggggcttaaaaaggaactaatggtttttgaaaatcctggcctgaaaatggaaggcttagggcccttggggggcaccagcctaaagttcaaagtccactcctttaaaatccgtaggggcatcctggggctcattttagggttcgcaacattactgtgcccaccacacctaacagtattcaggggtgttccaaacccaccgttgtaagccgacgttttg

SEQ ID NO: 46527 - DNA, 513 bp, Zea mays
  unsure (1)..(513): unsure at all n locations
  Clone ID: MRT4577_142440C.1
gagggcgacgggatgcgataagcctaggagagtctgaattggctactcgatctcttggcacaaatggtgtgctcttggtgtaagccaaaaaatgaatcagcgcttcgatgcattgtacacagactgctacatgcatcttaccattacatgtgaactcttcatgcatcgaactcttgtgtaatgggttctaaacaaaatatttggcgtgtaccgtatttaacacacagaactcaaatgtaagattaaactaaattttctagttggaacataatttaaaacataaatgtaaacacattaagttaacagtttagacacaattaaataatgaacttagcaacgacaaaacttaaattcgtgctattaaccagacattaattaaatacatgtaatatatctaacgacaatatttacattgaactaagggcttaattatgttcagcttaagacaacggcataattaaacacattgtaatnaattaagaacaagttgtataagctattacgtaatatttg

SEQ ID NO: 46528 - DNA, 434 bp, Zea mays
  Clone ID: MRT4577_142441C.1
tggcttggaacctttgggctgatttatgtgcttgggtactgttaagtagagtcattagtcgtgtactcggtctagtgttgcgactgtgaatacggagatgcgtgctgatgggccttttgacgatcagcctaaggttaaggcgaaggagctgcctaatgacgggaaggagtctattagtaatgtttcggtgtctactgagaaggggctactgtcttctcttgcgtcaaagggtggtctgaaatgatggccgtctgaggaggagggagaattggtgtaagttgggttcgtatctgataaggatggtactttggagcgggcgtttgatagcgagtggagggcgtctaaaggtggtggtcccaagagtatatctatgttaaacgcggcggcggtgaacgatcgtagtggtaagcctaagattaccaatgaggtgtccg

SEQ ID NO: 46529 - DNA, 332 bp, Zea mays
  Clone ID: MRT4577_142442C.1
ccatagtacccaccacccctccggtgtcggtggagaagtatcaccgtccagcgacacctgcccgactgacgcctggaggtggctactacggacccccctagcgatcatttgacacctacgcggagacgcctcctgtcggtgggcgagtcgggatgcagcactgctccttaggcgtccagggatacctccgcatagacggccgacaggagggggcggctgtagggcgacccgattcgctcgtgcactgatgcttcaccaccgacacttggaggtgggcgggggttacgacgcaccatcttgtccatcctgtggaaggacgacggccgatccac

SEQ ID NO: 46530 - DNA, 312 bp, Zea mays
  Clone ID: MRT4577_142443C.1
aactaggattgatcctgtaaaaaatttttacgagcacaagcttagaggttttttcagtaactaataattccattaacagctcgacaaataaaacagaatgaaacagtcttcttctgaagagaatcttgaccaccaatcacgagaaatgtttacccacttttttgaatagggacagcacgtataataaatcaacttggctcaccttggaacctttcttttctgcaaaatcgccctgctgcaatatacccataattttttttttaaagcttgcatcaccatttccagccatgtttgaatcatccatttcccatt

SEQ ID NO: 46531 - DNA, 343 bp, Zea mays
  Clone ID: MRT4577_142444C.1
gccggccgggtctcgcgaggcggaggggtacaggagcgtggatggcagcgatagggaggatggggacgacgaggaggcggacgatgaagagtcgagtaggcctgggtcgagaaggacgtcgatgttgatgtccggtggcgcgggcaagatgctgccgaccgagacggtcgagttgaatgccttgccggggagggttggtggggtgagccggagcggcagtataaggagcgcttggttgtgaccgcgacgattttgtagacgactcatcacacatggactcgcaagaccgcaatgattgacatgcatgcatttcccacaaaaaaaaaaaaaaaaaaggccccta

SEQ ID NO: 46532 - DNA, 248 bp, Zea mays
  Clone ID: MRT4577_142445C.1
cgaccgacacgggacacgagcgtaatctggaagagcactctcagttggagctcacggtcttttactagtgaccagtgccagtgacacaacggtcgaaacaacacactagtgcacggatgatgtccctaaagattatgacaagagccttggttgcgctgctgcggcttttatgttactattaccatctagaacttagctcgatgagaactggagggacgaggacatttactgacgtggtttaacagggc

SEQ ID NO: 46533 - DNA, 139 bp, Zea mays
  Clone ID: MRT4577_142446C.1
atttatcctttccgtaatctctttttaaccctgctgactattacagggcttgtttaatcacagtggcaagaattacatgtatcttacagtaaagaaacagaatactggaatcgttagagaaccctgatgtgttgacctg

SEQ ID NO: 46534 - DNA, 518 bp, Zea mays
  unsure (1)..(518): unsure at all n locations
  Clone ID: MRT4577_142447C.1
ccgggtcgcaccagcgtccgcccacgctccgcggccgcgtgggcgaggtgagcgccaagncggntcggcctacgcgttggtgctggacgccaanacttccacgagaacgcgcgggccaagttcccgtacgcgatgccctacggcttgcactgctgctgggtgcctaggagtacctcaggctcagacgcgtagcgctagcagatcgttcgactctgctgctcgcatctcccacaccgtacgtgccgattcgaccgacagactgggcatagtagtacaaacagaaggtgtctctgctgctttatttcctggccttcggctgaagggaaaaagtatacacgtcgtagtgatgtattggcagacatcgtatacgtcttcccactcaagtggctgtagcaattacacgcgtttaattgtacagagttagctcatgtgatcgaagtattgttcattatgtacacatgtagtacagtgttttgttttaaaaaaaaaagagcccggtacagtgatattccttcgtc

SEQ ID NO: 46535 - DNA, 989 bp, Zea mays
  unsure (1)..(989): unsure at all n locations
  Clone ID: MRT4577_142448C.1
gcagctggnaaaaggactacgacgcgctgcgccgccagctcgacgccgcccgcgccgagaacgacgccctcctctcccacaacaagaagctacaggcagagatcatggcgctcaagggaggcggaggcggcggagggaggcaggtggcggcgtcggagctcatcaacctcaacgtcagagagacggaggcgtcctgcagcgagaataacagctccgagatcaacggcctcgacgtctccaggcctgatccggccgccggcgagagccccgccatgaacagctaccgcggcggcctcccgttctacgcctccgctgccgcccgcgccgacatccaccaccagctcctgcacagcggcggccagccgtccccagccgcggcggcgccgcctaagatggagctcgcccccggcagtccccccgccacggccggtggcggcggaggcacctttggcagcctgctgtgcggcgccgctgtcgacgagcagccgccgttctggtcgtgggccgacggacaccacacctgcttccagtgaacaaatcaaatacgtacgattcttcccattcgtcatacacggtgagccacggatccaacagcacgtcggccgccgccgacgtatatgttgtgggcaatgcaaatgcctcgtacgtgttgaacaaattgatcaaagaagcagctcggatatgcgaggtgatccattggatgagatgttccaatttgagttcgatcgagattaggatcatgcacggagtgaatcatatatacgactatagctagattttggagttgagtagtatgttttttttcttcttctttctattattacttaattatttctcccatctctctttatttatcactgttttcctgtttaattaatatcatatataggtgaatacatttgtgaggcaaaaaaaaaaaaaaaaaagcggcctataggattatggtaccttgtcattcgcccttgaatcctgcaaattcttttttcttt

SEQ ID NO: 46536 - DNA, 1209 bp, Zea mays
  Clone ID: MRT4577_142449C.1
cattgggtacctcgcgtccgcggacgatcgggctcgtgattcgtgaacggcggcgacaagaagccgggagagatgccgctggccacaactgctccgccgccctgtcctccgccgagtccagcagcggcaccagtccggacgcagctcctctcctccgtcgcgaagctcgcgctcacggccgcgctcgtctgcggctctggcggtcccgctgccgtcgtcgtcgtcgttccggccgccgctcaggccgtcccgttcgtccgtcctcctcctcctcccctgcaaggaaggcccttagcgtcctccactccttacgcgcagtcccagaagctgcagcttggcctcgacaagctcggaaagatcaggccatgcccgtccaccaacccggggtgcgtgtccagcaacccgctgggatcctccggctccttcgcctcgccactgctcatcccggaatcatccgcaggggagaaggccgtcgcctcgctgcggcaagccatcgagaagacgcagcgtaatgtggagttcaaggtcgacgaagacactccatatggacactacatcgaggcggagatggacggcggcgtcggccgggacgtgatggagttcctggtgaagaaagacgccggcgtggtggcgtaccggtgcatggccaccaaggtcaccttcgtctaccccttcaccaccgctgtcggcgactccaagggccagaagcagaggatcgcggccatctcgcaggagctcggatggtacgccccggacatccagtcctccatggactccgtcgacgacgtcaattacgttccgtgaagaattaagaccgtattacgaatcgtcacttcatcgatacgatcgggacagcagagctagcggcggatctggttgattttgatgccgatggtccttacgatatgaggtgtgtccgtcttcagctctttataaaagggattcagcttttagctcctcaggtggagctacttttacagtgaaaggtggtagagctgttctgtaaaatgtttgataaagataggtctacgagaagtcagttctttcggctctgactaagagcatctccaacaacaaaccctaaaatagagtcctaaaatttaaaataggaccatatttagaatgtttagggtctcaaaagaaatgtttactccaatagtcaggccttaaataatgctatttaagaaataaatcatgatattaggaaat

SEQ ID NO: 46537 - DNA, 715 bp, Zea mays
  Clone ID: MRT4577_14244C.1
gtacgcctgcaggttctggtccggaattcccgggtcgacccacgcgtccgcgcgcgggacggagttaaggtcttctttatcggcagtgtacggcggcggccgagcggagcgatagtcagtggctgcggacgagccctcgggggtgcgagcgtgaccgcggccaagcccgcgcgtcgccttctgcggcgagtagggcctcgcggcgtcatcggcggcgagtagccgctgcggcctggccgaccatgtcggacgcggctgaggagcagcccatggagacgacgggcgccaccgagaacggacacgaggccgcccccgaaggcgaggccccggtcgagcccagcgcggctgccgcggcccccgcggcctcggccgggtctgggggcgggaccacgaccgcaccgagcgggaaccagaacggcgcggagggcgaccagatcaacgccagcaagaacgaggaggacgcgggaaaaatgttcgttggtggtctgagctgggataccagcaaaaaagacttaaaggattattttactaagtttggagaagggttgttgactgtacaataaaaatggatcccaacactggacgatcaagaggtttggggtttattctcttcaaagattcttctagtgtggaaaaggtcctagatcagaaggagcacaggctgggatggtcgtgtcattgaccctaaaaggctatggctatgaagaaggaccct

SEQ ID NO: 46538 - DNA, 1093 bp, Zea mays
  Clone ID: MRT4577_142450C.1
gtgcaccagagggggaggaagaaggaaagcaagcaagtggtgggaggagtcatggactgctgcatctgcagccccacggcgtccgtgtacaggcttccgaggaactccatctgtgctccatgccacgagggcgccaaggcagtcatcgcttttctgaacaaggatggtgagcggcaggaggaagacgccggtggccaccaccaccatggctctgccctcaagtccagagggtccacgacgcagcctcatagcgcagccaaggggatgagggacgcgtgggagcaggtgaaggagatgagaggcagggaggaggaggcccaccggagagccgccttcctcgcgatggcgccgtggaaggagcgactccacaccgacatcgtcgtcaaaccgggcactgggtctccaatactggcccacaaagccatcctggtaagcacgtgggcctgatgcactgagccctgcatgcatttcacgccggcctgacgcacgcacgcacgccggccgcgaggtcggaggtgttccgcaacatgctggccgccgccgctggcgacgccatctcgctcccggagctggcccacgacgagctatccctcctgctcgccttcctctacaccggcaacctcctggaggacggcccggccgtgccgccggtcccggaggccggaggagcggcagctgcacgcgctgctcgtggcggccgacaagaagtacgacgtcccgttcctgcgccgggcctgcgaggcgcagctggacgcggccctggacgcctccaacgcgctgcggacgctggaggtcgcggacctgagctccagcgcggcgctcagggagcgcgccatgggcgcggtggtggagcacgcccagcaggcggtgttctcgcccgagtactacgacctggccaccaggaacgcgggcctgtgcgtcgagatcacccgggcgctgctggccaagatgtccatgacgacaaataaagcctcatgcatagatgtagctagagcttcaatgcaaagctgcatgctgcgacgatagtgtttgatttcatcaacgatcctatagatttattctatatgttaaacgcaattctgaagggctgtca

SEQ ID NO: 46539 - DNA, 298 bp, Zea mays
  Clone ID: MRT4577_142451C.1
tctttttagtacggggcggagcagacatggtttaatcgttggtcgtcggggcaagcacattaactgggcacccgcctggcggaccctgtgccacataacgggagcatcgtggaccaggacggattctgttgggcggtatgtcgaatcctgatacgaagaaagcggcgacgacatggacctcctttgaccggccgatgtggatccccggtgccgaggcgcccgactacctggacggctcgctggtacgcgactacagattcgacccgctaggactaccatgccagcggagtacctacag

SEQ ID NO: 46540 - DNA, 702 bp, Zea mays
  unsure (1)..(702): unsure at all n locations
  Clone ID: MRT4577_142452C.1
gacgcctgcaggttccggtccggaattcccgggtcgacccacgcgtccgcattcttttctctcgccacctagcccctcttctcttcaggtttccaaatgcctttccaggctagaacccaggttgtggtctgctggccggacacaacaattggcgaaccaacgcgggactgagaaacggcaaaggatttttggaagagacgctgctggttcggagctccataaaataaaggataagggaaattcataccggagaaggtatgggctaagctgagacagcgttaaacccgagcgctggttcacttaggttcagcagtgaggagctgggtaataggcggtaggccgtagctctccgaagctacatgaggtgtgagaaaagaaagggtttattaaaaggaataggcggattgccccagttaataaaaaatgcatcataagggaggaaaatgtcccaaaaagcagagagaaatatctctctgggccttatagcaggagtactctgttcccttttgtgtcttgtctaatgtccggtgcaccaatctgttctcgtgttcaattatgtatgtttcgtgtccagtctgtataaatgaatgttctatgtttttgtgttggataataaagatggtatanaaaactntatctgcaaagccgagagctgccacatgtttcagccaggaatcagacacgtggcgagagggcccctgc

SEQ ID NO: 46541 - DNA, 435 bp, Zea mays
  Clone ID: MRT4577_142453C.1
aacctttgggctgatttatgtgcttgtgtatactctgcagaactagcttcccgatcccaatagtcacactaatcgcctaactgacgtttccactaggccccggcggaagcggactactccccgtacttgacgacttgcccctcctcaaggaagggttcctataaaacccttaaccgcatagtcgggagattcactagttcgcaagtggttcatccgtataattcgagcggattgtgcgggattaaatcgcggagcaccgcgtacccgtccactagtagcacacagcaaccctccttccgtggttctaacccaggcattccggagacgctctaacctttcccgtaatcggcgttgctcggtactgaaggtagccacccgcggtcatattaataataaccgagcgcgctcccgccgacgtcggaaccgtagacaccg

SEQ ID NO: 46542 - DNA, 407 bp, Zea mays
  Clone ID: MRT4577_142454C.1
agcgccatgattaaacatcgatcatgagaacacaacatgtgaaccttcggttcgacacaaacatgaacatacatcagtgatacacagagggactactacaaatcatggaacagggatgcgtgctgctcatctaaaggtatgctcagaacacagtctggacaaaagcacattgaccatcgtgcattttacgaatgaccataaagtcataagccggggactaaggggactgcatcttctttaagatgatcccattaaagattatcgcaactcatgatggccacggaggtaaatcacataacacaaccacgacttggttgatccttgcttgagaccgcatctatattccgtacacgctacttatgacggatgcctaagcatgacatgctcaatcgttgacctactgacaa

SEQ ID NO: 46543 - DNA, 3215 bp, Zea mays
  Clone ID: MRT4577_142455C.1
acacctccctttcctatacgaccgacagaccgtgtcgatctgtgtggcctcactcactcaccgatccctcgccaagccacaggctccccgtgagctccgccacgcgggcgcctcgcctccctcgtcctactccttcctcaccgcagtccgcaggagcaatggcgatggcagccatagcctccccgtcgtcgaggaccctgatccctccgcgacaccacggcgccgcgccctccccgtccacctccggcgactcctcgctccgcctcctccgcgcacacccgcgccacggacggcgcggccgggcggtgtccgtctcgacgcccgcggcgcggagccggccgttcgtcttctccccgcgcgcggtgtccgactctaagagctcccagaccctgaagccaatgactttggaagtgaggttattccaggtgcaaccagcattggaaagagggttcagccctcgccgtgccacgggctcgccggttgcaaaccatggacatggctttggcgtctaaagcctcccctccgccatggaatgccaccgagccttgagcagccaatgccaaagcgtgacaaagccgctgcaaatgattctgtgtctctgagtctgagatgatgatgatgcctgatgggcgtcgtgtctgtagtcctccccctcgggcgcctgggtgttgtgttgtgttgtgtgatattctaaaaaaaaaaaaaaaaaaaaaaaaaaaaaaaaaaaaatcgaggccggccgggcgcaagcaaaacgccaaacaggctcctctgaaactcccagagccggtagaggcacgccactccgcagtgtcagtcactgcccccccatcacgccgcccgccctttctcggccgttgccgcgagctcgctccgacccaccgccgatggcgacggcgatgggcgcgatggccgccacctgcatggcctcgatcccggccgccgctacgttccccggtgatctcggcgtcggacgacgccgagcggttgtaccagggtggcgcgccggtgggagacggctgcgtgcgacgccgcctgcccggaggccgttcctgttctcgccgaagggcgtttcggactcgcggagctcgcaaacgtgccttgatccggacgccagcacgagtgttcttgggatcatccttggagggggtgctgggacaaggctgtatccactgacgaagaagagggcgaaaccagcagtgccgttgggcgccaactacaggctcatagatatccctgtcagcaactgtctcaacagtaacgtctccaagatatatgtgctaacacagttcaactctgcttcgctcaaccgccacctctcgagggcctatggaaacaacattgccgggtacaagaatgagggattcgttgaggtccttgcagcacaacagagtccagagaatcccaactggtttcagggtactgcagatgccgtgcgtcaatatatgtggctatttgaggagcataatatcatggagttccttattctggctggagatcatctgtaccgtatggattaccaaaagttcattcaagctcatagagaaacagatgctgatataacagttgcagccctgccaatggatgagcaacgtgcaactgcatttggcctcatgaaaattgatgatgaagggaggatcattgagtttgctgaaaaaccgaaaggagagcagttgaaagcaatgatggttgacaccaccatactgggccttgatgctgagagggcaaaagaaatgccttatattgctagcatgggaatctatgtttttagcaaagatgtgatgcttcggcttctcagagaaaattttcctgcagcaaatgactttggaagtgaggttattcctggtgcaacagacattggattaagggttcaggcttatctatatgatggttactgggaagatatcggtactattgcggcattttataatgcaaacttgggaataaccaagaagcctgtaccggattttagcttctatgatcgttttgctccaatttatacacaacctcgatacttgcctccttcaaaggttcttgatgctgatgtgacagacagtgttattggtgaaggatgtgttattaaaaactgcaaaatcaaccattctgtagttggactccgttcttgcatatctgaaggtgcaattatagaggacactttactaatgggtgcagactactatgagactgaggctgataagaatgtcctttccgaaactggtggcattcccattggtattgggaaaaattcatgcatcagaaaagcaatcattgacaaaaatgctcgcattggagaaaatgtgaagataatcaattttgataatgtccaagaagcagtaagggagacagaaggatattttatcaaaagtggaattgtcacggtgattaaagatgctttaattcctagtggaacaatcatataaagtcagccaacaccatgtatataaggttgggttgcatcatatggtgatcgccaatgcgcatcaagttctctcatcccttgcgagaccatgcttatttccattgcaaaatcatcaagctctgcatcaacttgttgtggataataatgaaataataaatggtgccattccatggcaacatttttctgtcactagtatgaggcactgttctaaatgtactgttgagtggaatttgaatatgtatgcttttgcaatcgcacacctaaataccttgtgcttatactccttgttacctaaatatgctcactgcattgcccaaggaatcagattaaaaatgtcatgcataacatgatttttgttagattgttgtaaaaaaaaaaagcggttcttctagcctcagagagatgtttagagtggaaaaaaaaaaaaaaaaaaaaaaaaaaaaaaaaaaaaaaaaaaaaaaaaaaaaaaaaaaaaaaaaaaaaagcggccctatgtaagacagacaggttttttatcaaacgcgtcatacgtactagctattaaagatgctttaataactagaggaacattgatataaagtcacacaacaccatgtatataaggctgggttgcatcatatgttgatcgccagtgcgcataaagttctctcataccttgcgagaccatgcttatttccattgcaaaatcatcatgctatcaatcaacttgctgagtataataatgaaataataaatggtgccattccatagcaacatttttgtgtcactagtatgacgcactgctctaaatgtactg

SEQ ID NO: 46544 - DNA, 2376 bp, Zea mays
  Clone ID: MRT4577_142456C.1
cccacgcgtccggttattgggaagatattggtacaattgaggcattttatagtgcaaacttgggaataaccaagaagccaataccagatttcagcttctatgaccgttctgctccaatctatacacaacctcgacatctgccaccttcaaaggttcttgatgctgatgtgacagacagtgttattggtgagggatgtgttattaaaaactgcaagatacaccattctgtagttggactccgttcttgcatatctgaaggtgctatcatagaggacactttactaatgggtgcggcgggagatccggtagaggctgaccactccgcagtgtcagtcactgccccccctcacgccgcccgccctttctcggccgttgccgcgagctcgctccgacccaccgccgatggcgacggcgatgggcgcgatggccgccacctgcatggcctcgatcccggccgccgctacgttccccggtgatctcggcgtcggacgacgccgagcggttgtaccagggtggcgcgccggtgggagacggctgcgtgcgacgccgcctgcccggaggccgttcctgttctcgccgaagggcgtttcggactcgcggagctcgcaaacgtgccttgatccggacgccagcacgagtgttcttgggatcatccttggagggggtgctgggacaaggctgtatccactgacgaagaagagggcgaaaccagcagtgccgttgggcgccaactacaggctcatagatatccctgtcagcaactgtctcaacagtaacgtctccaagatatatgtgctaacacagttcaactctgcttcgctcaaccgccacctctcgagggcctatggaaacaacattgccgggtacaagaatgagggattcgttgaggtccttgcagcacaacagagtccagagaatcccaactggtttcagggtactgcagatgccgtgcgtcaatatatgtggctatttgaggagcataatatcatggagttccttattctggctggagatcatctgtaccgtatggattaccaaaagttcattcaagctcatagagaaacagatgctgatataacagttgcagccctgccaatggatgaacaacgtgcaactgcatttggtcttatgaaaattgatgatgaagggaggatagttgagtttgcagaaaaaccaaaaggagagaagctgagatcaatgatggtagacaccactatattgggccttgatcctgaaagggccaaagaactgccttatattgccagtatgggaatctatgtttttagcaaagatgtgatgcttcgtcttctcagagaaaattttcctgcagcaaatgactttggaagtgaggttattcctggcgcaacagaaattggattaagggtgcaagcttacttatatgatggttactgggaagatattggtactattgaagcattttataatgcaaacttgggaataaccaagaagcctgtaccggattttagcttctatgatcgttctgctccaatttatacgcaacctagatatttgcctccttcgaaggttcttgatgctgatgtgacagacagtgttattggagaagggtgtgttattaaacattgcacaatcaatcattccgtagttggactccgttcctgcatttctgaaggtgcagttatagaggactctttgctaatgggtgcagactattacgagactgagaatgataagaatgtcctttctgagactggtggcattcccattggtattgggaaaaattcacatatcagaaaagcaataattgacaaaaatgctcgcattggagaaaatgtgaagataatcaattttgataatgtccaagaagcagtaagggagacagaaggatattttatcaaaagtggaattgtcacggtgattaaagatgctttaattcctagtggaacaatcatataaagtcagccaacaccatgtatataaggttgggttgcatcatatggtgatcgccaatgcgcatcaagttctctcatcccttgcgagaccatgcttatttccattgcaaaatcatcaagctctgcatcaacttgttgtggataataatgaaataataaatggtgccattccatggcaacatttttctgtcaaagtagtttatgaggcactgttctaaatgtactgttgagtggaatttgaatatgtatgcttttgcaatcgcacacctaaataccttgtgcttatactcgttacctaaatatgctcactgtcatcttagattgttgtaaaatgtcatgcataacatgatttttgttagattgttgtaaagcttacataagtttcttctagcaaaaaaaaaaaaaaaaaaaaaaaaaaacgaaaaaaaaaaaaaaaaaagcggcc

SEQ ID NO: 46545 - DNA, 569 bp, Zea mays
  Clone ID: MRT4577_142457C.1
ggccgcttttttttttttttttttgttttttttttttttttttttttttttttttttttttttttttttttttttttttttttttttttataccattcagatcgtgttttaatttcctgtaatttttttatgttccgggaaaaccccaaaaacgggggggccaccaacaacaaggggggggcaggggggggaaaaaaaacaaaaaagaccaaaacccaaggaaaaaaacgagaccaaaggaaaaaaaaaaaaaaaaaagaaaggaaagcaaaaaaaaaccccgcccccgggaagggaccccaccaaccgaaacctgggccaaaaaaggcagccccgttttgcccggaaggcaggtccacccccaaaaaacccgcaaagcagaaaaacaaccccgaggccccaaaaaaaacccccgggaaaaagaacaacacccaaaaaagcggggaaccaccacaaaaagcggggaacaggaacaaccccggcaactgatgggcgccccacaaacctgggaggaacagaaacgcccataaaaacccggaaccaaggggtgcccggggacccaacggagg

SEQ ID NO: 46546 - DNA, 293 bp, Zea mays
  Clone ID: MRT4577_142458C.1
aaataaaaaaggggcccaaaagctttatttatttaatttacacaccaccatgatgagcgaattgaaaaaaaggataatgggggatggaacaagtacctaactagcaatatctcccctgtttttattcaaattaaatttggcccaagtaaacacccattgcattaacaagcctggttcccccccccccataaaaacccaacattctttttccaatgggcccccagacaaaaaaacccgttccgtttttaaaaccccaagggccccaagttttttttcttgtgaaaaaccttaac

SEQ ID NO: 46547 - DNA, 551 bp, Zea mays
  Clone ID: MRT4577_142459C.1
aagaatcaagaaagaacttttttatttctgggatagccacaaacatcatatcaaaaagcttcatattgaactatgactacaacatagccatccagaggagggaccacccttgatgggttgttggcagaacgtgattgaactagccaaaaaggatgtatgaatgggatcaattgcagcattactacaaaggagccagcgctaagcgcaagacgcaggcagaacgggaacaactggggcagggacaagaagggatcaaggttcacatcagatatctggctgaatggcggcagttgctgctgcggcaaataagcagcaaacttaatgttgctgctgctgaatggaagaaattgctaccaggtaggcagcagctatgtgactgaatggtaggtgccgccggaaataagcagcagagttcaatgcagctcagttggcctgaatcggaagaaactgctgttgctgagagtaggcagcaaggtttcctagcacaagctgttgttactgttgtgccttgatgttttgtgccaacaaatgcaccaaaggaaactgctgta

SEQ ID NO: 46548 - DNA, 459 bp, Zea mays
  Clone ID: MRT4577_14245C.1
gatctgttgaaccacaatgctgctcgaggtatgtacaccgaattgcccacaccgagcgctctacatggaagcagttgtcagtagacggcacggctcaccatgggtagttgactgaacgctggcataaactgattgcagcatgcttgttagttagctaggtactgcaacctacagttcgtcagaaacaagtcgtgaaggatgcaagcagctgctgttgccagtaggcgacgggtttcaccactgctaggtggatgaaagcaggcagaaaacgttgatggtgtctgcatgcgatgcatgatatgattagaagtgccacagattgcagtcgccaatcagcatactgctgtgtaaggcgctagtccaaagcgctaaactgcaactatcagcttgcacgtgtggatgctaaaaacccactgaaagagctgtggcgaggaactcagcaacacagtacctagcatc

SEQ ID NO: 46549 - DNA, 300 bp, Zea mays
  Clone ID: MRT4577_142460C.1
attaacggttggttcttttcctcatatcattaaatttcaaaaattcagaaatccaaaataaaaatacatgaataaacatcaaaacaaaaacagccctcaaagattcccaaaaagaaccccaacacggtgagcaaataaactgatgccaacccaccccaaagacgaagaccccataaaacgcccgcaaccacctaaacggacacaacagcacacacccaggttaacacgcgagacccaaacttccaacaaaaaataaagcacgccggaataagctccaacaaagaccaagcctacccccct

SEQ ID NO: 46550 - DNA, 408 bp, Zea mays
  unsure (1)..(408): unsure at all n locations
  Clone ID: MRT4577_142461C.1
gccctggacgacccacgcgtggcggctagtgccatttataccacacgttcctccggctctgttactttaatgggctttcgaacacctaggggagcaagggtacaggctacaacaagcgcttgcttcnagcgtcttacaacaaccaattaaccaattgcaacaacaatccttggcacatctaaccatacaaaccatcgtaacacaacagcaacaacagttcctaccagcactgagccaactagatgtggtgaaccccttcgcctacttgcaacatgcagtgcttgcattcaacccacttgctctggcaaacgtagctgtataccaacaacaacaacaattgcaacactttttgccagcgctcattcaacttaccatggtgaaccctggtctccttcctacaacagcaac

SEQ ID NO: 46551 - DNA, 684 bp, Zea mays
  Clone ID: MRT4577_142462C.1
ttaatataagggaaccaaaggttgagctctgagggccgcgaaaattttttttttttttttgtgtctagcactgccaggatgcgttattattgttagtacatacagataattgaaaaacacacatttgcatgacattacatattggagggtgcatcatacggagatattaggaaaaaaaacaattagcttacaaaatgccagattaataggaatacaatgtttaggttccgagcatattaattggttatcgtatgcgagggcagccgaggactacgaacgtgtagactcactcagtgcctgagctgtacgcacacgtgaccccgacgcatgcatacatgcatgcatgcatggttcatacatttcaaggggctaacgtacaagaaggtggaggggtataggacctcctgcagttttcgttgaggcgcggtttcttctctttgcaccaggtgacgctgatgatcttgatgacctcgaccgcgtttaccacgtacgccttgaggcactcctcctgcaagaccttaatgggcgctgcccggatgcccttctgctcggagcacttgcccttgacactggatcctgccgcacagacacaggttgcactgctgggacagagcacacgactccttgcacacgaccagtgccgtccccttcttgccctggcacaacgcagaccagaagagtgcc

SEQ ID NO: 46552 - DNA, 290 bp, Zea mays
  Clone ID: MRT4577_142463C.1
tgttgagatggtggcggggggcgctccggaggtcgctcatgctgagcagcagcagcgccggcgccgaacagcttgagccggagcaggacgatgacgaacttcattgcgcaggttgaaagactgatatgtgatcgacggtctgcagagatggaggctgatgtgaatgctaatcagagtacaaagaagccaccttctatgcgaatgttaaggcaagctgccaatgcatatacaccttctgcctttaaaatgtttgagagggaattagaaattttccattgtatttgtattct

SEQ ID NO: 46553 - DNA, 782 bp, Zea mays
  unsure (1)..(782): unsure at all n locations
  Clone ID: MRT4577_142464C.1
gnaagtcagcgagaatctccatggccaactcccgccagaacatccggaagttggttaaggatgggtttatcatcaagaagccccagaagatccactcaagatcccgtgcaagaagggcacatgaggccaagcagaagggaaggcactctggatatggcaagcgcaggggtaccagggaggctaggctccccaccaagattctgtggatgaggaggatgcgtgttctgaggcgcctgctccgcaagtaccgtgaggccaagaagattgacaagcacatgtatcatgacatgtacatgaaggtcaagggtaacatgttcaagaacaagagggtgcttatggagagtatccacaagtccaaggctgagaagctcagagagaagacactttctgatcagtttgaggccaagcgtgcaaagagcaaggcgagccgcgagaggaagattgctaggagggaggagaggttggcacagggcccgagagaaccaacagcaccagtctcagccactgctccaactgctggggcaccaaagaaagcaaagaagtgaagtattgaaacaaagctgcttgctagtactatataagcataattttggagcacctgaactattttgctgttatatagtttggtgtcttgatattctgagtgtcatatctcgactgttctgttggataatgcagtagagttgtttatggagtttcgttggaacaggatccccaaaaaatgtttatttgacagatgatgatctctggatgtgtggttatcttttatgaaaattagtctt

SEQ ID NO: 46554 - DNA, 1043 bp, Zea mays
  Clone ID: MRT4577_142465C.1
ctcgaggccggccggggtggccatcgggatatatccacacctgagtcccctccgccgcctgccgcactctcctgcgacgccaccaccacacgttcacggtagcgagagcttaccgtcgtcggcggcgaagatggtgtcgctgaagctgcagaagcggctcgccgcgagcgtcctcaagtgtgggaaaggcaaagtctggcttgaccccaatgaagtcagcgagatctccatggctaactcccgccagaacatccggaagttggttaaggatgggtttatcatcaggaagcctcagaaggttcactctaggtcccgtgcaagaagggcacatgaggccaagcagaagggaaggcactctggatacggcaagcgcaggggtaccagggaggctaggctccccaccaagattctgtggatgaggaggatgcgtgttctgaggcgcctgctccgcaagtaccgtgaggccaagaagattgacaagcacatgtatcatgacatgtacatgaaggtcaagggtaatatgtttaagaacaagagggtacttatggagagtatccacaagtccaaggctgagaaggccagagagaagacactttcagatcagtttgaggccaagcgtgcaaagagcaaggcaagccgtgagaggaagattgctaggagggaggaaaggctggcccagggcccaagagaaccaacagcacctgtcgcagccccagctccatctactggggtgccaaagaaagcaaagaagtgaagtatggaaacaaagctgtagctttttggtactatataagcatgactttggagcacctgaagtattttgctgttctatagtttcgtgtctcaatattctgagtcttgtatctctaccgttctgttggataatgcatgccgtaagagttgtttatggagcttttgttgttacaggacccctaaaaatgtttgtttgacggatgtttggaattgtggtcatgtttataaaaaaaaaaaaaaaaaaaaaaaaaaaaaaaaaaaaaaaaaagggcggccgccaccgcggtgga

SEQ ID NO: 46555 - DNA, 1109 bp, Zea mays
  Clone ID: MRT4577_142466C.1
gggaccctcgaggccggccggggtccatcgggatatatccacacctgagtcccctccgccgcctgccgcactctcctgcgacgccacaaccacacgttcacggtagcgagagcttatcgtcgtcggcggtgaagatggtgtcgctgaagctgcagaagcggctcgccgctagcgtcctcaagtgtgggaaaggcaaagtctggcttgaccccaatgaagtcagcgagatctccatggctaactcccgccagaacatccggaagttggttaaggatgggtttatcatcaggaagcctcagaaggttcactctaggtcccgtgcaagaagggcacatgaggccaagcagaagggaaggcactctggatacggcaagcgcaggggtaccagggaggctaggctccccaccaagattctgtggatgaggaggatgcgtgttctgaggcgcctgctccgcaagtaccgtgaggccaagaagatcgacaagcacatgtatcatgacatgtacatgaaggtcaagggtaatatgtttaagaacaagagggtgcttatggagagtatccacaagtccaaggctgagaaggccagagagaagacactttctgatcagtttgaggccaagcgtgcaaagagcaaggcaagccgtgagaggaagattgctaggagggaggagaggctggcccagggcccaagagaaccaacagcacctgtcgcagccccagctccatctactggggtgccaaagaaagcaaagaagtgaagtatggaaacaaagctgtagctttttggtactatataagcatgactttggagcacctgaagtattttgctgttatatagtttcgtgtctcaaatattctgagtcttgtatctctaccgttctgttggataatgcatgccgtaagagttgtttatggagcttttgttgttacaggacccctaaaaatgtttgtttgacagatgtttggaattgtggtcatgtttatgaaaattagtgttgtgggtcttcgtgtgaaaaaaaaaaaaaaaaaaaaaaaaaaaaaaaaaaaaaaaaaaaaaaaaaaaaaaaaaaaaaaaaaaaaaaaaaaaaaaaaaaaaaaaaaaaaaaaaa

SEQ ID NO: 46556 - DNA, 429 bp, Zea mays
  Clone ID: MRT4577_142467C.1
ggcgacccacgcgtgcgctcattgaccctacggcaagctcatactagtgaatctttaacacgacctcaagtgacatttgttcaggggctgactagaggggagctcaaaatggctacgccagactggccttgacgtttgccttgctcatagatactatggacagcggccctaacactctactgcaagattgaaacgcatctttcatattagtgatgacaacccttatcctatactccagatcgatccaacactaccgaagcaaatccatcattgcaaatcgcatgcccttaatgtaacaactcccgcaaattatcctcatgtactgcaccgccagatacaccgtgacttcactaagcctctcattgtgatatgctcaaagaaccttcttcccacaagtactgccaatggaacctatctgaattttatcat

SEQ ID NO: 46557 - DNA, 324 bp, Zea mays
  Clone ID: MRT4577_142468C.1
gttcggggggtcctcctttttttttttttttttttttttttttgaggaacgaaaacttttttatttttgaaaagttaaacaccggccgtaggtattgggcccccttcgtaagatcacttattttacaaacaacctttaaaggttaggcccttgtcacctaaccaaaccgaacctggaacacttaccaatttaatccacctccctgaatttgggaccagaaccggttcccctcttaaggggcattcttattcttttcagaaggaaatccgttttcgaggcccttggcttggtaaatttttgcgatgatgggggtgcaaatcccct

SEQ ID NO: 46558 - DNA, 882 bp, Zea mays
  unsure (1)..(882): unsure at all n locations
  Clone ID: MRT4577_142469C.1
tccacccacccgtccgcacacgcgaccggtacttctctgtcccagcgcctacttcctttgcttctacctcacggcgctcctgccccatctccggcgttcctccagctcgcccatggtggcgcgcgctgctcccctgcgttcttccctgcaattttcagccttcccgcgcgcgccctcctgctccctggccgtcgcgccatgccggccggagctcgctcggctgcagtctccttctccctcaaggtccctcgcgcccgccgtgctccggtcggagggggatttgctgcgcgcccatctaatcctgctcgggtcgtgttgagcaccatattgagcgcggacggtccggccctgaggccggacggtccgcggtccggacggtccgcgcttgtgggccggacggtccgcgcgtgcgcagaacagattaggggttccgagttttgtgctacggttgttagccaaaatcaagcgggattaactcggaaattagttggtaagcggatccagacctccccctttatatatatgaagggctacggccgattaaagcccccaacaatcgaacaaatcaagtctattactcatttttaccttatgcattaggagtagttctagtctagttctagtttagccctagtttagtattccaatccccaaattctccgcctctcctcgactctacgtcgattagaggagtctaggtcggcctgcccgagcctagacaactcctaggatctctcctccccgacggggtccctcccgggagtgagatccaggcgccgtcggcgatctaccgtcgcccctgcgcacgcgcggaccgtccggccctaatgcgcggaccgtncggccgtcaggcatggaacccgagcttctgcacccagtcgc

SEQ ID NO: 46559 - DNA, 556 bp, Zea mays
  Clone ID: MRT4577_14246C.1
agatggatatgtgaaaaattcaactaactaaagattgggtaattgattgaatctgtacacagatggctattgacaccaatacagagcatgctgagcctaagcacaaataccttctgagagtccacgaagtgggagatggctccacaatggactgcctccactaaattggatctgatcttactcgtactcgagagctaccagagctacaacagaatgtgtccatgcagagcgggcaagaagatttcgcagtggataaggattcaagcaggactctaacaagtgtgcgtgaggtatatacacaatatgatctcccagtagtcaagaaatgttacagtctagggtcttgatggtctcaaatattgtgttaaatgtatttgtctgaagcttccttgcaacatgatactttagttatttagttaacgagggtgccatatgattttcctttatggcattttgtcagtgaattacttatgtcgtggcacaattgtttctgctttcaagcggtgttgaaatttggattagtttgactggcatatgcagattgggtgttctattc

SEQ ID NO: 46560 - DNA, 461 bp, Zea mays
  Clone ID: MRT4577_142470C.1
aacaaaaccgggcaacccggggggggatctcaagggatcggggcaaaaaggccactttgccacttaaaaggccccggggggtttaaaggcctctgaaaaggattaaacccccccccccttggaaagggagctttaagggggcccccccggggcctttggccgggcgggcttaaccaaaggcccgggcccttggggcccaaaccccctaacgtgggtcggggcgggcggaaaaaaaaagccccggttgctaacttggattctgactaaaaggcgttaaaacataatccggcccacggtatttttcccccactggtttttaaaccaaacccaaaaaccaattggggaaaaaaacggttcctttcgaacaaggggaaaatactatcggggggcgggcataagggggggaaaaataacctgtttaaaaacgggtaaaacccaactaacgttccctattggggggg

SEQ ID NO: 46561 - DNA, 228 bp, Zea mays
  Clone ID: MRT4577_142471C.1
aggcaagcgaatcctatgtagatctgggtacagaaggaaacggcatgcttacaaggcattggcgaaccctacactaaaagaaaaaagaacaaaatatgattgggaaaccaaaccactgaatctttaaacaggctccatggtagggtaggtagtactgacaccaacccattcttttgtacaagcactccccattgttcatcctcatactttcttcatatatttcacttt

SEQ ID NO: 46562 - DNA, 149 bp, Zea mays
  Clone ID: MRT4577_142472C.1
cccacgcgtgaaagcactcctggtctggcgcgatttgtagagtttttggttcagggggttaggttcgctgttgcctacctcatttgcccctgatcatcgccgcaatttatttatttataatataaaagatccagattttccccctctca

SEQ ID NO: 46563 - DNA, 540 bp, Zea mays
  Clone ID: MRT4577_142473C.1
cgcgtatacctgcagcctagcatgccacggcagtgcaagagcctgccgttgcaagcgtcgaacaaacgtcttccaatcaacagacatcctataccggtaacgtcgcttggcgtgctccaagaacgagccccccatgggtgtcactatgttccccgagcgcgccaacggcatcattcgacgcgccagcaggtcgagcactgtctacgctcaccgcctccactgcctgaatgaccacattgtcaggaagctcctccacatccaggacatcaccgagcgcaccgccggtatggttactgactacggcccctacttcatccctgccggttactccaacgtcggcgagatagactctcactccaaaggcatagtgtgttgaagcgatttcaccgagtaccctccgtctgaacacgttcggcgccagcgacatgagactcaccgacgccgtcaaggtcgtccacgcctaccagaagtccacatgacgatgatacgatggtcacctacgccattgacaacgttggcaataaatacgcgctgttattt

SEQ ID NO: 46564 - DNA, 323 bp, Zea mays
  unsure (1)..(323): unsure at all n locations
  Clone ID: MRT4577_142474C.1
gacgcggggcnggaacncagnggaacgnggcagcaaggccacncngccacnaacaaagccccgncgcgnnnaaagncgncngcaaaggaaacaacacnccggcgggggtttaggganctncnangcngcccnccnnngcccgncngccgggcgggcngagccaaaggcacgggccccnggggcgcgaacgcccaaacgngggncggggcgggcggggagcaaaggcgccggnggcaagcnnggaaaangacnaaaaggcggnnaagnaaaaaacggcacacgggagcnnngngccacnggcnnnacaaccaagcgcgaagacc

SEQ ID NO: 46565 - DNA, 262 bp, Zea mays
  Clone ID: MRT4577_142475C.1
cagaaacacaccatggctaagacaagatcagaatttaccaagtcagactgaggagatggttaccctccttggtcttcatgcgctatgaggatagtccaactagtgacaactttagattcgtagctcacaatggcttagataaccaaaatgagagagtacaaaatggcttatagttctatggagttaaactatattacactgaaagactccaagatactactattaggtgacaagaccgtctctcataaaacgataaggaact

SEQ ID NO: 46566 - DNA, 298 bp, Zea mays
  Clone ID: MRT4577_142476C.1
cttcccaataatgagtcgtattaattccccggcgtcgcgcccaatgacttctacatgaaagatccacttcctgtgagagtctccaagctgatctcactcattatacatcttccctagtcctactattctctctcattctgcaagcggcggaacatctttgacagtgcacatcatctcggtgaatttcttccttgacatcgcattcacaattctccctatacgtttgtaatgatggagcctcacatttgtccagtcgtctgcagcatatctgttggggagatactacagatcttctcac

SEQ ID NO: 46567 - DNA, 3558 bp, Zea mays
  Clone ID: MRT4577_142477C.1
cccaaaattcggattctccctcttcccgacccgcacccgctcctcagtcctccccctcttgatgcagatattttgaaatctaagccaccgcagcccgcccgtccagcgctgctctccgccgtcgcttgcgccatgtcgtcgcgacatgacaaggagaagtcggtgaacgtacaggttctcctccgctgcaggcccttcagcgatgatgagctccggaacaacgcgccgcaggtcatcacctgcaacgattaccagcgggaggtcgccgtcacgcagaacatcgccgggaagcagttcgatcgggtctacgccttcgacaaggtttttggaccgacagcaaagcagaaggaattgtatgaccaggccattattcctattgtaaatgaggttttagagggatttaattgcaccatatttgcgtatggccagacaggcactggaaaaacatacaccatggaaggcgagtgcaggagagccaagagtggaccgaagggtcaattacctgcagacgctggagttatacctcgggcagtgaagcaaatctttgataccctggagaggcagaacaccgagtacagtgttaagatcacgttccttgagctgtacaatgaggaaattacagatcttcttgctcctgaagagatatctaaggctgcatttgaggataaacagaagaaagccttacctcttaatcttatggaggatgggaagggtggagttcttgttcgaggtctcgaggaagaaattgttacgaacgcgagtgaaatattctctctgttagaaagggggtctgcaaaacgccgactgcagagacattacttgaacaagcaatctaggtcaatctcagccagtcttcttttgaactatacgctacaacaaacttatgtgctcattactacttttaacattttagccggtcccactctctatttcaatcactattacataaaagaggcaacccctgaaggagaagagctgataaaatgcgggaagttaaatctagttgacttggctgggtccgagaacatctctcgttctggagctaaggagggccgtgcaagggaggctggcgaaattaataaaagcttgcttactctgggtcgtgtgattacggcattggtcgaacaccttggacatgttccttacagggacagcaaactcacaagattgctgcgtgattcattaggaggaagaacaaagacttgtattatcgctactgtttcaccctctgtgcattgtctcgaagaaaccctgagtacattggattatgctcaccgggcaaagagcattaagaacaggcctgaggtaaatcagaaaatgatgaaatctacattaattaaagatctttatggtgaaattgaccgacttaaggcagaggtatacgctgctcgagaaaaagttggagtgtacattcccaaagacaggtatcagcaagaggaaaatgagcgaaaggcaatggtctgatcagatagaacaaatgaatgcttctttggaagtaaaccataagctaattagtgatctgcaagaaaactatgattctgagcttcaacattctgctgatttgagcaaaaagcttgaagtcacagagaaatgtctggaccacacaagcaacctactctctacgacaaaagaagatcttaaacaggcacagtataatctaaatgagaaagattatataatttcagagcagaagaaagcagaaaatgctttaacacaccaaacgtatgtgctgagatcagatctggaacaatatactcgtgataatacttcactatattcaaagattgctaggggagacaagctaagtgcaacaaataggtcagtcgtgaatacattccaaactgaccttgcttcgaagttggatattctttccaatacactcaatgcatcaatagaccaacaaaatatgcatctaaaatctgtggaggacttatgccaatcttatgttgattcccatgacaaggctacttctgagctgaaaaagaagattttggcttcaaaatcattatacatgtcacatatggaagctttcctaaatgttgtcctcgtacataaagcaagtgcaaatggcacactagaagatatatcatcactgtctgctgcaagctgctgtagtcttgaccagctactagtttgtgttgagggagaggcacagaatatatttaatgacatccataatttgttaaccatccaccgaagcgaaatgacgcacttcactcaagaattaagggagagtttccaaataagcttggataggacaaaagaaatgtccacctatattattgggctctttgacaagtacgttgaggaaacctccaaattgcacagtcactcaaataatactcatgaagcacaaatgaaaagcattgaagactttcagatggtttatgaggagcaatcaaaatcagtggagcagaagcttttagcggagataagcagtttagtatctaaacatattactcgacaaagagagttggtgggcgttagattgagctctctgggcgatgctgcccgtggaaataaggcatttttggatgaacacacatcggccatggagtttgtcacaaaagatgctaagaggaagtgggaaacgtttgcagagcaggctgaaaatgactgcaaagctggctccagcttttctgcagctaagcatagccgcatggaaaccatgcttcaggagtgcgcatgcactgttgactccgccgttcagcaatggaagaagtcacatgctgctgttaacgatctcagcagaaagcaagttgctgaagttgaagcactcgtcaggactgcaattgagaacaacgagcaacatgaactggaagttgcatcttctcgagctgtggctgaagaagacgcctccaataacagcaaggacatagctcagggcgttgaaaatctgttggaagaggcacgacgcgcgagttcaagagtggtctcaacggtggaggctcacttcggtgagctacagatgctgcaagagagccactcgagccaggctgccggtatcaacatgcacgccgacaaggctctccaaaccagttacaaggactacgaaccctcaggtgaaactccggtgaggtctgagccgaacgtgccaagcaaaggctcgattgaatcgctgcgagccatgcccgtggagaccatgatgaatgagttccgtgagaaccatccgtatgaacatgaatcgagcaaagaatctaagttatctcagatacctcgcttgccgctcgcgacaatcaactgagacattcacttccctatgtgcagtgtacttttattagtagggcgtcaatttgccggttttggtgtcccttgtgcacttgtgctaggttaaccatggggtgtgagctgccttggctctctccagtgcatttcccttttttcccgcattcaattatctgtaatgttctgttgtgccttgtacgatactgatattgtacagcatcagatatgtgccaaagctagcttgaattgcatgactcattacattggaatcaaaaaaaaaaaaaaaaaaaaaaaaaaaaaaaaaaaaaaaaaaaaaaaaaactcgaaaagggc

SEQ ID NO: 46568 - DNA, 3433 bp, Zea mays
  Clone ID: MRT4577_142478C.1
aattcggcacgaggcccaaatttcgaattctccctctcccccacccgcaccgcaccccgctcctccccctctggacgctgacatttcgaattctccctctcccttccccaccgccgccagccgctcttcgccgtcgcgtgcgccatgtcgtcgcggctggacaaggagaaggcggtgaacgtgcaggtcctcctccgttgcaggccgttcagcgacgatgaggtccgaagcaacgcgccgcaggtcatcacctgcaacgactaccagcgggaggtcgccgtcacgcagagcatcgccgggaagcagttcgaccgggtcttcaccttcgacaaggtttttggaccgacagcaaagcagaaggacttgtatgaccaagccattattcctatcgtcaatgaggtcttggagggtttcaattgcaccatatttgcgtacggccagacaggcactggaaaaacatacaccatggaaggcgagtgcaggagggccaagagtgggccaaaaggtcaattacctgctgacgctggagttatacctcgggcagtgaagcaaatctttgatactttggagaggcagaacaccgagtacagtgttaaggtcacgtttcttgagctgtacaatgaggaaattacagatcttcttgcacctgaagagatatctaaggccacatttgaggatagacagaagaaaaccttacctcttaatcttatggaggatgggaagggcggagttcttgttcgaggtctagaggaagaaattgtcacgaatgcaagtgaaatattctctctattagaaagggggtctgcaaagcgccgcactgcagagacattactgaacaagcaatccagtcgatcgcactccctgttctcaatcactattcacataaaagaggcaacccctgaaggagaagaactgataaaatgtggaaaactgaatctagttgacttggctgggtctgagaacatctcccgttctggagctaaggagggccgcgcaagggaggctggcgaaatcaataaaagcttgcttactctgggccgtgtgattacggcactggtagaacaccttggtcatgttccttacagggacagcaaactcacaagattgctgcgtgattcattaggaggaagaacaaagacttgcattattgctactgtttcaccctccgtgcattgcctcgaagaaaccttgagtactttggattatgcacaccgggcaaagagcattaagaacagacctgaggtaaatcagaaaatgatgaaatcaacattaattaaagatctttatggtgaaattgatcgacttaaggcagaggtatacgctgctcgagaaaaagttggagtgtacattcctaaagacagatatcagcaggaggaaaatgagcgaaaggcaatggctgatcaaatagaacaaatgaatgcttctttggaagcaaaccagaagctaattagtgacctgcaagaaaagtatgattctgagcttcgacattctgctgatttgagcaaaaagcttgaagtcacggagaaatgtatggaccacacaagcaacctactctctgcgacaaaagaagatctgaaacaggcacagtataatctaaaggagaaagattatataatttccgagcagaaaaaagcagaaaatgctttaacacaccaagcttgtgtgctgagatcagacttggaaaaatatactcgcgataatacttcactgtattcaaaaattgctagaggagacaagctaagtgcaacaaacaggtcggtcgtgaatacattccaaactgaccttgcttcgaagttggatactctttccaatacactcaatgcatcaatagaccagcaaaatatgcacctaaaagctgtggaggatttatgccaatcctgtgttgattcccatgacagggctacttctgagctgaaaaagaagattttggcttcaaaatcattatacatgtcacatatggaagctttccaaaatgttgtcctcctacataaagcaagtgcaaatgccacactagaagatatatcatcactgtctgctacaagctgctgtagtcttgatcagctactagtttgtgttgagggagaggctcaaaatatatttaatgacatccataaattgttaaccacacaccgaagcgaaatgacacacttcactcaacaattaagggagagtttccaaataagcttggacaggacaaaagaaatgtctacctatattattgggctctttgacaagtatgttgaggagacctccaaattgcagagtcactcaaataatactcatgaagcacaaatgaaaagcattgaagattttcagatggtttacgaggagcaatcaaaatcagaggagcagaagcttctagcggacattagcagtttagtgtctaaacatattactcgacagagagagttggtgggagttagattgagctctctgggtgatgctgcccgtggaaacaaggcatttttggatgaacacacatcggccatggagtttgtcacaaaagatgctaagaggaagtgggaaacatttgcagagcaggctgagaatgactgcaaagctggctccagctcttctgcagtcaagcattgccgcatggaaaccatgcttcaggagtgcgcatgcactgttgactccgcagttcagcaatggaagaagtcacatgctgctgtcaacgatctcagcagaaagcaagttgctgaagttgaagcactcgtcaggactgcaattgagaacaatgagcaacatgaagtggaagttgcatcttctcgagctgtggctgaagaagacaccaccaatagcagcaaggacatagcccagggcgttgaaaatctgttggaaaaggcacagaaatctagttcaagagtggtctcaatggtggaggctcacttcgcagagctacagaagctgcaagagagccactccacccaggctaccggtatcaacatgcacgcagacaagtctttccaaaccagttacaaggactacgagccgacgggtgaaactccagtgaggtctgagccgaacgtgccaagcaaaggctcgatcgagtcgcttcgagccatgcccatggagaccttgatgaacgagttccgtgagaaccatccgtatgaatctgaatcgagcaaagaatccaagttatctcagatccctcgcttgccgctcgcgacaatcaactgagacatctcacatcccccgtgtgcagtgtaattttattagtagagcatcaatttggtgtccttgttgtgcacttgtgctaagttaactgcggcgggtgagctgccttggctctccccccagtgcatttccccttcccccagtcaatcatctgtatcattgccttgtgcgacactgatttttgtagagcatcagaaatttgcccaagaaaaaaaaaaaaaaaaaaaaaaaaaaaactcgaggaggggggcgggaa

SEQ ID NO: 46569 - DNA, 188 bp, Zea mays
  Clone ID: MRT4577_142479C.1
cccggggctgctacaacggcctcgctaaaactgtcgggtgactttacactggctgcttgggaaccctctgcaaggtctggttggatcgcgggcttctgttagaaaagctttacgtcattgatgactgtacatcctagcagggtgcaacgcgactgttgtgatacgtgacttcatgcgtgctctctaac

SEQ ID NO: 46570 - DNA, 277 bp, Zea mays
  Clone ID: MRT4577_14247C.1
ggggaaagctttggctcccgctgggatacagatgctgcctggggtatggacagggtagaggagaaggagccagaagtgaccatctcaagcatcctgcctatttcagaaagagccacaaatcggagggaagtggagagccggagctcaggcctcgagtctagtgaggcgcgtcagaaattcgcaggagccaaagccatctcatctgacatgttcttcgggcgggaggtggatgcggagtatgaggccaggtctcggctgcagcagctctcaggcagca

SEQ ID NO: 46571 - DNA, 722 bp, Zea mays
  Clone ID: MRT4577_142480C.1
gggtacctcgaggccggccgggcggccgggcggctttttcactaaacgcttcatccgggagcctccaccatccgagagaagccagagaaaaggttactccgcagaaagcaaaaccctagcccactccggcgcgccaccggccgatggtttcgatgagcaccacgccgaagccgcttgactccgccgtcgtcagcgcagccgttgacggcggggatgagggtggtggtggaggcggtggcgggaagaagcaggcgcacggggcggtgatggcgccgccaccgatggtggtcccggccgcggcgcccgcgggcgaggaggaggttcggaaggtcaggaagccgtacaccatcaccaagtcgcgggagagctggacggagccggagcacgacgagttcctcgaggtcctgcagctttttgatcgtgattggaagaaaattgaagcatatgttggctcaaagactgttatacagataaggagccatgcacagaagtacttcctgaaggttcacaataatggtacgggcgagcatctgcccccacccaggacaaaacgaaaggcagctcatccatatccacagaaggcatctaacaatgtttctcaagctattttatcacaacatcaacctacccagagggagcaaggttctgtcatgcctatggatactgctactgagagaaacaaaatgagaatgtcgtggtgacttactgcgactgtactcttg

SEQ ID NO: 46572 - DNA, 561 bp, Zea mays
  Clone ID: MRT4577_142481C.1
tcgcccatcgtccggtgccaggcccgggcgatgtttccaaacacagtctcgcaaagtcgtaaacatgtatgggggctgccctgcccagtgccggaggtcaaggaagtggtgactgtgacagggaagccgcgccgaacccgtgaacgcgccgtacgtacggttctaggtgcgaattccttgcgggtagttccgcccgacgtaggcgtccgtctggcactgtctggtggggctcggcgtctgcttgctgtgcgttgcgctcctgctctttcggtcgtcccttgtgctttctgttcctgggctggctttgttttttcctttcctttttcttttttttttttgtctcttttttgtccccgctcttctttttttctcttttttttttttcttcttttttgttttttctttttttcttttgttttctttttcttttctttttttttttctttccccttttcctcttttttttttttcttttccttttttctctttttgtctgttttgttgctttttttttctgtttttttgttttttcttttttttttcttcgcttgcttttttttt

SEQ ID NO: 46573 - DNA, 272 bp, Zea mays
  Clone ID: MRT4577_142482C.1
gcgatcgacaccatgagggtttttttctttgccctagctctcctggcgggggggtgaagcgccacctccacgcatacaaccagctgctgcggatgccaaccaccgacttcggttcatctaccggcgccggtgcatctgccacctccagttaacctgccacctacggcgcatataccaccagctggccagctggcgccgctggaccaccttacaccacccgaccatgtggcggcgcgagctaatctttcatcatcaccagtccactactctac

SEQ ID NO: 46574 - DNA, 319 bp, Zea mays
  Clone ID: MRT4577_142483C.1
gggcgggaacggaagcatgaaaacaagggggggacttgggggtatcccacagaagtttattcgttaaaaaaagggtttacaggccccctttttattttttttaaggcaagccaacagacgggtttcgatcggggctctcactttattaaaacataaaccctgggataattggggggccattttcctttaaggagtccgggactggctgaaaacaataaataacatcccgctgatcctcccttgttgggaaacttggaagggggggggggtttttccgaattcactggcccggccttttcctgttggacgaaagggggcc

SEQ ID NO: 46575 - DNA, 558 bp, Zea mays
  Clone ID: MRT4577_142484C.1
aaaaaaattggcccccaaaggcaatggcaaaaggggggggcccaaaaaaaataattaaaacccgacattaaaatggtaaaaaaaaaagcaagaacccgttcccaaaaaaaaggcgggggggaaaaaaaaaccggttttttaaaccaaagaaaaaaataaaaaaaaatccccgggttatctccccgcccctaaataaaaaaaagggcctacccgaagaaaaacaaaaaggatctttggaaaaaaggcagggcaaaaaaagggggggggtccctggatttggcccccaaaaaagggagaaaaaaccccttaaccaccaaaaaaaaattatggggacccctttgaaatcccccctttaaaaaagcagggggcaggtgcccccaggagaaaaaaccgaccccaatcccttccccaaaaacgggaccatccccaaaaaccatggtaagggaaccgaaaaaacggaaaaaagggccttggttcccaaaaaaaaaaggcacaagccccaaagttcccaagaaaacggaaagcggcgacccaaggttaaggctaaaaccccggttc

SEQ ID NO: 46576 - DNA, 292 bp, Zea mays
  Clone ID: MRT4577_142485C.1
caacggatcaacgctgcccgggccttgcgacaccctgcactggtacgattcttcttgagcaacgacgtgacggtgcgcggcctgcggatcgagaacagcccgcagttccatctcaagttcgacgactgcgagagggtgcgcgtggatggcctcttcgtcagctcgccggcgttcagccccaacacggacggcgtccacgtcgagaacaccacgtccgtccagatcctcaattccaggatctacaacggcgacgactgtgtctccatcggcgccggctgctccgacgtccgca

SEQ ID NO: 46577 - DNA, 829 bp, Zea mays
  Clone ID: MRT4577_142486C.1
cctcgaggccggcaaggcacacctcagtcactcgtccagtgcaaacgacagatggcctccttggtcgccctccttgcggtggcccttgttgcgcagctggcctcgtggcagcaggccgccgtcgcctacgatcctagccctctccaagacttctgcgttgctgacaagaactcgcctgtgcgtgtgaatgggtttccttgcaaggacccaatggccgtcaccccggacgacttcttcaacccggccatgatcatcggcaagcgcagggacaccaacaacaaggtcgggtccaacgtcaccaacgtcaacgtggagagcttcccgggcctcaacacgctgggcatctcgctggcgcgcatcgactacgcgcccctgggcgtgaacccgccccacatccacccgcgcgccaccgagctcctcaccgtgctggaggggaccctctacctaggctttgtcacgtccaaccccaaccgcctcttctccaaggtggtcaagaagggcgacgtcttcgtcttccccaaggccatgatccacttccagatgaacctggaccacgagaagcccgccgccgctctgtcgtcgctcagcagccagaaccctggcgtcatcaccatcgccagcgcggtgttttgggtccaagccacccatctcggatgacgtcttggccaaggcgttccaggtcgaaaagaaactcatcgactggctccagtctcagttctaggataccaactatcaagctacgcctacgcgtacatatgtattcatgaataaatggcgggcatgtgggaggagtgatactatatattgagtacccggaaacaagctagtg

SEQ ID NO: 46578 - DNA, 158 bp, Zea mays
  Clone ID: MRT4577_142487C.1
aaaaaaacaccctaaattcctcaacacaaaaatgtttataaataaggtgcacaccaaaaaaaagtgatgggtttctcaaaaccccaataaaatcgtaatagcacccataatcataaaccccttgaaaaacctgtgatcggatcaggcccaacaaggac

SEQ ID NO: 46579 - DNA, 209 bp, Zea mays
  Clone ID: MRT4577_142488C.1
atccagatcatcatatggttatttcatagagagaaacgtagaacataacagagtgtatatgggcattgctctcccggtgcgccaagatatgaaaaagtacacccactataccatttatattccctgcccctttccaaagataaaatgctcttactttatattctcatatctgacaaacatatatgtcatccggagggtggacccataca

SEQ ID NO: 46580 - DNA, 413 bp, Zea mays
  Clone ID: MRT4577_142489C.1
ggctggggtaggctgaggacgacagtgatattgcagggttttgttgaggctttgagaatcttggagaggaaagaaacgccactaaggacagtctttaagattgaggagattcacagcatagtctcacaagcccttgcggaattaactcagtggaacattaggagctagttgccctgagatcgatagtgcaatcagaactcttttcagttcggctagctttgctccaatgtggtagacgatcatgcagtgctgggagacaggtcagcactaatgcaacagttttttttttttgcgtaggttggaatactgcagacacggtgattataacagaatacacatcattagaaaatttgtccgatacaaaatatcacaatttttttgcgaccgtttacaagattttttgtcactcggat

SEQ ID NO: 46581 - DNA, 329 bp, Zea mays
  Clone ID: MRT4577_14248C.1
aagttcaaagatcagactgcataaggattcaggccatactgttgcagaaaagttttgggtacaacacagaggacacaacaggtccattaatccatcgaaggctcaaccgctattcatgacgctcaaaccacagatgtttattagacgacgacatccatatagaggcccaccaaagggcaccagacgaccctaattcccaggtccaggagcaggttaaatgaaccatgggttactgaccaccgcggaggcggagcaccagggggagagggctctccttttggatgttgtagcatgctagggtgcggacaatctccaattgcttgccggga

SEQ ID NO: 46582 - DNA, 651 bp, Zea mays
  Clone ID: MRT4577_142490C.1
gcacgagcaagtcgccttcttcccatccctctccatcaagcaaaagactgacaggaaagctaaaccccaacaatcaccatgggattcttccaaggcaagacctccaagcagaccacgagggtcaagaagcttctcggactcgccctgtcgcgcctcgccattgcacgccgtccccgccttgctcgcaggtccatctgccgtaacgatgtcggccagctcctctccctcggctacctccatcgcgctctcctccgcgcagagcaggtcatagaggaggataacatgctgcaggcgttcgacatcattgagctctgctgcaagcgactcgtcgagcacgcaacacatttagacaaaccgcgggagtgcggcgaagagataagggaggcggctgccgggatcatgtttgcagccaggtggtgcggcgacctgccggagctgcaggtcgcgcgcaccatcctagaagacaagttcggcagcgacatggctatgatcgcgaaggaggggaccgacattgtcgatcccatgttggtgtggaagctatccggcgataagacaaacatggagctgaagaagaaagtgaccaaggaaatcgccgtcgagaacagtttcatggtcgacttctccgagctccagctgcaagaagcagtctag

SEQ ID NO: 46583 - DNA, 697 bp, Zea mays
  Clone ID: MRT4577_142491C.1
tgggaccctcgaggccggccgggaccgatcctgtccagctttaccgattcctactctcttgttttctgttttcttggttcgtcccatagagaggagagctttgattgctggtggtctggtcggcggcggcggcggcaatggagcccctggaggtggccataacgatcatattcgacgcgctgctgctggtgttcatggtgaagctcttcttcgccatgttccagatgaagctcgtcgtcatcctcttctacctcgtcatcctcctcttcgccatggccttctccggccgggcgcccagcagcttctagctcgacgatcgtagcagcaggtggcaaaaattgaagctttcttctccctccccctctttcgtttcttctcccccctcttcttggagggtggatcggtggagtcttgcagcgctacgtacgtcctgtgaaaaaagactatatcatctcggtttttggtggatgactagctaatttatttctctctaggaaaaaaaagaagaacaagaagaagcccgcatgatccgaggcgcaaattgcgtaagcgtgaagagagagaaattagtcagtctagagtttcgatctcccgcgtttcatgcttctatttccatgtaattcgtgctgtacctcttgcctttttgttacgggtttcgtggatcccaaaaaaaaaaaaaaaaaaggcccctagggcc

SEQ ID NO: 46584 - DNA, 2383 bp, Zea mays
  Clone ID: MRT4577_142492C.1
gcgggccgaaccacgcgtcggaccacgcgtccgcccacgcgtccgagcaaatccaatgcacctttttttgtctccgctttactgtgttgctcctatttaaatacgcctaataataaatgaagtaaacaagtaaccaattggatcttttgtccacgcaccttaatttgcatgcacaagtctaaatggacttatataagtctatggaagagtatctactgtcaattttgttataggcgaaaccgcaaaacagactacagtactgcacattgttggtttatcttatcaacagcttccattccctggcccatcgagcccacttgcacggtcggcgacccggggccggaggttaccctattctttctgctcaacttggcctcacgcacgatagccgccgccgtcgaccagagcactcccccgtcgtcgccacgatgtcgtctgagcctccacccgcctcctctgccgccgccggagaggaactcgctgctgacctttccgccgctaccctcagcaagaagcagcagaagaaggacgcgaggaaggcggagaaggcagagcagcgccagcgtcagcagcagcagcagcagcagccggcggacgccgaggacccgttcgcggccaactacggcgaggtccccgtcgaggagatccagtcaaaggccatctccggccgctcgtggtcccatgtcggcgacctcgacgactccgctgcgggccgctccgtgcttatccgcggagccgcgcaggccatccgtccggtcagcaagaagatggctttcgtcgtgctgcgccagagtatgagcaccgtgcagtgcgtgctcgtcgccagcgccgacgccggcgtcagcacgcagatggtgcgcttcgccaccgccctcagcaaggagtccatcgtcgacgttgagggcgtcgtctccctcccaaaggagcccctcaaggccaccacacagcaggttgagatccaagtgaggaagatctattgcatcaatagggctattccgacccttccaattaaccttgaagatgcggctcggagtgaggcagattttgagaaggctgaattggctggagaaaagcttgttcgcgttggccaagatacccgcttgaactacagagctattgatctacgaacaccctcgaaccaagccatattccggatccagtgtcagttgaaaacaaatttagagattttttgttgtcgaagaactttgtcgggatccacaccccaaaattgatttctggatctagtgaagggggtgcggctgtattcaagcttctgtacaatggtcaacctgcttgtttggcacaatcccctcagttatacaagcaaatggctatctctggtggttttgagcgagtatttgaggtcggccctgtgtttagagcagaaaattcaaacacacacaggcatctatgtgagttcgttggtcttgatgctgaaatggagattaaggagcattattttgaggtctgtgacattatagatggcttattcgtatcaatatttaaacacttgtctgaaaactgcaagaaagaactcgaatcaataaacaggcagtatccatttgaacctctgaagtatctagacaaaaccttgaagctcacttatgaagaaggaattcaaatgttgaaggaagccggaacagaaatcgagcctatgggtgacctcaataccgaagctgagaaaaaacttggtcggcttgtcagggaaaagtatgacacagattttttcatcctgtatcggtatcctttggctgtacgtccgttctacaccatgccttgttatgacaacccagcgtacaccaattcttttgatgtcttcattcgaggcgaggagataatatctggagcacaaaggatacacactcctgagctgctggccaagcgcgcgacagagtgtggaatcgacgtgagcactatctcggcctacattgaatccttcagctatggcgtgccgccacacggcggtttcggggtgggtttggagagggtggtgatgctgttctgtgccctgaacaacatcaggaagacctccctgttcccgcgcgacccgcagaggctcgtgccgtaagtttctgattccaagcctgagtcttcgagtggtctacggagcagatccgatgttgttaccatcagagttgacttgcaatcttagctcctgaacctggcggttaccgtggatcagagttcctgttgaatttcacaaaagcctacttgttcctaatagattgctgcaaccaacaatattacgaccctttcgggcttttcttcccgcctcacgtgttattctggtctatacttgtttttaagtgcaagtattgctcagttaaaaaaaaaaaaaaaaaaaaaaaaaaaaaaaaaaaaaaaaaaaataataatatcatat

SEQ ID NO: 46585 - DNA, 168 bp, Zea mays
  Clone ID: MRT4577_142493C.1
aaggctcgttcaattgcaaggggcggttttatttacaatctctttgggtctgatcccagcactgaggcatactattgtgccatggcgggcggcataatgtacgccaacgcgtctatgctaccgaacattgtggcaactgctctacctaagcgattcatagcaggagca

SEQ ID NO: 46586 - DNA, 738 bp, Zea mays
  Clone ID: MRT4577_142495C.1
ccggccggaatacgcactaaatttgatcacttggattacaaattaccttcaaaattgatatttgcagtgttgagttgatcgcttatctagatttcaagcatgagtttccaaagagttggtctcgttgccatgcgtacaacttcatcgcgtccaagcgtgaacttcacccgtaacactgctataatagcatttactcgtctgttgtctcagaagtcacaagcccccaccatcacaaacctcgagccagaagaaggtcaccagatccttgtgaatcagcgtctgaaccgacctgtcactccaaacctcggtatatacaagatcggtcaagtctggttcagtgcttcggcttggaccagaatcacaggtcttattgtaggcggcacggcgtatcttacgttaggcgctcacgctgttgctcctcaccttggactaggctttgactctgtggctttggtctcagctttcggtgcactgccttttgttgccaaggcagctatcaagttcagcttattgggattccctttttcgtaccacttcatcaacggtattcgtcacctggtgtttgacttggggattggatacaagaaagctcagttcaagaagtcagaagtagccacatggactctcagtgtcattggtggacttgtattggcattctggttgtagtattattagtatctacttacatagattgatatcgaggtccatcagaaaaaaaaaaaaaaaaaacccgcggcc

SEQ ID NO: 46587 - DNA, 306 bp, Zea mays
  Clone ID: MRT4577_142496C.1
gtccggcgtcggagaacaacagaacaagaccaccggaccatggaatcgctgacgcttcgcgctgggaccggggtctcgccgctgcagcgactccggctgctccgcggaccgcagctcgcgacgtactttcgcgccacggcctccggcgccgagccggacactatccgtgcgcatgaacgggctgcacatgccctacccgttcgtgatcaggtcatcgacgacgggcaccacctacaccgtgacgaagtagcgcctctacgagggctactaccccgtgatcgacaagacagtgtcattgcatgctga

SEQ ID NO: 46588 - DNA, 517 bp, Zea mays
  unsure (1)..(517): unsure at all n locations
  Clone ID: MRT4577_142497C.1
cggtgctcgcggccgtcatcgtcgtcgccctcgtcgccggggtggtgtgctggagtggcgagtgccggcggcggtgcgcccctcggccggggactagggggaaggagtccttgcaagggagaagggggggggcgcggtgactctcgccggcagcgagggaccgccgcagcggcggggaggaaggggaggtgttcgtggggtggggggagggcttctggatggagctggaggagctgcttcggggcttctgctacttggtggggaagaggcgnggggggatcgtgtaccgggtcgtgcccgggcgggggcccgccgtggtcgtgcggcgccttagngagccctactactgggacagggatgggttcggttgtggctcctggtggggccttcttcttgcgttcgaggccgagggtggctggatggggcgngcgcgctatcctaaggtggggcctggtgcgggcctactagtacgccctcgacgagagggtgtttatttacgaatacctacccagggggt

SEQ ID NO: 46589 - DNA, 194 bp, Zea mays
  Clone ID: MRT4577_142498C.1
aacgacggacgcgatccacgcgtccgatggttactagcaacctacattttaagtgttttccgccaacatcattagcgcaaggtaggggactagctatttctgcctccacatccacgttgagcattctacctgactggccaaaacctccaatgtccatacatgctcacgtgcacctatcgcttgcaatatcctca

SEQ ID NO: 46590 - DNA, 415 bp, Zea mays
  Clone ID: MRT4577_142499C.1
aagatgatatctttgtgataaccctgactgacaagactatcaccctcaaggtgaagtcggctgagaccattgacaacgttaacgccaatatccaggactaggatgactgccccctttaccagcagcgaatcagcttcgctggctagcatattgaagacggcagcacgcttgctgactacaacatgcataatgagagctctctcgatcttgcgctccgtgtctcggtaggcttgcacatcttcgtgaagacactgacctcaaatactatcaacgtcgaggtggagtcctccgcacacattgacgacgacgtaggcaagatcctaggaaaggaggccatccctccagaacagaaccgtaatcatgtctggtggcaagcagcttgacgtagggtgcacgcttgtggactacatcatcc

SEQ ID NO: 46591 - DNA, 249 bp, Zea mays
  Clone ID: MRT4577_14249C.1
aaaaaggaagcactacacttgtcctgaatttagagagagagagagaggtactagaatccagagaggaaaggtatattaaacgaaaaatacagcctcaaaacccatgatccatcagggccaaacccagtgaatcattcttctattccttaatacctggcacgccagattacagatcatggctatcaaccaaacacaaggtaacttgcttagccatttgcttctatgaactataggaatcatgtctattgg

SEQ ID NO: 46592 - DNA, 2266 bp, Zea mays
  unsure (1)..(2266): unsure at all n locations
  Clone ID: MRT4577_1424C.1
acccattccctcactcatctcaaggcctaggtagcaccgtagcagctactagaagcagctagccagaacaactcgtccatggcgatggcctccgcggcttgctcatgcacggacggcacgtggtgggtgtacgcgctcccggcgctgctcggctccgacaccctgtgcgcccacccggccctcctggctggcctgatctttctggccaccgtctcggtggctctgctggcgtgggccacgtcgccgggcggtccggcgtggacgaacggccgcggcgcctcggcgtcactcctatcgtgggaccccgtggtctgcccgtgttcggcagcatcttcgcgctgtcccggggctgccgcaccgcgccctcgccgagatggcccgcgccgcaggccccgggccaaggagctcatggcgttctccgtcggtgacacgcccgcggtcgtgtcgtcctgcccggccacggcacgtgaggtgctcgcgcacccgtcattcgccgaccgccctgtgaagcggtcggcccgggagctcatgttcgcgcgtgccatcgggttcgcgcccaacggcgagtactggcgccgcctccgccgcgtcgcgtccacgcacctattctccccgcgccgggtcgcctcgcacgagccgggacgccaaggtgacgcggaggccatgctccgctccatcgccgccgaacagtcggcctctggcgccgtcgccctccgcccgcacctccaggccgccgctctcaacaacatcatgggcagcgtcttcggcacgcggtacgacgtcacatcaggcgccggcgccgcggaggccgagcatctcaagagcatggtgcgcgaggggttcgagctcctcggcgccttcaactggtccgaccacctcccctggctcgcccacctgtacgacccaagcaacgtcacccgccggtgcgccgcgctcgtgccgcgcgtccagaccttcgtccgtggcgtcatcgacgagcaccggcgccgccgccaaaactccgccgccctcaacgacaatgctgacttcgtcgacgtgctcctctccctcgagggtgacgagaagctcggcgacgacgacatggtcgccatcctctgggagatggtcttccgcggtacggacacgacggcgcttctgaccgagtggtgcatggcggagctggtgcgccacccggcggtgcaggcgagggtgcgcgccgaggtcgacgcggctgtcggtgccggaggttgccccaccgacgccgacgtggcgcgcatgccgtacctgcaggcggttgtgaaggagacgctgcgcgcccacccgcctggcccgctgctgagctgggctcgcctcgccaccgccgacgtgccactctgcaacggcatggtggtcccggctggcaccacggcgatggtgaatatgtgggccataacccacgatgccgccgtgtgggccgacccggacgcgttcgcgccggagcggttcctgccctccgagggcggcgccgacgtggacgtccgcggcgtcgacctccgcctggccccgttcggcgccgggcgtcgcgtctgccccggcaagaacctgggcctcaccaccgtgggcctctgggttgcccgcctcgtgcacgccttccagtgggccctgcctgacggcgcggcggccgtttgcctcgacgaggtcctcaagctctccctggagatgaagacgccgctcgtcgccgcagccatcccccgcaccgcctgatccgtcctgccgccgacgcgtcacgtcacgcgttgtttgcatggatgatggtatctttgtctgtctgtgtggtcttcgctaaagtttgcttcttctcgatcgtcggttcgttcgtgcctccaccttagcctagggtttggtttcttgcaaggtagtgagtgtgtcttagtctcaccatcaccggggctccaattttggaaagctgcgtgttaggagttaacccctagacatgtttgcgtcttgatcgccaccacccatcagtatcagcgcagaaactacatatagatcagtgtttgtcgaccagtcatggaagtcgtgtgctctcaagtctgatgtattatatacatatatatgtattgtaatgtgattatcaagaaccgtgctatttacatatcgctttcctagcttgtttaactgcgcatacttctcagttctcaactgcgcatacctgtcggttctacagttttgtgtcgggctgtcggttgnnnnnnnnnnnnnnnnnnnnnnnnnnnnnnctgtcgctgnnnnnnncatactgtacatg

SEQ ID NO: 46593 - DNA, 647 bp, Zea mays
  Clone ID: MRT4577_142500C.1
tgttcctgctcctcatactgctgacgtcattggtgaagaattgtatgagtcattggttgaatggaatcttgatgagaaaatatcttctgtgactcttgacaactgcacaactaatgatgcgaaggccaacaagcatggggctcaaatctgagctagaccggtacttggatgaagaaatggtgaacatgcaaaccaaaaacttcaatgttttagattggtagaaggtagctggaactcggtttcctattttaagaaggattgcaagagacatatatgttatccctgttacaactgttgcttcagaagctgctttcagcactagtggtagagtacttagtgagcatcgcagtaggcttacttcaaagatgttggaggctctcatgtgctctcaagattggcttaggaacaaatacaaagttgatgagaaaactaaacaacctgccaccttttggtcctgtctccaagacatgcaagagggcctccaggaacttgcactttgacattttcatttcaaggatttaggtggcgttaatcttttggctgttgacatgtagtgaacaagtcaagtacaagtagcaattgacaagatcacaagaaccttttggctctcatgaacacttgatatggatcttttggttctcatgttt

SEQ ID NO: 46594 - DNA, 446 bp, Zea mays
  Clone ID: MRT4577_142501C.1
cggacgcgtgggcggacgcgtgggcggacgcgtggggattggtagaaggtagctggggctgggtttcctattttaagaaggattgcaagagacatatatgttatccctgttacaactgttgcttcagaagctgctttcagcactagtggtagagtacttagtgagcatcgcagtaggcttacttcaaagatgttggaggctctcatgtgctctcaagattggcttaggaacaaatacaaagttgatgagaaaactaaacaacctgccaccttttggtcctgtctccaagacatgcaagagggcctccaggaacttgcactttgacattttcatttcaaggatttaggtggcgttaatcttttggctgttgacatgtagtgaacaagtcaagtacaagtagcaattgacaagatcacaagaaccttttggctctcatgaacacttga

SEQ ID NO: 46595 - DNA, 2370 bp, Zea mays
  Clone ID: MRT4577_142502C.1
cattgggacctcgagccggcggggagtcagagagtgaagtcatggcacagtccgggcaaagtgcaactattgcttcaagcaactttctgcgtcaagtaataatgggacaaaacatcttcatgttcatttaaaaagttgtgtgcaaaggaagattaagttgaacgggaagacattggcacaagcttctttgagatttggtagaacggatggtggaacagtttcaatagagaattacacatttgatcaagaaatagctagaaatgaacttgctgcgatgatagttctgcatgaataccccttaagcatggttgatcatgtgggtttccgaagatttgttggtgctcttcaaccacttttcaagatcggaaccagaaacatgataagatctgatattatgaagcattatgaggtggagaagaaaaaagccattgaatacatggctggaatccagtccagggtagcggtcaccacagatttgtggacgtctgacaaccaaaaaagaggttacatggccataacagctcactttattgatgaatcctggactcttagaaatattataatgaggtttatctatgttcctgctcctcatactgctgacgtcattggtgaagaattgtatgagtcattggttgaatggaatcttgatgagaaaatatcttctgtgactcttgacaactgcacaactaatgatgcggtaatctcttctcttgtgaggaatattggaaagcacaaacttatgaatgatggaaaattgctacatatgcgatgttctgcccatatccttaatttgatagtaaagggtggtttagaagtacttaaagatgcaattgagaacatccgtgatagtgttgcttattggacagccactccaaaaaggattgaaaagtttgaggaaatagctaaatttgttaaagttgatatcaagacaaagataggatttgactgtaggactagatggaattcaactttcaccatgcttgccactgcagtgccttacaaggctattttcataagagcaagtcgtgtagataggcagtacacgtgtttgcccactgaggatgagtggaaatttgctaaggatgttgtggagaggcttagattgtttaatgacattactacactattttttggaactgattatgtcactgctaacgtctacttcactagaattgctaagattagaaatcagattaggttgtggtcatcatgtggcaatccgttggtagaagaaatgttagtgaatatggtagccaaatttgacaagtactggactgacattcaagggctcatgggcattgcaactattcttgaccctcgattcaaaactgcagtcctattgatatgttatgaggacttacttgttgtgtccggtagtgaatgtgaagatagagttgctaatgtgaagaacttgctagctgatttgatgaatgagtaccatataactgagaatattgagaacaatgagtcatcaacaccatcagttggaaacagtgatgacttcttatctgacattagtgcccgtattgcaagtagaaggccaacaagcatggggctcaaatctgagctagaccggtacttggatgaagaaatggtgaacatgcaaaccaaaaacttcaatgttttagattggtagaaggtagctggaactcggtttcctattttaagaaggattgcaagagacatatatgttatccctgttacaactgttgcttcagaagctgctttcagcactagtggtagagtacttagtgagcatcgcagtaggcttacttcaaagatgttggaggctctcatgtgctctcaagattggcttaggaacaaatacaaagttgatgagaaaactaaacaacctgccaccttttggtcctgtctccaagacatgcaagagggcctccaggtgatttcatgttaacaatatttttctttctttatgtactctatctcttgatatttgataaataactcatgtgctttctttggtcaataggaacttgcactttgacattttcatttcaaggatttaggtggcgttaatcttttggctgttgacatgtagtgaacaagtcaagtacaagtagcaattgacaagatcacaagaaccttttggctctcatgaacacttgatatggatcttttggttctcatgtttttactcaatggtgaacttgtaatgaacttgtaacagatgtgcttttgggagcggtttgcacatctgttgatgcgcacctatgttgtaagcacattgtatgtgttaatttggaaatttggatgtttaatgtggtgaactagtggcgccatgctaggggtggtggacactaactggatatttatctagctgtgaaacatctgatgtctgatgtgatcaat

SEQ ID NO: 46596 - DNA, 295 bp, Zea mays
  Clone ID: MRT4577_142503C.1
atttggtcagggagttgcgacctgcagcagctgctccttactactttggtgagttggaggaagtcctcatccagggcaaccgtagatctggcgatcacaacatgatcggaagcgatatctgacacagagcgtaagacagctggagaccttgcagctacgcgccccagactggtgatcttcccttcttaggccaatgagtcatcaactgcagcgacacagtggtaactcgctctcagtagggagcaccactgagtcgtgctcaggtgagaacagtatgcctcagaccgagctggtg

SEQ ID NO: 46597 - DNA, 445 bp, Zea mays
  Clone ID: MRT4577_142504C.1
gtatcatagttattttcattatgttttgacagccggacaacaatccccgatatagtacgacgcaaatttgccccctctacaactaaaaaacagggggtgaatcggatttcttttttgcgggacttgcaaaggttccaaaattgggtctttttttccaacttcagttgatagatattgggcgggaaacctgcaccctttattctaggctccttctggtgctggaggaactattactaacttccttgcctggggctaacataacccccgtgatgtatccattgccgatcccggtttctgtaaccccactggttgccataccggggcaccagcttcatgtgggaggatcttactccaataccacccttgggattaaacatgtttgaacttgaaccaccaacaaaattgtttgttaacaacattctcgtgtggggggcccagaattcct

SEQ ID NO: 46598 - DNA, 265 bp, Zea mays
  Clone ID: MRT4577_142505C.1
acacagacacaagtcctcctgaacaaggcagccgatgtacacatacgctctccaagacatcttctggactgacagcctgtcctgttgatccttcggaaaaggagattgcgctgccaccctacgtgtgaaagacgcaccaccaatgtctaccctccggcaggggcgataactgcaaccctggactcggcgccggtgctgacttatgcgagcactccctctgcttggcgcctagtacaagagccatcgccgcgaggagatcaagaga

SEQ ID NO: 46599 - DNA, 406 bp, Zea mays
  Clone ID: MRT4577_142506C.1
attcggctcgaggcgagcttgcctgctagcctgtttgaacgggtgcgccagcaccatggacccgggagcggtatggaaaagcttggagacaaggcgagctgcaggaaaaatcaccccctgcacccctgcgcggatccacttgtacgaccctttcgtactcagtggagtcagcatcgaaacctacgagcactgtcgacttctgtgatcctttgacgtcacccctggccttgcgagtaccgtgcggtacctgcgcatcggtgtcacagcgacgcttgacgaccagctgggatcggacgtgtttttctgaagcggactacacactagggggctatcccttgaaatgagcgactactttgttgacgcggctgccgtcggagaagaaatagaagtagagggaaagctttgc

SEQ ID NO: 46600 - DNA, 433 bp, Zea mays
  Clone ID: MRT4577_142507C.1
tcgggttttttcttgggcttgggcttggggccggcggtgatcaagtcggcgggggccgagggcccttgccgggcgggggaagaattgcaagaccaagaacttttccaaggccaaaaggacccccggggccggaagggcattttaacttatggtaaaacggaaccggtggaaccggggaaccattcggggaccgccccgttcgaacagttcaaaacctgcttcgccaaccgcggttgggttgtcaaaaccaactttttttccttgattgacaacatggatcgactaattgaggtattaaagcaggcagcaaaggaaggggcactggttttctacaccctggccgatccttcaatggccgaggcgactaaaaaggcctgcgatttctggggtgttccaggcaccgatgttcttcggcctactgtcgaagccattg

SEQ ID NO: 46601 - DNA, 848 bp, Zea mays
  Clone ID: MRT4577_142508C.1
ctcgaggccggccggagcagttctctgttgcccgtctgtgcctacactcttcgcacgcactgtagtgtggccgtatgtctcacaaactcacctctcccacgcctccactctgacgacattgccaaaccgtcagcaccttcgtactgccaccgccacagccctacccgccgcagacgatgagctaccactctgagatccacttcaccctggacaccatctgcccgtggacctatctcgccaaacgccgtctccaccgcgccattgccacactgccctccgactgccccgtcaccttcaccgtagtctacaaaccctatcaattattccccgaggcgtcgcaggagggcgagggcaaatatgagtggtacaagcgcgcaaagtacgacgagagcgaggacaagatgcagatgtacatggcgctgatgaccgcgtatggtcggggagagggtattgagtataagtttggcggcactgttgcgaatacgctgcatgctcatagggttattcagcactttcaggcgttgaaagggccggaggttgcggatcagttgatcgatagtttgtaccggcagtatttcgaggaagagcaacatccgagttcgacggagacgcttgtggctgctgcgatggaggcggggatcgatgagaaggaagcgagagcgttcgttgaagatgaggacgaaggtttggctgatgtcaagatggctgtgcgggagcaaactgggaatggaattgattctgtcccgtacatcgtcctggaaggcaagagaagggacatcacactcattggatgcaaggaaagtgatgagtatcgaagggcgcttgccccaattgcgaaggagagtcag

SEQ ID NO: 46602 - DNA, 317 bp, Zea mays
  Clone ID: MRT4577_142509C.1
acgcctctagaatgagtcgtattaatcaacaagcaacatgaagggatcaacccaacaacagaagaccgaggtaaagattccgtgcacgacctctatattctgaggactgaaggaccgagcagcagccatgcgtccgggacaccttcaaccatatgacgaacccacgcgatcgtcggggcgcacaatatctcggtggaggcctgccacgcgcaactcacgccgctgcacctgcccgcactgctggctgccgacaaaggctgcatcccgccgcacgccgtcacagcggcctctgggggcgacagatcggcccgggactc

SEQ ID NO: 46603 - DNA, 923 bp, Zea mays
  Clone ID: MRT4577_14250C.1
cattgggtacctcgaggccggccggggagggtccttgctttcgttgctgttcgcataaacaagagatcctagttctactcccaagcaatgtatccgtcagcccctccggacgcgtataacaaattcagcgccggggctcccccaacggcgccgccgccgccggcagcgtaccagcagcagcagcacggggcgaacatggacacttcacgccccggcggcgggctgaggaaatggtccaccggcctcttccactgcatggacgacccggggaactgtctcatcacatgcctgtgcccctgcgtcacgttcgggcaggtcgctgacatcgtggacaagggcacctgcccatgtatcgcgagcggactggtgtacgggctcatctgcgcctcgacggggatggggtgcctgtactcgtgcctctaccggtccaagctgagggccgagtacgacgtggatgaaggggagtgcccggacatcctggtgcactgctgctgcgagcacctggctctgtgccaagagtaccgcgagctcaagaaccgtggcttcgacctgggaatcggttgggaggccaacatggaccggcagaggcgaggagttaccggcggcacggtgatgggggcgccggccataccgctcggcatgattaggtaggtggtggatgggaaatggcaacgctttgctagttgctttcatggtgacattggtccctttgtgttgctatgtacgtactccgtaatttatttttgtttcttcgaacctatgtaatttatctggctttttttcactctttctcgtctggagtcgtgtgtacgacgctgctttttagttgggtgtgaatcgtgcccgtggtacctgtaatatactgtattctgctgaagtggagcttaaatttgaaacccgccatgccggagaggcaaatggct

SEQ ID NO: 46604 - DNA, 1453 bp, Zea mays
  Clone ID: MRT4577_142510C.1
catggagcttgaggatttggctgaggatgaagataaccttggtcaaaaaggaacaaaggtccattttggaggaaatatgtgtgccgagaaacttgatggtttaatggtggttgtgtgtgagcacctcaagtcacgtgtagaagaacctgagcgcctaattaaggaatttgtcactttgaaggctatatttaaatcacatgtgctgagggtgcacaaatccaaatttgcacagtttatcatgttttatgcttgttccctgcatcctgagattggcgatggctttgctaattttcttactgatatttttattgacaaggacaaaaacgaggatgcaattactagagtgtctgcagtttcatatgttggaagctatctgtcccgggcaaggttcatttccgtaaatatagttgtttctgtactcaaaaggctagtggactggtgtgattattattgtggccatcagctggacaatggggtgacagcaaatcctataaagcaccagctattttatgctagctgccaggctgtgatgtatgtcctatgctttcggttaagatctattatggactacccaaatcttaaacaacaactttttcgaatgcgaatccgggatatcttggtccacccattgcagccattaaaggtgtgcttgccttcaatagtgaatgagttcctgagacaggctacagctgcgagcctgttccatgcacctgcgatctcaatgcacgaagatgcagttgaatccgatctatcgaaggcatttggaggacttaataggcttgacatgttcttcccatttgacccgtatctacttaaagagtctgacagatatatacggccaaattttgagttctggtccttggtcaagacgacatacagtaacgacaacagcgatgaggacgacgaagagcttggcgacattgacgcacctggaatgaatgtgggcagcttggatgatcacttcgaaatagattttaacagtgacgatgacattgagtataagatgaataagatgtccataacgccgcaacgcactttctaccatccactggctacaaacagtgagtccaaccgcatgcctgcgaggatcagaccttcagtgagccccccatcatagcaaggttctgctcagctctttacttgactgatgatgacacaaaaccagatgctaggaagttgcacgtgccaagaagggaccaggggatgacgaccaaacatacaccggagtgtattctatttattattccagttgctagtagggtcaaaactttaatgcagagtgtatatgtgtttcagggcaacgcgtggaaaaccggtttgtgattgtatacttggtagtcagcccttaggaacaggtatgtgtttgtagcaagacttacgacgtgaaatgaggattctcttggggacattaatggtataacgtgcgaatgttagaacctaatttccaattatc

SEQ ID NO: 46605 - DNA, 639 bp, Zea mays
  unsure (1)..(639): unsure at all n locations
  Clone ID: MRT4577_142511C.1
ctcacgcgtcctcctggatccgtgcttcttcgaggagtgcatggtgaaggtaatcgacccgacggaggagatgcacgagatacggaacggctaacacctcggcgaccacttgaaccatccggggttcagcccagacggaagaaacatagcggtgacacgccacctccacgatgggtgggccgaccccatgtagcttctactcttcatacaatccgtgctgacctatgaggacatgatctggagtgcgacatctgattccatcacgcacgacaacgcaagtaacacacgcacactgcatagatagttccagctcaggtgtcagcgcatcgacgtgcgctcacagaagtacctgncatcttcctactttggaacagtagattcgacaatggcatgatcgcgaacgaggcatatgacaacatgactgagtaatacaaagtacctttcacacgaactgcgctgcgcactactcttacttcggactgcggtgtacagctaacacatgaacgtgaccttaatcataacagagatgctgattgtgcgatctgacgcttggattgcatccttcgtcgtcacgaacagctaccagctactgggacctttagtaatatgttcatacatcagtaatccaccactggggta

SEQ ID NO: 46606 - DNA, 177 bp, Zea mays
  Clone ID: MRT4577_142512C.1
ggggtggggccatccaagaaaaatttaataaccattaacaggctttttttggctataaacataaacatgggctcactatccttaaaataacagttttgcccgccttgccgaacgtacatgctgccaaagttcagagctggctttttacacctagtcaccgagggaaacagagctgcc

SEQ ID NO: 46607 - DNA, 267 bp, Zea mays
  Clone ID: MRT4577_142513C.1
ccttcagtctctgggcaccaaaatttccgtttcgattgccgccgcttttgccaaggtcagggttccgggccttgttctcgggttttgccttcggcccgccaaaggcccccgccggccccccaaaggccgacccatcccccaaccttttcgcttccggttaaagcaggcgtcccccaagtgaaggcctttaaaaaagcctttgcggagtttggggaagttttgcttgctcaagttgtgaccgatcgtgtcagtgggttttctaaggga

SEQ ID NO: 46608 - DNA, 265 bp, Zea mays
  unsure (1)..(265): unsure at all n locations
  Clone ID: MRT4577_142514C.1
gacgtctttactttgatatttattattctctgaaaccaacgcttcttgttggtacccccgcngattactacatcggccagctccttcctcttatccagtataaccattagtgctggccttgtcttctaccccattaacactgctcgccttcgcatgatgattacatctggtgaagccctcaaatacaacaactacttttacgctttcaaacacattctttcaaatgaaggtaccaaatccctcttcaaaggtgctggctcaaaca

SEQ ID NO: 46609 - DNA, 205 bp, Zea mays
  Clone ID: MRT4577_142515C.1
tcaagctttttttttctttgtttttttttttttttaaccgcatgaatacatgatatacaattaaattcaaaatatgattttttatacaacaaataagggcctattttgtgtgagaacataatcgttttacaacagagctgattactttgcctacaaagtctccacattttttatcgtacctaggacgaaaagcttgctcagggcc

SEQ ID NO: 46610 - DNA, 231 bp, Zea mays
  Clone ID: MRT4577_142516C.1
cggccaaaaggggcaacatctagtttccataggggagaacaaattgatgcccgagctcccagaccaaaaatttttggtactaaacagcagggaattcttggcgtttcatctaacgacaatgaaccctggtcggggtacaactgccaaaatgaaccctggtcatcggaccctttggccccaaaataatggtacaatttttacccattcaagtgggtttaacccgggggggcc

SEQ ID NO: 46611 - DNA, 159 bp, Zea mays
  Clone ID: MRT4577_142517C.1
aaccagaacccaaagtaaaccccagggtttttatccgaggttatgtaaagggaattccattagaacccggaatttcagaacacagaccctggaaaaaaacattttcggaaccccccgggtttttacggcaaaaccggcaaacccgggttttcataaaaa

SEQ ID NO: 46612 - DNA, 379 bp, Zea mays
  unsure (1)..(379): unsure at all n locations
  Clone ID: MRT4577_142518C.1
aaccaaangatggggattttttttaatatgagcaacgaccattcattttcagcagactactttattggatgaccttttatatccacactccctacaccgcctcccatggggatgaaatcctggcctagctggcttaccctgtgaccctcgaacgaaagtggcaacatctatcgatcgagctaggctaatcgcccatgtcaggactcgggaccaacaaaccagatgttagctttgcccgctagccacttttatttttattgggggacggacgtatactagcaagtagccgggcgcgctgggctacgcttcttttaggaagtagctgagctgagctagttgctcatactgttccatgtcctgctcttgggacctggatagc

SEQ ID NO: 46613 - DNA, 273 bp, Zea mays
  Clone ID: MRT4577_142519C.1
attcaatgtattgtggtgggcattaaccgcatcgcgcccacggtcgaatcgggagaataactacaggatggacgcaacctgatacagtcaggagccggacgcaaacctcatgtggcgggcgctctttcgaggccacaacggtctcgtttaggaagcgctgacagggcgcacaagaggggcaggaaataaaatggaagcttaggcaccagagaccttacagccttcgggctgggcgtgcaccttcctgaccggatccgggggcgcgaccgttgg

SEQ ID NO: 46614 - DNA, 391 bp, Zea mays
  Clone ID: MRT4577_14251C.1
gttgaatatttgtttgattttgggttacagctcctaggcaaaggtttacatcccccacaagttgacgatggacaaaaaaaggagcccgggatggggggttattcacagacacaaggaggggggggaaaaaaaaattgcaggtgccaggcatttacagaaaaaacaaaaagaacaccccttcataaacggcacaaaggaaacgcaaactgaaaggtagggctttgaagcaggggtgtaaatagatgattcctctccacctgctagatttattcatttttttgtggggataacgacaaaatcctggaaacgttatctggaaatggagaaactgtggggagcgaagatattttagtgggagaaggggccgggccttaagcgctatgagggtcca

SEQ ID NO: 46615 - DNA, 317 bp, Zea mays
  Clone ID: MRT4577_142520C.1
gagagctatgacgggtcatgcaccgcgtccgatgcttttatcctactaaagcggacgcccacgtattagtttcttactttggctagtgcgcgtctggtgttttcgccgagcagatggaactcaaggctgagaagaagccgatggccatgaagcccgtggaggaggagcacgcgacagataaagttgagaaggctccggcgccgaagaagcacaaggccaagacgcttctacgcgagggcaagtccaatgatgacggcgagggcaagaaagtgaacgggaaggcgaataagttcgtggagacggagaagaactagatc

SEQ ID NO: 46616 - DNA, 260 bp, Zea mays
  Clone ID: MRT4577_142521C.1
cagcatcgcaatcgcatccatggcttcctcgtctatccacatccaccatccccggcttgccggctacgagatccaccggaccctggaggcctcctactcccccagcgcgtcctactgctccgacgatgccttcgtccccgtcttccgcccggatccgtccgctccctccgtatccgcgtccgcatcgtgcgaccgcgtccggagccttttccgctccgtcgacgtagtcctcttccgagatacgctcttcgcgcccggtc

SEQ ID NO: 46617 - DNA, 327 bp, Zea mays
  unsure (1)..(327): unsure at all n locations
  Clone ID: MRT4577_142522C.1
nnnnnnnnnnnnnttttttttttttttttttttttttttcgaccaccccaagtttgttttttatccaccggccccttacttccaaaaacgacacacccggaaattttactttgttttttatccacccctgcgtgtgatggccgggtacgtgctccaaccaaaacattaaaacacgctcgaggaaaaagcaaatcacacgtggttcgacaaaacattaggaagggggatgcttaccttcaaattttgttgcccggaacgtcaacaacaaaggggtacttgacttggttcttttttaggcgctgaatggcggttttgacttattcattc

SEQ ID NO: 46618 - DNA, 264 bp, Zea mays
  Clone ID: MRT4577_142523C.1
aacacaccatcgactgatcaaattctctatcgatccgtgacttagatacaacaattgactgtgacaaatccactattggtttcacgatcagcaatacgtatagtaactcccaatttatgaatctaatcaagacgtaatagcaaaccatcgactcccaaagttccgactgacataggacctaaacatggaagagcacttgccattcgtaaactattaaaatcataccaaaaccgtccaggtcgaaatatggctttcaaattaact

SEQ ID NO: 46619 - DNA, 409 bp, Zea mays
  Clone ID: MRT4577_142524C.1
aaaaaaaaaaactgggggattttctaaccacaactggaattttttttaaaaagcccactgggggccggaaacttcctgccgttaatacttaaaaaacacgggggggggtactttcttaccccaaagttcgattggccccagcagcacaaaaaaaataaggggtccgatttccaaaaggggctggcataaaagggtcatttgtaaacggggaaaaataatacttcagctttttgggggggtgcttccccccagttttttcctcaggtggggggagaaatatcattcacattatgggcatcccaataatcctcccactgggggacaggttaattggctttttccttttaaacccatttttgggggatctcaaactcttaaaaccggggggggtcctcgaggggggccattt

SEQ ID NO: 46620 - DNA, 399 bp, Zea mays
  Clone ID: MRT4577_142525C.1
taatacctttcgtcactccgtcacctagcatctttatttctctatagaagagcttgtgatttgctctcttcggctctcagcattagcaagcatatccaatgtttccaggacatccctacgcagtcttggtaccctccctcggtgggaggttcctattcaagttcattcacccctacctattctagtgctatgtttcaccaaagagcttgagatagtgcggaatcttgatcccgggggcaaccatctcctgctgaggctgcagggataattgccctgttgaaggataatagtatagaggtgttacaaaggctttttgaaagacagagaggcttataatgcattctttaactcacttgatcaagtgataacccagatcaatgggcctgatgagcttaaaaa

SEQ ID NO: 46621 - DNA, 276 bp, Zea mays
  Clone ID: MRT4577_142526C.1
catattcctgccgaatgattctctttgaaactctgtcacgttcactcttgctgggttttatacacaatatgaccccaactctccatcacctgctctactagtcactacaatgtactatccacatatatatgctcatacatacatctatccgcatatcctacacatccagtggagtcctatatatgatgttgctacacttctaacttctatccacaccctgctaagcgatccaaacccaaactccacttcaaactcataatcagccagactgttcat

SEQ ID NO: 46622 - DNA, 623 bp, Zea mays
  unsure (1)..(623): unsure at all n locations
  Clone ID: MRT4577_142528C.1
ttcgttcacgcgtccggcaggctgcagcacttgttttagcaacaaaaactcttacaaaatgctgctccaactagntagaatcaagatatactaggactagcagtgtagttagcatcttcccttgcctgtgttttggctccgcccctgaaaacaactatcatgtatgaaatattatgccatgaaagatgagtatacaatgcgttaacatgtacaaactgatctggttaggctggatcctgtgcaactggtccttatcgactgccatgtcatatcaatcatactaccaaccacgatatcaaccatcatcagcttttatctaccacatccctcctatgcctagtctataccatcaccctacagtcgccttagcaccatatccgcttttcttttatagacttttatttaaaataaaacataatgttttatattgaaataaaaattcatccgagtacataactaagtagataaaaatcacaattcattaaacatatataataattatataatttctaaagctaacaaagtacatgacttataaatatatatttggatcttttgaattttagggattttttcattttttttaaaccgagttgacttggggcatgcatggaccaattgat

SEQ ID NO: 46623 - DNA, 326 bp, Zea mays
  unsure (1)..(326): unsure at all n locations
  Clone ID: MRT4577_142529C.1
atcaccaagatgacaggacaacggcaccgagggagacctcctgaactccaacggtcgtccaggaacacaagacgcgctgaccaaccagggaggagtcactccgaaccacctctgtcttgaagagggtgccccccatgtntcgaggccgtgcgcacaagagatgcgtgcgctccagcgtaacgggggatgaagaggcaaacggagggatccaccagcaaccggctgctgatttcgatccgctgcgctgacataagcatgcagcagaccaatctgggccttttttgttccgcgaagggggatggcatctaatcctggtgaacccgggg

SEQ ID NO: 46624 - DNA, 199 bp, Zea mays
  Clone ID: MRT4577_14252C.1
cggacgcgtgggacggcattgacaagggctaagcatcgagcacggatacaaggaaaaaggtcgactttacccagcagcatgccagccaggcacaaactagtgaaggacgcacgggaccgaggctgctaccgctaaaccagcgacgatggggatccgacgaatgcatgcataaacgccatcatagatcacaacgatcccg

SEQ ID NO: 46625 - DNA, 200 bp, Zea mays
  Clone ID: MRT4577_142530C.1
gtcgcattcagtcatattgcttctgcctacctctagcaatctctttcatttaacctactggcagcaccgaactgtgctgattatatacgacacctataggtacctgcaatgaggcacgtaaatgatgagagccctgatgcattcttggcagaacaacaagtgacggcggtgtagctgaacgctgagccttacgctgacag

SEQ ID NO: 46626 - DNA, 957 bp, Zea mays
  Clone ID: MRT4577_142531C.1
ccggccgggatcaaccacaggctaggaggaggggacacacacacgtacaaaccgagagcacacaccgtcccccgcccgcccgccgccgcgacacgcgcgccatggccatgctggctcgctccgccgcgcacctcttcttcttccttctcctcgtctccaccgcgcccgccgtgcggaccatccccgacgaagcccgcggccccggaaacaacatccacgaggcgtgcagcaagacgctgttccccaaggtgtgcctgcacgcgctcaaggacaaccccgagtgccaggcgggggcggtcacgccgcgccggctggccgagctgctcgtgtacgtgtcggccgaggtgggcatgaccgtggccgcgttcgcgcaccacgagctcaactccatcaaggacgacgtcctgtacaagtgcctcgacacctgctccgaggacatcgaggaggccgtggcgcacctcagcgccctctcccgcgacttctccgacgccaagttcctcgaggtcaagtcctggctctcctccacgctcggcggcacctccacctgcgacgacgcatgcaaagacgcgcccgtcagcgacatcaagaacgcctgcatcaccaagagcttcgagtttgagaagctgctgcgcgtcacgctcgacctcatcaccgatgcctcagggtccatgtcggccgaggtcgcactgcctccgtcggcggcatcgggcgccagcgggccggcaccggcgccgttcggaggttacggctcgtccgctggcgccccggcctacggcgcgccgtctcctgctggtgacccagcttatggcgccagcggctcgccggcaccaaccccgctgtagagtgtactgcttccgacgcgtacgcgactgcatgcatgagcgatatataatgtcaccttggtgcagactcctgcgctccgaaggattttttaaatatttttaaatatttttaata

SEQ ID NO: 46627 - DNA, 433 bp, Zea mays
  unsure (1)..(433): unsure at all n locations
  Clone ID: MRT4577_142532C.1
ccccgggttgnncccccgcgtctttntcccgcgtccgccctcgcgtccggtcctcgtcggctcgtctctgtggtctctggccgccggcgccggctgggtctgtgcccggggcccctaggtcccctgggtgcggncgttggtgctgggcttcgccggcgctgggctggccgccggcgttgtggcgctcctgggcgtcctccggggggtcgttgtcggcgtgctcgtcttctcgccggcgtgtcctgcccgtgcgcgcgctgcttcctcggggtggccggggggctgctgcgctccctcttccgggtcgtcgtcgngggcgtcccgcgtgtcccgcgcgccgtgctgccggccctggtcgggtggctgcgcgggtgccttgtcctcgtcggctccggcggcgcctgcgtcgtgccttgcggtccgctcttctccg

SEQ ID NO: 46628 - DNA, 244 bp, Zea mays
  Clone ID: MRT4577_142533C.1
ccggatccggcgccgcagtcgcccaaggtcccgaccgccgcggcctcggccgccgccgccaaggagcggaaggaggtgcagcggcggaagcagcgcgacgaggagggcctacacctgctgacgctgctgctgcagtgcgcggaggcctggaacgcggacaacctcgacgacgcgcaccaaaagctgcttgagatctgggagctggacaaaccgatttcgcaccttattccatttgtgtgggcct

SEQ ID NO: 46629 - DNA, 1359 bp, Zea mays
  unsure (1)..(1359): unsure at all n locations
  Clone ID: MRT4577_142534C.1
ggaccctcgaggccggccgggaagactgccggttcagtcatcaggttttcagacaaaacgatgcaaccggcatgcgagtgatcatcaccagaacatgatccttttggtgaagcaccaagacacagatcaatcaagtgtcgagattacggtagccactgaccataccaccaactatcaaaacaagaaggttttacacgcaccaacaggagccccttccgccacttgctcgccgggatcgtcgccggaggaaagcgccatggatcggtaccagcgggtggagaagccgccgcccgagcccgccgccatcggcgagaatgagatccgcatcaccactcagggcctcgtccgcaactacgtcacctacgccacctccctcgtccaggaaaaacaggtgaaggaaattgtgttgaaggctatgggacaggctataagcaaggcagtggctattgctgagatcataaagaagaggattcctggtttgcatcaagatacaataatcagttctgtcagtattactgatgtatgggagcccattgaggaaggacttgtaccattggagatgactcgtcatgtttcaatgatatcgatttccttgtcacctaaggagcataacaagaattcacctgggtatcaagctcctctacattcggatcttaagccacaaagatatcagcaacctcagcaatatcaacagtaccagccaagacaacatcaagttcaaacagattcatatggacgcggccgaggcagaagcaggggccgaggaaggggctggggtactaggggtgggtacggcggaggctatggtggatatgaatatgataccgccccaagtagggtatggtgtgtatgaacaccacggtggatatggacatcaaggtggatatggaaaccagggaggatatggccacaaccaaggtggctatggccacgaccaaggtggctatggcggttatggttacaaccaaggtggatatggaggatatgaaaatggaggctggaactacaaccggaacagaggcggtggcggccgaggacgaggcaattggggctatggtggtcctggatatgaccgtggtggcagaggcgcaggtggccctggcggcaggggctatgttcgaggccgtggacgaatgggtggcggccgtggacggggcaaccaaaactactattagagcaagggcattttccacggccgtattgctgtatgtttcctctagtcctcccagattttagtataatcgccaatggtgcctgtaccattgcatcaattccgtgggattttgacattagtccttcagttttccctgggacatctttcctgtatttaagagtgcatttttgatnaaaaaaannaaa

SEQ ID NO: 46630 - DNA, 447 bp, Zea mays
  Clone ID: MRT4577_142535C.1
gatccccatcgtccggttcgatatggggcttttgaccaaaggataaatggttgatcatggatgttgattttgacttctacttcatacggcaggttggtgcatgttgctttcttctctttgggtcatctggcagatgatgtactctttttacaccatccttaaattaagctcaggttccatgtcacatccttgtgctcattttttttagcgtaatcctaatcgtactcggccccttgctatgcccacacactcctatgttcagtgcaacactacaaattaaatgatggcttgctagaacttattgagcacatttctccgagcttatcctaggcaccctttccttccttttttcccgaggatcctagtcaccgtctgtatgtatacttgtgcccactttgcttagtgcagcaatgcaaagtaaatgatgtctgtttgaaacaatataag

SEQ ID NO: 46631 - DNA, 1285 bp, Zea mays
  Clone ID: MRT4577_142536C.1
tcccacgcgtccgcccacgcgtccggtttgggaagctgctaagtgggttgcaaaagtaagagatgtcgcgtgcccatcctgttcccagtcagttattctcaaaactaatatgcaaagtggccattttggtgagggtgggcgtttcacgcactgtgatgaaacagcctttgagtatgcatttctcatgaaggccttgggtttggatgacgtagctatgatgtagcgtactcatgcctgaggattttcacggaacagatttttttgtggctctggaagcaaaaactgagataattaccttttgtgatatgctcagggataagattgtatcctcataattattgattaaaagagctcgcaatggaaggtgatgcacccttgaggtgtgttctgtttggcattggcttttaatagtcaagctgtggatttctacatgcatattatcaacttatgcttccaaaaatagcacacttggatgctgctcatcaacagtgcaaaggtggcagatgagatccttattatggtgttcgatatggggcttttgaccaaaggataaatggttgatcatggatgttgattttgacttctacttcatacggcagaaacggcactctaggtggtagagctcgcttgaagggtggctaccaacggggagtgtgggggagcaagagcgcgcgtgtcaggttcatcctgtactgactcatcagttcacgccttgccatgtctgatcgtgtcctagacgataataagtcgacaggttcaggctaggttagacagctgctcccagaagtgtttgtttgacagacgaaaaccttacgtgtcaattgtgacgaccgcgtgccagctgcttatgcaagtataaccctgataatcagacaagttttctgttgaagacgataccagaatctcaccgctattgctccgcaatgcaaagttgttggtgcatgttgctttcttctctttgggtcatctggcaaatgatgtactctttttacgccatccttaaattaagctcaggttccatgtcacatccttgtgctcatttttttagcgtaatcgtaatcgtcctcggccggtcggccccttgctatgcccacacatactcctatgttcagtgcaacactacaaattaaatgatggcttgctagaacttattgagcacatttctccgagcttatcctaggcaccctttccttccttttttttcgaggatcctagtcaccgtctgtatgtatacttgtgcccactttgcttagtgcagcaatgcaaagtaaatgatgactgtttg

SEQ ID NO: 46632 - DNA, 111 bp, Zea mays
  Clone ID: MRT4577_142537C.1
atggcctatgagggtgaagatagcaaggaaaaggcttcaaaggaccaagcgaagtggtgctctgttagatttgactcctatgccaaaatttctaaggtgttcggctcctag

SEQ ID NO: 46633 - DNA, 425 bp, Zea mays
  Clone ID: MRT4577_142538C.1
tttttccccttttttttttttttttttttttttaggcccggggattagattcagtagtacgtagtagaaaatgacgcatccggagaaacatgacacaagaacaacaacaatcaagtctctagccgaagaaaagaaaaaaaaaaacaagttcacgacagctaatactgatgggaacggatgaggggccccgtcatgtcaagataattcttcatcagaccgaaacttgacgcacgtgtgatcctgtatcctcacctgctttattttgcatactgtaccgcggacatgatcctcttgggcacagtattgtttggcaagcaaaagtcagttacccataatattctcacaataatgatgggaaagcgtaaaagtatgcgggggggatttctaggcagcaggcacgtccgtccttgcttggcctcgggccg

SEQ ID NO: 46634 - DNA, 317 bp, Zea mays
  Clone ID: MRT4577_142539C.1
acctgccctttctgtctttaccaaggccgaaggccagctcaaagggggactttcctaacacttccgagctcggctccaagctccgagctatcatccaaattgggggttactgtgggaaatggttatccctttacaaatacacacatcataccacaccggaaccaaaaatactaaaccctggcgtgcctaatgaaggcgctaactcccattaattgagttaacctaactgaacggttttcagcccacaaacctgttttgccagctgaattaatgaatcccccatcgctcaatgaaaggcccaacgcgcattgagagct

SEQ ID NO: 46635 - DNA, 385 bp, Zea mays
  Clone ID: MRT4577_14253C.1
tttcgtccgccgacgtacctcctcctcccaggcagcatccaccggcaccgtgggaaatgaataccatcctggccacggagacgatggtcatccccgagggggtcacggtcacggtggctgccaagctgttgactgtggaggggccgcgcggtaagctcaccctcatcttcaagcacctcaaccttgacttccatctgcatgactgcggtcgcaagctcaaggtcgacgcatggtttggcacccgccgaaccatggccgtcatccgcaccgccatctaccacgttcagaacctcatcgtatgcgtcaccaagggtttccgatttaagatgcggttggtttacgctcactttcccatcaacgcctacattaccaactccaacttctt

SEQ ID NO: 46636 - DNA, 1474 bp, Zea mays
  Clone ID: MRT4577_142540C.1
gttaaatacatgcgttctcaagtaggacctgcttctcgtctttacacttctttcaaggagttgagctcaaaattggcttctattaaagatgttgttgttgttggtgttttcggttctgaatctgattcattggccaaagaattccacaaaacggctgatcgtttacgggaaaatgtcaactttgctcatatctacactaaagatgcttctgactctgttgaagaattagctaaacaagttggaaaatctttttcaggagaatccagtgtagttcttgtacgcccaccgcaattaagtaataaatttgaagataacgttgtatcttacgatagtgaatctgataacctcagcggttttgttgacgaaaattaccatggtttggttggtcatcgtacccaaagcaatatggctgattttaaaactccattggtcgttgcttactatgatgttgattatgttaaaaatgttaaaggaaccaactattggcgtaatcgtgtactcaaagttgcaaaagaattcccagaagtcaattttgcagtttcaaatgttcatttgtttgctggtgaacttgaagaatttggcgcttctgcaagcaaagataacagccctgtggttgccggtcgagatcaacaaggcaaaaagtatgttctccaaggaaaattcagcgttgaagctttgcataaatttgttgaagattttgctgctggtaaattggaagcttacttgaaatcggaagaagttccagtagacaataacggtccagttaaagtagcagttggcaaaaactttgaagatttggtcactaacagtcaaaaagatgttttcatcaagttttatgctccatggtgtggtcactgcaaaaaaatggctccagcttatgaagaattgggtacattgcttcaaaatgaaccaaatgttgaaattgtcaagttggatgctactgctaatgatgttccagaaccatttgtggtacatggtttcccaacattgttcttcttaccagctgacagtaaaactccacaaaaatacgagggtggtcgcgatgccaaagacatgctttcattcatcgcaaaacactcaactcaagaacttaaaggtttcaaccgcgacggaagtgctcgcaaagaggaattgtaaatcgatcaaatttttatcaatttgaacagcaataattcagttttgatttaaaaactatttaaaattaaatgctacaactgcatcgtgtttaatttattttttaatcaaatgttagcatttctttgcttatatttgattattagtccaattaattattccaccgcaatcaattattttttgattaaaatttttaattgtctcattctattttcacactgcggccccaagcgctactatttttcttaatcatttcacttttattcgtgtacattcgtttttatttgtgcatattttcatagcattcgatcgctttttaaataaacttaaattataaaac

SEQ ID NO: 46637 - DNA, 502 bp, Zea mays
  unsure (1)..(502): unsure at all n locations
  Clone ID: MRT4577_142541C.1
gggggtgttgggttttttgtcngcagcccagcatttttttgggcctcttgttcggtggcctgcgaggacgttcggtcgctgctacgcctcagttctcgtacaaagagcgaagttttgtttgggtcccttggcgcggcgacgaccaatttgttgtttgggggggggtgggnctacccttcccgtgatactgtttttgggggggcggggcacgacctctcgccgtctggacctgtctcaccggtgtatgctcagtcgggtgggcactttgtactgtgctccggagcggcctttgctgcccgtcgtttcctcctcccgtcggcctcacatgcgctcagggctttatgggccttgggcgttgggtcgcgctgtcgagctgcgggtctcacagcctgctttctttttgtcaccggctatatgcctcgctgttcggatcctggctacgctctttgtggacagtctctctgatgtcccaggcaggttctggtttctgttcccaacgctg

SEQ ID NO: 46638 - DNA, 384 bp, Zea mays
  Clone ID: MRT4577_142542C.1
ttcctctttttttttttttttttttttttttgtttttttttttgcaaaatccataaaagattatgccgtacatgggccggcggccaacaaaggaaagtcggtccagttcctgtcgcgtttcaaaagttaaatacacacagtttactcaattttaaagcgattcatataagcttgcgaagggaaaactacagtggattgcaggcacatgcaaccagagattattcagccaaggcatttgtttgttcaatgcctgcctcggaatctcggccttgtcgccttctatgggggagacgggaacagctccacataccttgggccgatcggtattttaaccttgcacatcgacgttttggcaacttggggtgaggggaacttaacaaaggg

SEQ ID NO: 46639 - DNA, 289 bp, Zea mays
  Clone ID: MRT4577_142543C.1
gtcattattgatttatggggttaccaacgatcccaataatcctggcgtacaggggagacctccttgctgtcaaattatcggatgttgttaatagacgcgctcctatgctctttttatttcgactttctatttcgcacaagcgctctagatgacacgttttttttaagtattcaacgaggtgtagtaaatagacagacccggcacccaaggacagagggacacctatctactatacgctagtaccttttcccgttaaacctatttaccctagatataaatatacaaagag

SEQ ID NO: 46640 - DNA, 157 bp, Zea mays
  Clone ID: MRT4577_142544C.1
ataccatgcataaaagcaggggtcctttttcttaggcaagcccacaaaatgggcattaaattaaccttcttacaaaaataaaacaaactatccacccctgtacttttggaaaaacttactcatatctcttcaaaattacttacaattatactaacct

SEQ ID NO: 46641 - DNA, 268 bp, Zea mays
  Clone ID: MRT4577_142545C.1
ctgcaagctgcagacgagccgaatgagcatatgaggaggcagctgcagacacagcttcacgaggatgatacggaactgctggacgagcgagagctacgtgccctggcagctgcagcatacaagaagctggaaggggacctgaaagacctggagcttcaggccgactctgccatcaaggggagggaggaagccatcaagcagctacgcaaactgcaggctcagatgaaggactttcaaagagagctggaagatccccgtgcctccagag

SEQ ID NO: 46642 - DNA, 302 bp, Zea mays
  Clone ID: MRT4577_142546C.1
ttaggaattagttatttttatatttttttttgggtttggggtttttttgttttggggggcagccaatttatattattccgaaaaattaaaccaaaaaaacagttttgcaaagccaccgtaacaaaataccagtcaaatataggtcattttaaaaaacaacgctgaaaaaagggcaggttttttttccctgaaaaaaacagcaggtttggagaaagaaaaccagcattcaaccattatttataaacttgaaaatcgaaacataacatgcgggcataaaatttaaagggtgtgcttaattaaaa

SEQ ID NO: 46643 - DNA, 250 bp, Zea mays
  unsure (1)..(250): unsure at all n locations
  Clone ID: MRT4577_142547C.1
ctccacctancccagacaattcggggtcagataaccatattattcaagaagaacaaccaaaacaaacagcaagatgtacaaagattataagccctaataccgatgatgccaaatatgttataaatgtaaaacaaattgcaaagtttgccgtcggattgccagataaggtctctccaactgatatccaggaacggatgaggactggtgttcatcacaacaagcaccacacacaaaaccctcacccccaaaa

SEQ ID NO: 46644 - DNA, 106 bp, Zea mays
  Clone ID: MRT4577_142548C.1
ggagacagtaagagggctatggaagagtacacctcagcgatcttcatgggcggacagagcaccatcgtgctgcacacaaactgagaggtctcgctcctcgacgcac

SEQ ID NO: 46645 - DNA, 147 bp, Zea mays
  Clone ID: MRT4577_142549C.1
gccggccttctgctccctttctttctctgcgaccgctgtccttctgtcgtgctgctttctcgctcgcttggttcgcgtgtgcctcccttctttgtccggccgctgccctggcctgccttcttggtctgtccgcgcggtcttcgcttc

SEQ ID NO: 46646 - DNA, 275 bp, Zea mays
  Clone ID: MRT4577_14254C.1
ttttagtaatttatttttttgaagaagaattgatgagagaataatgagaattcctccaagattaaaagtaaattataagatcctgtgctattttaatgtaagccaacatttgaatttaatttgacttctattttcagtaaattagagtgaaattttagggatgtctttatctcctatagtgtgtgttttgccaagatttattaagggtaattttggattttagaaaatgtacagtttctaaaaggcttgtgaacgttttatattgatagaaaatg

SEQ ID NO: 46647 - DNA, 332 bp, Zea mays
  unsure (1)..(332): unsure at all n locations
  Clone ID: MRT4577_142550C.1
ccaggacgaccacgcgtccggccaaaagtgcagtaccgctgtgtaattttacatcaactcttgccaaatttgtgggactcgggttgtttgccgcattatagctcangcagagtcactgctgatggaatgcggcataagccaaacatgcccttaacacaactgattttgttatgttcaaagaaggcatgaaccaactgattttgtttgccgcattcatagctcacgtagatgaagtaagggccattgatgatgaatactagtttcgactcgatggaccaactgtttaatgagtattcttcttgagggacatggtctcaacaacagcttctgca

SEQ ID NO: 46648 - DNA, 274 bp, Zea mays
  Clone ID: MRT4577_142551C.1
ctgttagcatggttggcggcctctgtagcactgctctagcgctaggagcgacccgagctggatgacgtagaccccgtctgtaaggcagacatcaactacatggcgttcgtaggattcagagaacgttcggacaacagctatgggtaaggcagcctctctctgcagccggtaagtgaactaccgagctgatctgatagagctcgcttgaggggaagacaacgagtcttgctgttaacatgcaccatatcagggtacacaccatgtctgtattata

SEQ ID NO: 46649 - DNA, 320 bp, Zea mays
  unsure (1)..(320): unsure at all n locations
  Clone ID: MRT4577_142552C.1
ggccgccctttttttttttggggggatttatataaggcaatcaccgttttttcccacccnaaaggaaagggggnnnggagatgccctagagggagtacattgttatcagaggaaaaaacagatgttcgcgtgagaggttacacaacccactacggggtgcattgtgacagacaaagcaaatgtgtttgtgtaaaggctactacggggccggcacaaacaggctgcccttgaaggggaatagctttattaacgggtcaagactggcgtgtaagaggttgaacacaccctccccacctctttccagcgggggggctcaccac

SEQ ID NO: 46650 - DNA, 837 bp, Zea mays
  unsure (1)..(837): unsure at all n locations
  Clone ID: MRT4577_142553C.1
gccggccgggattcgaaagagctcgcagtctcgcacatcgtattcttcgcagagcgcacacacaagccaaggccaagccgctgctaccacctttctttgcccagcccacgcccaacgccatccatgagcgccatggacaccgccgtgtcgcaaaacgccacggttgctgcggcggcgacggcggccggtgtcggcagcgccgggctggcgggcctgctcccggaggtgcagacagtggagctgctggtggccgtgtccatcttcgttgccatccactcgctgcggcagcggcgcacacagggcttgcccacgtggccgctcgtcggcatgctcccgtccctgcttctcggcctccgcagcgacatgtacgagtggatcaccggcgtgctcaaggcgcgcgggggcacgttcacgttccgcgggccgtggctcaccaacctccactgcgttgtcaccgccgacccgcgcaacctggagcacctcctcaagaccaggttcgggagcttccccaagggcccctacttccgcgaaaacatgcgggacctcctcggcgacggcatcttcggcgccgacgacgaggtgtggaggaggcagcgcaaggcggccagcctcgagttccactccgccgagttccgcgcgctcaccgccagctcgctcgtcgagctcgtccaccgccggctgctccccgtgctgcccgncgcggaagccgcggccgncgccgtggacctccaggacgtgctcctccgcctcacgttcgacaacgtctgcatgatcgccttcggcgtcgacccgggctgcctcgcccgggnctccccgagatcccgttcgcccgcgcgt

SEQ ID NO: 46651 - DNA, 530 bp, Zea mays
  Clone ID: MRT4577_142554C.1
cacggcccccctctcgagttttttttttttttttttttttttttttttttttttttttttttttttttaccctaatcccgtcatatattttagtttaattctttttaaaaatccaaataaatgttaatagtaataatctagttaaacttgatatcgttgggctgcccttattttttggaggggggaatcactagttaattaatctaaggggcaaataaattaaccccggatttcattatttgtatcatcgggcccccccctttgatgggattgctcagctggaataggccacgtaaatcttattctccgacgagtcaaacccgttgaacctggatccggcccttggggagtaggcccccttgtcgtcaaaaacaacccagtccccgaccctcatttccggcggttgatccccggggaccactttgtcctgggagtcgcacgtcggcccgaacaccggggacccgtacgtttcctccccggggcgcgggcagctggccaaaggtctcggccccggagccttggggcccatg

SEQ ID NO: 46652 - DNA, 484 bp, Zea mays
  Clone ID: MRT4577_142555C.1
aattcggcaacgaggtgctagctcgccgcaagagcactaccaccacgccaatccattgaggcggcttcgttagcgtagcggcggccggcggtggaagctaagtgtaaagcggccgcctgctcggggggataaaagctacaacgggcagcggcaggaggaggcgtcgtctcgaggactgcgcgcaatgcccctgtcgcggcacacggtcgggaacgagtacgcgctgggtggccgcgacctctaccgcgcggccgaccagcacgacccggaggacgtcctcgatggcgtcgccatggccggactcgtcggcgtcctccgccagctcggcgacctcgccgagtttgctgcacaggtgttccacggtctgtacgacgaggtgatgagcacgtccgcgcgagggcacgggctcatgctccgggtgcagcagctggaggcagagctgacgctgctggagagagactgctggcagagagactacctggat

SEQ ID NO: 46653 - DNA, 186 bp, Zea mays
  Clone ID: MRT4577_142556C.1
aaactgggaaggaaaactccatttgtattggggtccatttgcccgaaaatttacattacaacctttttaagatacactgttttttctgccagaaattagccgttgggggatctttacagaacgttgtcggaatttattttgaagacaccacaaacaccaggttcttcagaaacccttttattgggg

SEQ ID NO: 46654 - DNA, 396 bp, Zea mays
  Clone ID: MRT4577_142557C.1
atgggagcggttgttgcacagaaaagaagagtggtgtgaagagatatgcagcagtaataaaaaagacaattcattacggaggactcggttgaataactctgatgccgtatatgttcaggatttagtgacggaggtgcagagggcactatgccgtacgttcctgaacttcactggcaacatcgaggaagaaagtgagctggaaaccctcatagacatgcagcttgtggagctccgcaaggtgttcaggataccccataagcctttcgatgaaacgcagggccctacctccaagaagctcctaactctcttcgatcagggaagcttgggccgttcatcctcgacgacctttctgatggatctgagaaataaccctgattacttgatactttctatttt

SEQ ID NO: 46655 - DNA, 222 bp, Zea mays
  Clone ID: MRT4577_142558C.1
gtgatcataatataggacgtaagatatgatgaacggatgtttgggatggcagacgtagtttatagcgttacataagtttaggtctttaaaagttattataagacttattagatgtaaaaacaaatatgataacaagtacaacgatgtaggtactattactgcttaaaagaagtagtagaacaacggtgagacacgacctcatggtaattacggtgcacacac

SEQ ID NO: 46656 - DNA, 194 bp, Zea mays
  Clone ID: MRT4577_142559C.1
gcggctttgttttttttccctagcagaaaaaaaatgatactttttggggaccagcggggtgttgcatattaagggaatattcttattttggagctgttctgttccaagcttgccttaaccaaacaatactaaaggtataacagagccagtccattttacctcggttcttaaccaaacactacctaaatgggaat

SEQ ID NO: 46657 - DNA, 469 bp, Zea mays
  Clone ID: MRT4577_14255C.1
ggccgcttttttttttttttttttaggaaaaactattatttactagtccagcatatcacggatgtgattgcgtaaaatgttagaccttgtctctcattgcggatattcactggtacacatctcttccgcaaatcattgttttcagtcgttgcctccttttccccttccagtcgaaccctaggaccgccaccaaaattcaacctcgtagacgcggcttcgccatcaaccattcgctccgccttctaggatgggcggagcagctctgaagcgccaccgagagagttcagaggcttcagcaagcgagcaacaggaacaggaacagacgcaaagctggttgtttgagcaactgctgaagcaacagcaagcgaggaacaacggggcagtgggagtgcgggacagcagggcaacaaccagcgagcaacagcaagccgacagggggacaagcccaccggccgacagggggagtgcg

SEQ ID NO: 46658 - DNA, 1022 bp, Zea mays
  Clone ID: MRT4577_142560C.1
caagtgctgatttgtctcaaccaaaaactggcgaaggtcatgactcttggcaacacctttctactctcacaggatatcatggacggactattttttcagcccattggtcaagcgaggatattatagctagtggtgcgggcgatgatgcaatctgcttttttactgaggagaagggtagcatggttgaaaagccctcatacagattaatattaaagaaagagaaggcacatgtcatggacataaactgtgtgcgatggtgtcctcaggacccaaggttattggcatctgcgagcgacgacggcacggtgaaattgtgggaactgagagggaatgtgcttgattgagttctgttgtaatcactgtagcgtgcgttgagataatagagcagattaggtatcacctttggatttctgttctactgagctcgtctctctgtagttcatacttgtatatcgagagggtattttatgatggtcttttacaagatttaccgtgcaaactatgaaccgtgccatcctctcagagacatggtattgatcgtgtatacattatggaagggacagccgaacatgtccaaccattttttaaagttcaattcatgtacaatgatgagtgatgaataatgaataaagatttgcagcttcttgtaaaaaaaaaaaaaaaaaaaaaaaaaaaaaaaaaaaaaaaaaaaaaaaaaaaaaaaaaaaaaaaaaaaaaaaaaaaaaaaaaaaaaaaaaaaaaaaaaaacccgggccaaactttcccccccccaaaaaaaaaccaaaaaaaattcccccggggccccctccccgtcccccccccggtggccgggaaccccaaaaaggaaggggaaaaaaacaacccccaacgggtaaaaaaatcccccccaaaacggaaaaaaaaaaaaaaggttgcccggaaattcccccgaaacccaaaaggccgtaataaaaatcggaaagttttgaaaaaaggccggggggggaaaaacctaaaaaaacaaaatgtttcccccccccaaa

SEQ ID NO: 46659 - DNA, 475 bp, Zea mays
  Clone ID: MRT4577_142561C.1
gcggccttcacggtgcacacgagcgccgccacctcgccctactcgccggcgggcacggccatccttctccgaagccggagtcgagcctaccccaccgccaccatccgcgtgtcgtgctcgaagacggtggtgatcggagtggcggcggactcagggtgcgggaagaccacgttcacgcggcgcctggcgagcgtgttgggcggtggggcggagccaccgagggccggccggaacccgggctccaacacgctcgtcagcgacaccaccacggtgatctgcctggacgactaccactcgctggaccgggccgcgcggaaggcgaagggcgtcacggcgctggacccgaaggtcatcgacttcgacctcatgtacgagcaggtgagggccatcaaggagggccgcgccgtcgagaaacccgtctacaaccacgtcaccggccttctcgacccgcccgagttcatcaccccgccgaaca

SEQ ID NO: 46660 - DNA, 297 bp, Zea mays
  unsure (1)..(297): unsure at all n locations
  Clone ID: MRT4577_142562C.1
gcggccgtcaaaatccacacattcgaaatnttgcatccactaacatgatctagggagcgacataacangtgcatcatcaatgcagacaagtgcattaacagaggaacgtccaccaggncactcactctcaacaaactgaagtatgaacaatatactgaactactcaagccataaggcagaaccaatggcccagggttagtgcgcataacatcagccaagaataagaggttatatcctaggaatacctcatcgagagtgngtantaatgctcagaatagctnttccaacagttttcaa

SEQ ID NO: 46661 - DNA, 2806 bp, Zea mays
  Clone ID: MRT4577_142563C.1
atttcatccccggaaagggaaagaaagttactatattcacaggttgccaaagccctaaacagcagtgcttctgtagatgaagcatcagcatcaaatgtcgttatgctatccgggttcagtatacccaagctcgtcttgcagattgttactattgaaactgtactgatgaatttataagccaaacaaggagcttgctgttttgaaggacatagcattcacagtgtacaacaaggcacgacgaatcccacgggctgtctccacaagcgatatgttccagtcaccaacttatttgggtagatctcagtccacaatgatgcatgttacatctcctgctcctactctttggaaggaatgtttagttcctcgaatgtctgggccaactctctctcgagaaaccgattttgatgcatccatgaggtcggcaacatgggataactcatggcagcctgctcgttcgggaggacttctggacccaagtaagctgcctgatttatgtgctcaggatgataggaaatatgcctttgagccacttttcatactagcagaccctgggtctgccgatcttaatgctttaatggaaccatcaaaatctggagcagatgcatctggcagcagggtatatggctcaatttcaggaagtaactctgatagtggagtgagccctctactcgacgtatctgagagtgacagtgcagcaagtcttcattgctgttatggttggactgaggactggcgatggctagtgtgcatttggacagatgctagaggagaattattggacagcttaatatttccttttggtggtattagtagccgccaagacactaaagttctccaaagccttttcatccaaattctacagcaaggctgtcaaataatgtcgtcttcacctgaggctagcaatatgagaccacgagatgtcataataactcgtatcggaggtttccttgagcttgaaatccaagaatggcagaaggcaatatactcttatggtggcaatgaagtgaagaagtggcctgtgcagttacggcgatccatacctgagggtattccacctagttcaaatggtcctacgctccagcagcagcagcagcaagacatggccttaattcaagatagaaacatgccttcctcaccaaaccctctgtatagccctcatccaaaatcaagcttcatgaaaggtgcacttggacaatctggcaacaaaaaacagatccttgtggaacaaagtggaatggacacttcaaggggatcactgcacttagttcgtagcatcagtttggttgcagtttcccaagatcattcgttgcatctcacatgccaagcagatctactgagcagacctgcttcagctggcgaagggagtcaaggcagcagtggcccttggagttacctggaaggtttcactccagtgaagtccattgggtcaatgtcagcgtcacactcgtaccttctagttccttcgccaagtatgagatacctctctcctgcaacattacagctcccgacatgcctcacatcggagtcaccgccgcttgcccatctactgcacagcaaagggactgcgattcccttagcgatgggctatgtcgtctcgaaagccgtcccacctgttaggagggactctgcacaactcaccaaggatgaacagccctctgttctctcagtcagcatcatcgatcactatggaggcagcattgggactgttcaagagaagatgagccgaggaggcggcggcggcggcggcagcaaacaggcaaggaacttgagtcaggagacaacaggtcgtgagtgtgagatggagatgcatagtgtgttggaagctgtggccgcggagcttcactctctgtcttggttgacagtaagcccggtgtacacagaaaggcgcacagcactgccctttcactgtgacatggtcctaaggatgcggcggcttctacactacgcagataagtatctatctgaacctaagggagagacaactcactaattgtcatgtacaattaatatctagctaggtaggtatgtgagggcacatttgacgagctttgtagactgattttgcaataaccctgataacttacaggtggatgctgtaacctttttctctttttttaggtctgtattgtttgtcgacacaagatttgagatatgattccgtttgttgactgtattaatcagaattacaagtacagcgtttactgggattgccatgccctactgtgacaatgaggacgtttgtttttttcctttaatcagaattacttgtaaaatcaaaatcatctccccgctacggctattgctcacatccccctggctggaataggcagcttaaaacccaggtaaaactgacaggtccgcaattcccttgggcaaactctcaatctttctcagcaacgttagccggttgttgcgaactctctcgtcttccgccatcacgaagacactattgaagaaatcttctaggggttgtatcaggataagagaagcatccacaaaggtcttaatatcaacaccaggatggatcttatcagcaacctccaagtaggcgctccacaaaactttctcttcatctttctcaaatacgtgtgggtcaacctccaaagcagactcaatttcttttccacggatgatccttgttggccttgaatacgcttcaacgattttttgaaatgtttctgttctcgaaaatgcttccatttcggtcgctgtttgtgctgctagataagggcagtttgcacgctccataagcactgatcggactatctcgcagttaattccctcatccaccagaagctgttccagt

SEQ ID NO: 46662 - DNA, 703 bp, Zea mays
  unsure (1)..(703): unsure at all n locations
  Clone ID: MRT4577_142564C.1
agagaagcatcttcctctcagatcccaagctactatggatcgagtccagaaaattactcccaatcccaagaactacgttgtgctccatcgtctcatcgtctcatcgctcgtcttgctgctgtcatgcacggcggcgagctgtgagcaaaccccaccactgatctcccggctcgccaaggacctcaacacctccctctacaccatcaccatcaaggccgacaagtcgccgctcctcctcgacatcgccggctcgctcgtttggtcgacgtgcccgccgccatcggcgcagagcactgtggcatgcgggtccggtaagtgcggcggcgtggccagccagcagtgcccacgcaactgcctgcacgtggacggcggccagttaggagagtcagggtcgggatgcgcctgcgccagcaacccggtcagccgtcagtgctccaccgccggcctcacgagcttcgcaatgtcggccaacgccaccgacggcgcgatggagcttcccccggaagagtcgttcgccgtcctcggcgcgtgcgcgccggacagcctgccgaggtcgctccccgcgggcgtcacccggcgtggcggggntctcccggcgcccgctctcgctgccgtcgcagctcgccgcccagcgcggcttcggaggtaagttcgccctgtgcctccccgtcttcgccatcttcggggactcgcctgtgaacct

SEQ ID NO: 46663 - DNA, 793 bp, Zea mays
  Clone ID: MRT4577_142565C.1
ccggccgggaaagagtcgaagaagaagggaaggaggccgggtaacatccccctacacagggccactattgttaatactagctaggtttattaccatggtgatgaagaagttactctcttccctaccagcgatggtagcgatcatgctggccatcatcgccatgctcttttgctccgtcgtcgtcgtccactcctcggaggtcaaacaagcaaacgatgcaactagagctcatctggagggaagccatcagggcgtaccgccaccggcgccgcagggcggccgtgtgcatgcatacggcgatgtcccgccgccgccacagctgagcagcctctcgaacagcacccgcactggaagaacggaccgactgggtggtgacatcaatagttatgttaccgatcgccatgtttaggtttagccaggtttagccccgccatgaacccatgatgtgtttgggcttggttggaccaatcatctatctatctacactagtagagatatggttttagggcctgtttggatccttgtggcacagtttttcagttaattttagtaccttaacctctaaaaaaaaaaaaaaaaaagcggcctgtttgctcattagacatttgaccttgctaataggtgctaatagatcgtataaagagaaaaagatatctattaagtctccaaccatatcctgagtaatttttgctagctaattatttgtcggatgattatcagacactgacaaacaataagcgagaaggatccacacatggccttagcccggattaaaattaaaccaactccctgt

SEQ ID NO: 46664 - DNA, 471 bp, Zea mays
  Clone ID: MRT4577_142566C.1
attcctctactttcccctccagttatcgatgaaggctcctgggagcatcgatcctggcatcctactgatctaagtacgtggatgagctcatcaatgaatgctgctcgtacgtctctagccctcgtcaacggaactcctctgcggctgatgagcctcctggtcccattgaatagcggcctctccaagatgagtgtccgagcaagatgaaggacaaccggagggctctccgagagtaccagttctgctgccctgatgccctctagtacgtcagccgtgtgacccacttccaggagatcttccaccagaagacgtcggatgccccgcctattatgcatgacgtcaaggaagggagacgccctccctgttatctatgcggagaagggaaccattggagtagttggcatggatcaggagaccagaacacagggcggcgatgacctccgaaatcgaggccctatgtacgaccagggc

SEQ ID NO: 46665 - DNA, 718 bp, Zea mays
  Clone ID: MRT4577_142567C.1
cattgggtacctcgaggccggccggggggtggggtcatatttcaaacctctcgaccgcctgaggtagggcacgcacgcgcagaccattccacggcgacgtgagagcgttcggggagggtcgcagcctgcacacagcctgttcgatggaatgtcgcagcatttcggagacctttctgcgcgcgaatgccgcgctctgcgtgctcgccccagccatctgcgggctgtgcggtgcccaccgccgcagtattcacttcaaaccaggcccggcctcgcccgaagaggacgatgtgcgagaccgcgccccgcttccgcggcgatggtaccgggcagcatacgcccggctgctccgtcattcggggtcactggcaggggttgcaggtggctttccgtggcacggggcgaggggatccctcgtcgcatgcccgcacgccgccacccgggccgcgcactttgacgcgctcgcgggtgagttcgtcgccgccgtggccaccgtgagccgcggccacccgccgctgaagatggaggtgacgtcgctgagatcgctgacgcaggtctgcgacgtgctcggcgtatcagcccagcggaggaagagcgtgcggctcaacgtctgcccgcaggtgacgcagcaccacgtctggcggggcgcgctcgagggcgtgctcggggatctccaggccgacatggcgtctctggatagcccgagcccagggatcaagat

SEQ ID NO: 46666 - DNA, 707 bp, Zea mays
  Clone ID: MRT4577_142568C.1
ctcgaggccggccggacaggacatttccacggaccaccgggaacttgatcccgtttctccactgctcgggcgcctcccgtcggctctcctgctggcggatagggtccacccacgagtctctctctcgtactcgtctcacacactctgtccacggcttgacttgacctcgaaatgacaaccagcccgggtacagggcgcaagcggagatgatggagggaatgtaaatgaaaaggaaaagagctgcgcagagtgtcccccaccccccgcattttgctccaatcggattcgcctcccgcgagatcctatccgggtgccccgtcggcgctatgctgacaagattgacggcgacgtccccgacatcactgtcgaccatgagatggttgtttgggtacctgatgcaactgtcggcggattgatgcgcttcgtaccttttcagcatctgtcccgcttatgctgattgagccaacgtatgatgattgcctgattacagagattatgttatggagaatgcacatggattctgtcagaaatagtgtctccaatatgcagcctagggacatatgcgattacccacaatgagtctgccaaacatgaaatgatccaggagagccccctgctgatgatgccgcttctacagatacgaaacaaaggttcttcgacgacaaacagacatttagagtcactacttgacttctacgaagaccctg

SEQ ID NO: 46667 - DNA, 254 bp, Zea mays
  Clone ID: MRT4577_14256C.1
ggttgtaacaccaaaaaaatcctaattttgggtgcaggaatttttttctagaagtattagattaaagtaatccttcttaaaatgaataaataggaatattaaaattttgatagttcaaaagttagattcaaactttgaaactgaaatttaatttgaaactaaaaaaaagggaggtcctccattatttaattaatgggaatattcatttacgtgtttggaaatcttctttaaaaacagtaaggtaaaagtatcct

SEQ ID NO: 46668 - DNA, 290 bp, Zea mays
  Clone ID: MRT4577_142570C.1
ggcggcggtgtcggcagctgctgtagcgaagagagtttggcgcgatgtctcacaccattttgctggtacagcctaccaagaggccagaaggcagaacttatgctgactacgaatctgtgaatgaatgcatggaaggtgtttgtaaaatgtatgaagaacatctgaaaagaatgaatcccaacagtccctctatcacatatgacatcagtcagttgtttgatttcatcgatgatctggcagacctcagctgcctggtttaccgagctgatacccagacataccagccttat

SEQ ID NO: 46669 - DNA, 130 bp, Zea mays
  Clone ID: MRT4577_142571C.1
gcttttcacttaaaactggatctggaatacaactttcctgggcctatgtacaaacatctaaaatcaggaaatcatgaagatatacgcagggatgggggggctactacattagaaagcagccaggtattca

SEQ ID NO: 46670 - DNA, 729 bp, Zea mays
  unsure (1)..(729): unsure at all n locations
  Clone ID: MRT4577_142572C.1
acacttccggtccaatccagtcccccatccgatctcgccgggaaacctccgatccaagcgaagccaaggctttctcgtcctcctcctcaaggtatgcgatgcgagcctccgatttcttcccctccttcccgccacgtgcgtgcgtgcactgggatcgttgctaggactaccatgatcggttcttgttggttcccctggattcctcgtttggagtagatctgtgggtggaggcgtcagtgctgtcgatcgattgcagcacgttcgattagccgtggttggttaggcttcgttctagtcaaatttctcttgatcatgccatgatttccgagtagatctgccgattccgatgcgactgctgttgggtcggttcgtcttaactagctgtagttgctttgttctgctaggttgttgataaatcttcttagtattattttggatttatgattttgtgctgctggtgatacacatatatgcctgatctgtggaaggatacacctttgcggtattattgtgatgcaaattgccgtgatctgtgaaggaatacacctgtgatttgccagattattagttcggctttggggttgcttgtagtatccctggttgggcatctattcaacccttanattcatgtcggtttgccactgttggtcactaggcttaaccagcttgttcagcacagctagattacctgtgatcccagctgcagcacaatattgcgctggtagatat

SEQ ID NO: 46671 - DNA, 187 bp, Zea mays
  Clone ID: MRT4577_142573C.1
gtgcaattttgctcagtagatcatggcgaaagctatgtgaatattggaggggaagggcctaaaattaacctgggggaatttaccttcttatattaaaccttgtcttgttaaatttccccaaccaattatcttggccttttcacttcaaccttgttcacttgttgaaccttcttttgccaaaattaac

SEQ ID NO: 46672 - DNA, 416 bp, Zea mays
  Clone ID: MRT4577_142574C.1
aaacgatgcaaaagcagcacttgccattaagaactgatggacatcccggcgcagagcatgatgcctcatacggagggaccagactgaaaatgagggagaggaacaacagatcacagatgaccagaccttatgatggctagagagtttgaatgatcatgggtctcactttaataaaatatcttgcagcacctgccatggggccgacgcgctagagcttagttattggagtgatggctcatgagggcatcgcccaatctttgcttaacaccctgtggaccatgtgcacttgccggaccattaggttcatccgcaagagcgttaacatccgaggagaaggcatcggcggaggtggcatactccgactttgcctctgccgtcggacgaacatccatcgtgacaaatgaaggagcaacctc

SEQ ID NO: 46673 - DNA, 1737 bp, Zea mays
  Clone ID: MRT4577_142575C.1
tcactggaccgcgttgcacattccgggtcgtgttcggcaccaaagcggctggatgggctcggcccggacccccctcccgaccatgcgctgccgccagtcgatgagccggtcggtcgcctcggcgtaccgcttcctgcccgacgcgtcgcggttgccagaccagagcgcctccgccatggccgaggctctcggccacacccggccgtccaggacggtcgtgtcgacctgctccgtccacatcgccacctcgccgccgaggaccagctgggcctcctcgggggtgagcccgtacgcgatgtcgtagtcgtacacccgctgccacgtcttgtagggcccgcaccaggacccgccgttcgcgtcgaagtcactgttggggtcgtcgtagatgctgttgttgccgacgaagtcgccgtgcccgcagtcgaggtagtagaaggaggcggaggagacgatggcgcggtacccggcctgcacgatcagcttggtgttgttgggcccgttgttccacgactgcaggacggtggtggccggcgggatcgccgacgcgctcacgttcacggccgcgtccagcagcacgtcctcccagtacacggccgtgcggttcctggacaccaccagcgggtgcaccgcgctcacgtaccgctccaggagctggctcagcgtggcgccgcgctccaggtcggcctggatcgtggggtccgcctcccagcaacccggggtgacctcgtcggcgccggcgtggtagaagccgtccgggaagagggaggtcaggtcgttgaccacgttggtgatgacctcgtacgtcttggccgccagcgggttcagctggccggcgcccggctcggcggcgaggcggtggttccagtcgccgtcgggcagccagaacttgcccgcgcaggtaacggcctccgggtacgcgccggcccacgaagctgtgtggccaggcgagtcgatctccggcacgacgcggacgccgcggctcatggcgaactcgacgatgcgctcgacatcctcgacggtgtaccgcatgttctctccgtaggcgcccttctcggcgagcgacggctcggagggcagcacgatggggaacgactgcgagtccgtgatgtgccagtggaacacgttcatcttgttggccgccatggcgtcgatggtccgcaggatgtcggccacggggaagtaggtcctgccggtgtcgagcatcagcccgcggtgcgggtacaggggccggtcctcgacgcgcacgccggcggccaccagcaggaggtccccgcggccggcccgccacgacagctgcgagaacgtctccagcccgcgcatggcgccccacgcggtggccgcggtcaccgtggcggcgcccgtggggaggatctccagcgtgtaggactcgtccacgccgtgctgcagcggggcggcgaggtcggacaccgccacggtcagcttctccagcgcgttccccgcggtgacgttgaccgccggccgaacgatgggtcggtacgtctccctgaacagcagcttggcgtagcgctccgcggccgaggcgaggtacgggttacccgatgacgccacgatgtggaaggacggcgacaccggtacggccgcgtgcggctccgcccatgacatggacgtcggctttggccagacattgacggggaacgacgcgcccgcgcccgcgcacgttaggagcgtcaccgccgagccgagcaagagcagcagcggaaggaggaccgtcgccat

SEQ ID NO: 46674 - DNA, 658 bp, Zea mays
  Clone ID: MRT4577_142576C.1
gccccctctcgagttttttttttttttttttttttttttttttttttttttttttttttttttttttttttttttttttttttttttaaaaacaaaaggggcacgggttttaatttaaaacaacaaacttattcatgatttggcattgttggggggagaccccacacccaaaacaacggggcccttttttaaaccaaccctgacccaaacaggaaattcttcaacaccctcctttgggggggggccccaaacaacccaggcccatggggggtttaaaccacccatgatttactgccccccacggaaacggaccccaggggggggggggctctcctttgggatggtgaagccggctagggggcggccatcccccagttgttggccggaaaaaataaaaccctgttggcccggggggaacccctccttggccgggatcttccccttcacattggggaggggggccgagctctcaacctccagggttagggtttttccaggcggggtcttcaaaaaaatcggcatcccccccctgggggggaaaacaaggggaagggggctctccttttggatgttggaccccgggaaagggcggccatcctccatttggttgcccgaaaagataaaaccctgctggcctgggggaacgccctccttggcc

SEQ ID NO: 46675 - DNA, 232 bp, Zea mays
  Clone ID: MRT4577_142577C.1
cgcacgcgtgggtcgagggctcccacggtcacctataacttcatcagatggtttatctattctgagccccgaccaaaaaggcaaggctgactgacgactggctggacctgggctatagaggacgcaaggttctctacgcgatcacggacggtacatgcgcacgctatggacaccgaaacggagaaagacctcatacagacgctgctgtacgggaagaagaacacggtgacgg

SEQ ID NO: 46676 - DNA, 338 bp, Zea mays
  Clone ID: MRT4577_142578C.1
cgtacgcaagcaattaatttcgcatcgccgattgtggcgcacaaaggaagaccaaaagccggggccaacgttaatgtcttaggccccggcgctcgctccgatcaccaagggcgcggccaccttttaggcaacaagaccaaactcgggacaaaacatttcgtacgtcagcctgagctagactgtgatggctaaaagaagaccaatcccgggtccactcacaccattgacaaaggggtctttgcagctggggatatccaggacaagaaataccgccaggccattactgcaggtggatcatgttgcatgactactctggatgcacagcactacctgcacga

SEQ ID NO: 46677 - DNA, 516 bp, Zea mays
  Clone ID: MRT4577_142579C.1
ccagccgggacgaatctcgtggaccggtggttccgctcctttcttcttgtccatcctccccggtagcaacaccgccgccgttcctttggttgacttgggtcagcaggacagcaacgtctacgtctggaacgccaacgtccagcccggtcaggacattaccgtccgaatctcggactctcagggaattgtccagtactcttcccagatccccgtcattgctggatccgacaccagctgtgtcggtcaggccatcgctggtacttcggccggttccaccgtcgctgccactagcaccggtaccgcccccgtctctaccgtagctttctccgccgcctcggacgctgtctcttccgccgccgcttcgtcgtcctcggctgcctcttccggtgctggtggtgttgttggaggtgccacctctgccgtctcgtccgccgtcgcttccgctttcagcgccgcctcttcggtccgatcctcggactcttccgtcgtcagcagcgccactggtgccgctttcac

SEQ ID NO: 46678 - DNA, 344 bp, Zea mays
  Clone ID: MRT4577_14257C.1
aggcccaactgaaaaactacaattggattttcaccaaagattttacctattaggcaaaccccaccggcatttttttttttttttgggcttttttacccttttaccggccccaaaagagctatggggatatataggctacagacccaacaaacaaagaatggccatccgagattgggaacacaacacttttacttttggggaactttatttgacggggcaatcttgattacaagagggtgttgcaaatcggggggggaggctaccacaggaaggtgggatgttcctacatccaggttttcattttggggcaatggtttttccaaagatgattttgcaatttttgg

SEQ ID NO: 46679 - DNA, 601 bp, Zea mays
  Clone ID: MRT4577_142580C.1
cccccctcgagttttttttttttttttttttttttttttttttttttttttttttttttttttttttttttttttttttttttttcccaccaacccctttttttttcaaaccctttcaggggaacgagaaccccgggggggtactttgggaccccagttccccaaaaacccttggttttccaaccttagggaaaaaaaaagttttgggggttttaaccaaccggaaggggggaccccggggggaaaaaaacttggggaacccgttaacaattacccaatggttttccttccagtagggagggggaaaccgaccaccctttagggggccttgctgccatttccaaagcctgctttgccccaatttggggttttagggacccccccccccccttggttagggaccttgggttgcccggccaattaacccggtttgggcaactccgtgggaaaggagggtttttttgggggctggggggcccccttttgttgaaaagaaaacaacgggagcggggtggccgttttttgggggagccttccccgctttcacttttggggggacacctttgggaagggagggatggggcttcccattaacaggttc

SEQ ID NO: 46680 - DNA, 426 bp, Zea mays
  unsure (1)..(426): unsure at all n locations
  Clone ID: MRT4577_142581C.1
tttttttttttttnnnnnnnnnnnnnnaccttattagaaaaatatttgtaacaaatgcatggacaggtgtgggcacatgggtattggaataagccattgttacgtggagtcgcagttaccctgcaagtggaaggagcaaaggtttttgggcgaaatgcggtgaaaaatcgcctgcctcatttggattctttttacgctcgttttgtccgcgactccgcgtagcttgagcatgaatgataaaccttttgagttttgacgccacacagcaagcaggggcaaaatatctaaactgttagaaagcaaccaacagctttgtcttcgtactcgtaccgagctatcacccgtgggccgtggtgctgctggctgctaatgagttaaacaaaatgccagcctgatgccattaagattcctagaaaaacaggcacg

SEQ ID NO: 46681 - DNA, 2451 bp, Zea mays
  Clone ID: MRT4577_142582C.1
gcgcgccactcggtcaacatcatgtttaaactcatatcaagacgtgttgagtaaatcatcctttgacatgttggcaggagtctaagaaactgcagtttgcaaggagctgttccagatttgagtgtcgtacctaaatttggctacttggatcttagctggaaccagttgaaaggatctataccgactaataggctttcttcaaatattactacaattgatttatcacacaactttcttcaaggaactgttccatcaaacttctcagggctacctaatattcagtacttgtcagtcaatggcaacctcctaaacggttctgttccaccgacaatttggagtaacattactttcacgggaaatagagcccttgttctggacttccaaaacaactcccttgacactattccacctgtatttgagcctccacaaaatgtcacggttctactttatggaaaccctgtatgtacggcatctaatgcagcgagagcagctaatctttgtcaacctacttctgtaactgatgccccatctggagagggaaagcaagttagtacgacgtgttttccttgcccaacaaattttgaatacaatccatcatcccctattccttgcttctgtgctgcgcctctgggagttggatttcgactaaagagtccaggaatatcggacttccgaccctataaagaagcctttgagaatgacttaacctctctgctggaattgcgtgtttatcagctgtacattgaacgctacatatgggaggctggcccaaggctgaatacacatttaaagttattcccaaataatacaaatttattcgatatggctgaggttgtgcggcttagggaagtacttgctggatggcagatcactctattagatgtttttggtccatatgagcttctcaatttcacacttggtttctatgcagatgaatttcgtactgcggcgtcgccaggtttaaaaggtggtgcacttgctgggattttggtggggacaattgttgctgccattgcagtatctgtgttttctacagtttttatttccaaaatgatcacatgttaacgaacaatttcatatttggcattactttcaaggttttctgtcaaggttgatggtgtgaaatgcttcacatttgacgaaatggctgtggcaacaagggattttgatatttcagctcaagttggtcaagggggttatggaaaagtttacagaggaaatttagctgatggaacaacagtggcaatcaaacgtgcacatgaagattctctgcaaggttcaaaggagttctgcacagaaatagaattgctgtcaagattacatcatcgcaatttggtttctcttgttggctattgtgatgaagaagacgagcagatgctggtttatgagttcatgcccaatggtaccctacgtgatcatctttctgctaagactgaaagacctctgagctttggtcagagggtccatattgcgcttggtgctgcgaaaggacttctatatctacataccgaggcaaatcctcctatatttcatcgtgatgttaaggccagcaatattcttctagattccaagtttgtagcaaaggtggctgactttggtctttcgaggcttgctccagtgcctgatattgaagggactttgccagctcttagctctactgttgttaagggcaccccaggctatctcgatccagaatatttcctgacccataaactgacggaaagaagtgacgtgtatagcctaggtgttgtttttcttgaactattgactgggatgaagccaatccagcatggtaaaaacattgttagagaggtaaacatcgcttaccagtcaggcgacgtttccgggatcatagacagccggatgtcctcataccctccggaatgcgtaaagaggttcctctccctcgcaataaggtgctgccgggacgacaccgaagagaggccctacatggccgacattgtcagagagctggagaccatccggagcatgctgcccgagggagaggacgtcctgtcctcgacctcggggtcgggcttgctggcgaagtccatgtcatcatcatcgaccaccaccaccggggccctctacgtgtcgtcgcatatttctggcagtggtcaggcggacagtggcatcccctccgggatggtggctcctcggtagcgttgctggcgccggaggttttgtagacacctgacgggcggctgtgatctgtagtgaactagcttgtaagtagtgacaggacaggagtaatggtggggtggtgttcccttgccctgcaggtgagttgttgttctgtacatgagttttttgtgaactgtgctggagcctgctgggaccaggttgtgctgtaatagtggcattggtaaagaatacagatgagggatatatactgagttactgacgtaattcatcaaaaaaaaaaaaaaaaagggcggccgctctagagga

SEQ ID NO: 46682 - DNA, 493 bp, Zea mays
  Clone ID: MRT4577_142583C.1
ctcactctttttttttttttttttttttttttttttttctctttttcttttttttttttttttttttttttttcggaacaaaacaagcatgttttctaattttcatccgggttggcaaaaaacaaggttaaccccttataataatctaacgagcccccggtttttttttagcaaaacagaggccgcttaaaataaaaaacacacggaaagcttttactacccaaaaatgtccagttggccaatgtatgcggaaacaaaggagtctccccccttaaagcatccccttgacgggggcggccaacggaaccatggcaagggccacaaggtggttcccccccccggaggagaaactgccccccacggtgttgttctaggaccggggcaagggggtcgggaattttcctggaaactgtggcccctccccggagggaaaaatgcctgacatgggcaagggaaaccctgacatggtccccgaaattgggcccacccggac

SEQ ID NO: 46683 - DNA, 569 bp, Zea mays
  Clone ID: MRT4577_142584C.1
gtgcggcgctcaggcggcggtttcgatacacatgccacgcagaaatccactcccgcacttcgacgtcacacgggatgctgctcgctgatatgccaagcgtcgggaccaatggcttactaccaggaggtgcactactgttcggaggaggtgaggttggtggccctcgtgccggcttcgggcgccacggcggcggcgttgagcatctcgtcgtctaggataagttcgtaggaggtgcgatacggatcgcactgcgccgagcgtcaaccaccaccaccaccatgggctccacggcgttcactgcttcgtggtgcgctagagcattgtttaggaggacatcaacactgtgtcccggcgaggtccacgagcgcagggagagcttcctcgccagggctaactgatcagcccgggcggtcggtatccacgcccgttcgtgcctgcctgcgtgccttatgtatgtctgtgattgtgcagggtcatcgcacttggctagtgtacgtacgtgtgcgcactcagatcctgtacgaattacgacaataagctcgtgacctgaataaaacttcttcctaata

SEQ ID NO: 46684 - DNA, 128 bp, Zea mays
  unsure (1)..(128): unsure at all n locations
  Clone ID: MRT4577_142586C.1
gttctggttctccaaaagataccaattagttngngatgtagaagttaaggatgacttngtattcaatgcagatcttagtgctcccctctatcgcatgtaggtcattgcaattcaattgaaggagacgg

SEQ ID NO: 46685 - DNA, 420 bp, Zea mays
  Clone ID: MRT4577_142587C.1
acaagcttgggcaaaggaggtttgacggcggctacgtgcacaatggcttgcttaagggcgccgagtgggtttttgatgctgagtgtgatgttctgaaggaccttctggagaggaatcctggctatacactcacatttgctgggcattctcttggctctggtgtggtgtcaatgctagctttgctggcagtgcacaacagggagctgctcggtggcatagacaggaagaggatacgatgttttgcaatggcaccagcccgatgtatgtcactgaatttggctgtccgttatgcagatgtcatcaatgcagttattcttcaggatgattttttgcctcgcacagacattcctttggaagacatcttcaagtcactattctgcttaccatgccttctatgtggaagatgcctaatagacacat

SEQ ID NO: 46686 - DNA, 285 bp, Zea mays
  Clone ID: MRT4577_142588C.1
ggaacacactcaccgcaccggggggggctttttggtttttttggagactttttggggatttccaaattcgaaggggaaggggaaaaaaaaaaagggaatggggggaaaagaaagggaaagaatccccagaaaaaacaagggcccttcgggggagggcggggaaaacccctggccagggggggtgggtccccgttgattaaccaaccgggacgccgacccccctgggggggggggggcttaaaaaaagctcccaagtaaaccgcgggatcgggggaaccccccccc

SEQ ID NO: 46687 - DNA, 831 bp, Zea mays
  Clone ID: MRT4577_142589C.1
ttaagattaatccctgaagacatagatcctaattgatggagaaaggtctcaaagaacatgatagtaaatctcaaagtttcaaaacaagatctcaacaaaaatcccaaaaaagagcacaatttcatcttggaactcttgtctccttagtcttgcttggaagcaagagcagcagcttgacctctgagacgaccagtcctccttgcagcaataagaccaaccttttgtccaggtggtgcatcacgacgaaccgtactggcgtgaccaatatgttgatggttacctcctccgtgaggatgctcaactggattcatagcaacaccacgaaccttaggccagcagtttctcttcacacggtacttgtggtatgcgttaccagccttgagcattggcttctctgttcttccaccacctgcaacttgaccaatcatggccctgcatccacttggcacaatcttctttgagcccgacggcaatttgatcctgctggtgtcgttgtcagggttgtgagcgataacaatggcgtaatcaccagaagctctagcgaaaacaccacgatcaccaacatggtgctcaacattgcagacaacagctccttcagggatagatctgaggggaagaacatttccgacgacgagagtagctttcttcccgcagtagagaaactgaccggtgtacataccttcagcagcaacgaaaagctccttctgcttcttgaaacggaaaggatggcggaaagcaacgcragctaacggagcaccacgtcctggatcgtgaatgatctccgtgacaacacccttgaggtaaccatttctctcaccgaagtcgaggctc

SEQ ID NO: 46688 - DNA, 315 bp, Zea mays
  Clone ID: MRT4577_14258C.1
cctgcctccgcctcggggacgcgcgaccccggggagcctgggggacgccaaccacccgccccttgcattccgcgtccagcctctcgcggaccgcgcgcgcgccacgggaaggctgcggtgagcgcccagatcagcgccttggcttcccgcgtccggctcttgcctaatcctaatgcgtgctagagcgcctaccgcgctgggcgaaggggacgcttacgcataactaagggggtggaccctggttttcggcgctaccgctaagcgcagctagcgacgcctttggttctactgatgcagaccaatgtgctgtcaaca

SEQ ID NO: 46689 - DNA, 745 bp, Zea mays
  Clone ID: MRT4577_142590C.1
ggaccctcgaggccggccgggccgggactcgatcgatcaccatctgtatgtggacaacaaatatatattgttgtttgtgcatgctatagataatagatcctttgttcgttgctcacttgaaactttgtcgtcttgcttggtgctcgataccatgtcgtcaaggatggcagcggtggcgatggctgcgttcctgttctgcgctctctttgcttggacgtcgtcggaagcggcacgcatggggcggacgggtgatgaggtcgttgttgttgccgccgctagagctgtcaatcgaggtggcagaggaagcggcggcaatgtggtctactgggagaggcaacgacagcagcgcggactcatcgtcggcggccgtcggccgaggctcgcgtcgttcacgccacgtgacgacggtgctggcgaggttggcggctacaagagagaggtgccctccggcccggaccctaaacaccacggcgacccgccacccacgtcggctgctccgacgacgagcccatagaaaggaagtaagacgagggagtaatgacgtggacgtgcatgtgcaggcgttgtagaaggcgtaggagtaataatgtacgcgcgcgcgcgtacgtacatgctgtgttgttgggtccttatttgcatgttggcttgtaccgtgtgcaatgtttcttgtattcgttcaaccggtagcttgaacgagttgaaatagtttctcctcatatatttatataaaaaggtgcctggtgcc

SEQ ID NO: 46690 - DNA, 356 bp, Zea mays
  unsure (1)..(356): unsure at all n locations
  Clone ID: MRT4577_142591C.1
tgcacaggggngcagaccgcaacggaggccggggcacctatggctgcgacggggccgggcaaccttaccaacacacttgccaagaagaacggcgagagctgagagggccagcgcgccgaggccccaaggcatagggcaccgttagcggtaccaaggacaccgctcacaccaaaggataagccaacgacgcggaggcgggcgacaacacgcccaaaggcaggaacctaacaggcaacgccaagaacggccatgctggtataccacgccgaggcgggctactactccatgcaagacactcaaggacaacatgggcaaggccaccacgctggccaccaccaacagagtgataaaggagt

SEQ ID NO: 46691 - DNA, 312 bp, Zea mays
  unsure (1)..(312): unsure at all n locations
  Clone ID: MRT4577_142592C.1
gcaatancgacggcaagaccatggacgacatgcttgggcggttcaaagcgccggcctggcttagacctctccacatcgccgccatccgttgacggaccctcgcctatctaagcgtgagcctgtgcgggccgaaggaccaccaccgctacggctcatgggccacggcgactggcccgacctacggactcggccggatcatggtcaatggagcttgcgcgaaggggcctcaaactagacctgcgagacctcgacgccaacaacctcaaggagacctccgaggccatcaagctcagtcaccccggtgaagaaaag

SEQ ID NO: 46692 - DNA, 308 bp, Zea mays
  Clone ID: MRT4577_142593C.1
gagcttctagtcggcggccgccctctttttttttttttttttattgagcaacttctgtttattaccctagtacatttttttattcaaaggacgagcgaggtttaacaaagaaccagctaacccctcacacaagagaccctaaacacaaagatcggtagagagtttccgccccacgccatttaaccatcgctcacggaaacacgagctggtggctatgatggccacatatggttgggttttcttgctgacgagcgcatcagcaatggaactagacaccgtatgtgggaacgccccaaccttgcattgtg

SEQ ID NO: 46693 - DNA, 405 bp, Zea mays
  Clone ID: MRT4577_142594C.1
gaaatgcgggtgcacgcttattgattccactaaacatttgagttatacacatgaacgggatcatgcttagagtgcggatacatagactaactcgctgaacggacgatgaacggccagagtggtttatctttgagcctacagtgcaagtgctagtgcaagaggctcacggaatgaggagatggctgaagaactgctggacggacttgtacaacaacacttttgcaaaccgggcgttgtccgagccacaggccaactagttgtcatgaggaacaccgctgtgcagagccttgaacataaccaaccgctgtgctgccgtctcatggaaaaagggcggcagcgggttcttggagagcgtcaccctgcacatgtgcacatgaccgggcggccagattccatgctagttcg

SEQ ID NO: 46694 - DNA, 568 bp, Zea mays
  Clone ID: MRT4577_142595C.1
gttttcctgggggcaggcactggcacctgtgcatacgtaaggacctgctgagagcttatgccgacggtctccaaaaaggtagctatggaactgactacagggctgtactaccagacgcgctctactgaggcagtcaacgaggctaaaggtatgtctgggcacggaagtaaagaatttgagcagcccatggagctcatctggagggtacgcaaacatgcaagacattgcgcctatcctggcttactactactcaaccgatgagaagcttgctgctcatgagtatatgggtagaggcatactatcaactctgttgcctggcttcaaaggcgtgtgtgagatagcaccccattaacatcgctaacacatggctgacaattctcctcactacagcactcgggctttagctcatccattcaacaaggcgggtccaggctcgcacacagcaacatcaagtcaaccaacgttctgctcgacagagaccacaacccatacgtcatacactacggactgagctagttgactagccttgcgatcaccacttcccgagctgactctggcctaccgactc

SEQ ID NO: 46695 - DNA, 401 bp, Zea mays
  unsure (1)..(401): unsure at all n locations
  Clone ID: MRT4577_142596C.1
cggcggcgaggtctatggcgtcgacggtggggtacctggcgcggcgggcggcgcagaaggagcgggtgctcttgttttaccgcagtgtgttcaaggacacgtttaactgggccgttcaccgtcactttttttatattgacgcttcttatttttgttttatgtttttggttttcctacacgngganaaccnggacgnggncganaggcncaacgacgangcggaggcncagnacaggaacnnccagcaccccgancccaacanngnnccangggcaccaggcggcacnaaanncacaagaaaccccccnccaccncaagggaacgagaacaacaacaannanggcaaggaggaccagnaaacaagagnccngcaagcgggggcagaacnnncacagnnccaa

SEQ ID NO: 46696 - DNA, 350 bp, Zea mays
  Clone ID: MRT4577_142597C.1
cagatgaatggaaagcaaacaatctaggatcgcggaagccgaagtatcgcagtagccgagccagcgttgatgaagtaggctgattattagagatggtgagagatagggcgctggtggacagcgagcgcgtcgagaaagtctcctgcacgcgcgcggaagccaacgatgcaggacccggcaggcgcttccaactcgaagggatctccctcggtcaccccgcgcgttctgtaggtcttcacattggtgacaaatgtgagcgagctgatgaccttggtcggcaggcccgcgtatgcgcccatcgtcccggagacgctgaccaggaactcgtaaggctccagctgaaggacctt

SEQ ID NO: 46697 - DNA, 367 bp, Zea mays
  Clone ID: MRT4577_142598C.1
aaaaaaaatttattttataaaaaataaggtttttagaaataaaaaatataaaaaatataaaaaaaatttaaaataaaaaaaaataaaaaaaaaaaaaaaaaaaaaaagggggcggccccctctaaaaatatcaaatcttacgtcccctggacctggaattttttatttttttttttgggaaacctaatttaaatttcttggcctcgtttttaaatggctgtaatggggaaaaccccgcagttccccaccttactcgccttgaaaaaaatacccctttaccaatttggtaatataagaaaaaagccccaacaaattccccttacaaaaaattgcccactctaaataaaaaatagaaccccccccttta

SEQ ID NO: 46698 - DNA, 201 bp, Zea mays
  Clone ID: MRT4577_142599C.1
tttagtttttttttatatattggtggggttaggtggggaaaaaacctatagcgtttcaactataatgagggatcaggaaccattccacgtgtcaatacctacatgaacaacatttcctttacaagcagggtttgcatggatcttattctaaagctaaaagttacaaagttaacatttggctagtagaaaaagagtaacaaa

SEQ ID NO: 46699 - DNA, 307 bp, Zea mays
  unsure (1)..(307): unsure at all n locations
  Clone ID: MRT4577_14259C.1
cttaatgatgccaggatatgccgcaatgatacaggctactagcaagaaacggatggctacactgtgcttgcatgaagagcctagctttatcccccacctccaagccagtagttagtaggaggctgactcgcggaagcatcctcttttcctccgctcttcttcaaggctgaaatgatttcaacctttgaatgtgacacctttaaaagtgtggtagatgcgacaaacaatctgcttgaatcagtctgatcctcatcctttaattatttccgttatttgataatggacanggcgcatttcgcaacacttg

SEQ ID NO: 46700 - DNA, 423 bp, Zea mays
  Clone ID: MRT4577_1425C.1
gtgcgcagtctgctgcaactgcaagatccatggccgcttccaactccagcgcgcttctccccgtgttggccctcgccggcgtggtcttcttccttgtcgcccccgccgtcgtcgccgaggcaaccgcgccgcagggcctggagttccacgtcggcggcccgcgcgggtggcgcgtccctgacgccaacaccagctacggctggtgggccatgaacaaccgattccgcgtcggcgaccacctctacttcaagtacgccaacgactcggtgctcctggtggaccgcaccgccttcgacgcctgcaacaccacggagccgctcgcgaccttcgccgacggcgccaccaagttcgttctcgaccgcccgggcttcttctgcttcatcagcggcaagccgggacactgcgaggaaggacagaggctca

SEQ ID NO: 46701 - DNA, 387 bp, Zea mays
  Clone ID: MRT4577_142600C.1
cgcccggtacacgcgcaacgagacgtacgcccagtgggccgaaaagacgttccagtggctctgggacgtgcagtacattgaccacgaggactggcgagtctacgacggcgcccacatccagagcaactgcaccgatatccacaaggcccagttcagctacaacgccggcctgctgctgcacggcgccgccttcatgtacaattacaccgagtcggacgtgtggaagtcgcgcatcgacaacctcatcattggcatgaagcgggactttttcgagctcaacattgcctacaagcttccttgcgagggccgacacggcgcctgcagcgccgacatgttgagcttcaagggctatgtgcatcgctggctgtcggtcgtcacacaactcgc

SEQ ID NO: 46702 - DNA, 344 bp, Zea mays
  Clone ID: MRT4577_142601C.1
ggagctgtgcactccggggtgacctagacctttaatgggagacaaccagacctctggaccggtggcacgaagctgcttgggacagtataactctgaggcagaaagaatgtcctggttttcaaaaggagggtgcggctctctccaatttgtaacttactgaatgtatccaaacaaagaaagtctgacgaatggcttctttctaccaaccgtaaaactaagaccactacttcacagagggtcacataccaagagatgctggtctttgcatgttcctgtaccacctctcctttatgggggacgggaaatattctattcaaagacactcctacttgtttgcttgaata

SEQ ID NO: 46703 - DNA, 697 bp, Zea mays
  unsure (1)..(697): unsure at all n locations
  Clone ID: MRT4577_142602C.1
gcatagggagcgatttcttttcactgagcattagtgtttctgagagtcaaaggggcagcagcatttacaatctggcttcttgcgtgacatgggcatcttgttatgcttttcatggaatcaatcaccagagttgaatcagaatccccagaaaaacacatccacacagacacttgacaacatcttgaaaaaatgcagaaggtttcgtagggcagcaaggcaggaagtagccaagccacaagctgtacatcgtgttaagtctcaaaacgcaccaggtgcgtccctcatgctgatattcaagctgtttctcattgttcttcgaccgactcccatattgcccttggtcatcatggcaacaaattctccatagtcaatgcggccatcctctgcgtagggtgcttgctagggagagccgctgcaacactaacggctgccctgtagccgccatgcagctacaggcgaagaggagggggcgtcccgcggtatccgttgcggacagcctaaggctgcactgcacctacgtgggccaacgaccactgccactacttacccgtgtagggccgcatcgttaccacttaggngctaagtttgttggcaagggaagacaaacctagggagagaaaccctcattaaataactaaatatcttattcaagtgatacttgttggaattgctactcgggaaaatgacaggatccccg

SEQ ID NO: 46704 - DNA, 237 bp, Zea mays
  Clone ID: MRT4577_142603C.1
caagctcgtgagagcagaggaactctctttcctcatactccaaagcagcaagaccatctggcaaagctgcgctagacgccagcatcaggccataataggccagagagcagacgaggcatggcgacgtccgtggcctgcggcttcttcttcttcgatgcggcggagcgtggcgcgaggttgggccgcggcggcagcggcaagcgctggacgcctgtcagctctgctccaagccgctgg

SEQ ID NO: 46705 - DNA, 212 bp, Zea mays
  Clone ID: MRT4577_142604C.1
aaaaaaaaaaaaaaaacaaattaaaaatttaacaaaaaaaaaacaaaaaaacggaaaaaggtaaaaagaaggcggtgctcccggttcctcccttcctgtgatctccttccctagtcttcacccctatatcccttgacatctgactgcctaacttacctacgtggctcaccttactcacattgaaaaccacggtgacacttccctatccaaac

SEQ ID NO: 46706 - DNA, 982 bp, Zea mays
  Clone ID: MRT4577_142605C.1
cgggaggtttgtctccccttgccaaacttagccctaagtggtaacgatgcggccctacacgggtagtagtggcagtggtcgttggcccacgtaggtgcagtgcagccttaggctgtccgcaacggataccgcgggacgccccctcctcttcgcctgtagctgcatggcggctacagggcagccgttagtgttgcagcggctctccctagcaagcaccctacgcagaggtaagactctctttccccctcgttctggcttgtgcctctctctccctctaaacactgttcacgtgggcccactttcaattgttagtagataaaaaatttatagtagatgaaaagtatgtataaaaaatgatattttatagtgtagtgagatatagggggagtatttaggggaaaccgctgtgggagatgaaaaaaatagggggtgaaatattgatgatgtgacccaaaaaagtgatataggaggaaaaatttaggggtaacggttgcagatagccttataaggggtgaaactggagtgcgccgccgtctctcaagtctgaaccagtttgccgagagttcatacgtgccaaattttcattaatcaacggttatggttctgttagtaatgatacaaagtcaatgccatcaacatgtgtagtctaaccttgctccttatttttgccaggatggccgcattgactatggagaatttgttgccatgatgaccaagggcaatatgggagtcggtcgaagaacaatgagaaacagcttgaatatcagcatgagggacgcacctggtgcgttctgagacttaacacgatgtacagcttgttgcttggctacttcctgccttgctgccctacgaaaccgtctgcattttttcaagatgttgtcaagtgtctgtgtggatgtgtttttctggggattctgattgaactcttgtgattgattccatgaaatgcataacaagatgtccatgtcacgcatgaagccgt

SEQ ID NO: 46707 - DNA, 632 bp, Zea mays
  Clone ID: MRT4577_142606C.1
cccctctcgagtttttttttttttttttttttttttttttttttttttttttttttttttttttttgggttttttttttttttttttttttttttttttttttttttttggggcccgaaactttttttttttttcggggggtcaatccccaaacttaactccaaaagggcaaaacaaccactttgggggccaaaactgcaactttaaaataggggttttaaaacttttaaggcgaactggtaaattgaaaacttgtcctcaggggaaaacaccccccccacctggttccccccaaatttccccccatgcatccctgtttttgttttggttgacccctccacatttgctttttccaaaaacacctttccaacaccagaaacaggaaccccgttggggtcaggccggggaattgcaactttcaccaagttcccatatttggggccttcctccctcatgtcccccacaagggcaaaatattcctaaaaatttttaaggtaattttttggcactacctggggcaggcatacaacttttgttggcagggcccctccaacttggtttacaaatttctgcttttgcccctgctgttgggcttgaaaaaggatgcttttttgttttggcctaggctgaaa

SEQ ID NO: 46708 - DNA, 324 bp, Zea mays
  Clone ID: MRT4577_142607C.1
ggatagattaagttaaacaaaacttattttttttgtcgaatcaacccaacgaattatttttagtggggggaaaaaaaggaaaaaaaaaaaaaatatttgaatttattgggggggggttttctctcgtgtattcaaatggctggggtgggggagggagctttccgttatcacctttgggacgaaatgaaacacagggcgcccccaggggcggatcttaagatccggcccgggcgggactagacattacaatgccctccgtggaaacctttttaatcggaacggaccttccggaacagacaagcgagaagaattaagagtgatttt

SEQ ID NO: 46709 - DNA, 1328 bp, Zea mays
  unsure (1)..(1328): unsure at all n locations
  Clone ID: MRT4577_142608C.1
cccgtgcgctccaccgcccatctctcctcgctacggcggcggcgctgctgctgctcattctccctccatcagcagcagcagcagtgccggcgcctgctctcttcatcttcggagactccctcgtggatgcgggcaacaacgactacctcgtgaccctttccaaggccaacggaccaccgtacggcatcgacttcgaatcctccggcggcaacggcaagccgacgggaaggttcacgaacgggatgaccatcgcagatatcatgggtgagtccctggggcagaaatctctcgctccacccttcctggctccgaactcgagtgctgcgatcaccagcagcgggatcaactatggctctggttcttctggcatatttgacgataccggttccttctatatcggaaggattccgctagggcagcaagtcagctacttcgcaaacaccaggtcacagatgctggagaccatggacgaggtaagccgtanngccgatttcttcagcaaggctctctttgttatagtagcagggtccaacgacatcttggagtttctttcgccgtcagtaccgttcctcggacgagagaagcctgatgacccatcgcacttccaggacgcactggtttccaacctgactttctatctcaaggagctgagtgagctgggggctaggaagttcgtcgtgtccgacgtcgggctctcggctgtataccctacgtccgtgctctggagttcatgcccgcggggcagtgctcggcgtcggcgaatcgagtcaccgaaggctacaacaggaagctgaggaggatggtggagaagatgaaccgggagatgggtccggagagcaaattcgtgtacacggacacgtacaggatcgttatggcgatcattcagaaccaccgccaatatggtttcgacgacgcgctggacccgtgctgcggcggcagcttccctttgcctccgttcctctgcattggagccgtcgccaatcgctccagctcgacgctgtgcagcgaccgctccaagtacgtgttctgggatgcgttccacccgaccgaagccgccaacctcatcgtcgccggcaaactcctcgacggcgacgcggctgccgcctggcctatcaatgtccgcgaactgtcccagtacgagcacaaatgattgatgtcgacgacgcgcgcgatgtgaaggccggctgaacgattcattggttttgtgtccttgctgtagtttcgtctgccttgttggggttttctaggctaggcttttatttgcttcaatttcgtatggttgactaggactgcgtgcaaattggtcaatttattccatgttggcgggg

SEQ ID NO: 46710 - DNA, 642 bp, Zea mays
  unsure (1)..(642): unsure at all n locations
  Clone ID: MRT4577_142609C.1
actcctaagggcgattgggatcatcgaggccggccggcatctactatacggttgaggtgagggggggaaagaagagtgggcatgtgggcttctttcatttacatggaagatgcctatataatatggctgtccatacttatctttccccaattgcctgcataaatcttcatcctgcacatttgcatgtatttaactgagctaatcaagctgaggtcccgttttccacgagataaaaactgtgaacaagtcatatcagttttttgttataaaaatacacaataaaacctgaaatgcagagcttcatatcagtttgtgctttggctttgcaatactgcccatgcatatgccattcaagttccacccagaaacagctgccattatcctgtaatcttgatcctattccctttctctgttattgtcattgtttgatagacctgttgcacttgattattcataaatttaagttgtcatgagtcatgaccagatgagtcagatcatctgatgagtcagataagtcttagcttgtaatatgattaaacacgaacagttcattattagacttgccacacattttatatggccgtgatatttctcacgagactcgncatcttgcagataccccatgctgacaatggtcaagaa

SEQ ID NO: 46711 - DNA, 439 bp, Zea mays
  Clone ID: MRT4577_14260C.1
acaaaactctagactaagtcgtattaccaagaccaggggcagtcggggcgcctgagaacgaggccaccgtcgccgactcgatagtgtgatccacgcaccagccatcgtggcgcgcgtttgactgctataggtacaagtaggatatcaaggcagaaataatgcaggaccctcttctgccgtgcaatcctttagtttttgcaaggagagggaggggataatgcatagatggacaattgctacctggcaccatttttcagcatatgtatagaaaggagctacccatttgaaactgaaagtcgtaggcattgtttaattaagtgcgctagaaataccccagccgcattcagctctttttatatatatgctaacaccgtaatctaatgtttaaacgctatccggttcattggctacaactgtcaatgatatgtaccgagactta

SEQ ID NO: 46712 - DNA, 653 bp, Zea mays
  unsure (1)..(653): unsure at all n locations
  Clone ID: MRT4577_142610C.1
cattatacttggnttatttaacgtttcagggcgctaatataattaagctgtcgatcaggtgagtccctggggcagaaatctctcgctccacccttcctggctccgaactcgagtgctgcgatcaccagcagcgggatcaactatggctctggttcttctggcatatttgacgataccggttccttctatatcggaaggattccgctagggcagcaagtcagctacttcgcaaacaccaggtcacagatgctggagaccatggacgaggaagccgtagccgatttcttcagcaaggctctctttgttatagtagcagggtccaacgacatcttggagtttctttcgccgtcagtaccgttcctcggacgagagaagcctgatgacccatcgcacttccaggacgcactggtttccaacctgacattctatctcaaggtcctacgtactagctaccattaccaactttctcagcctcagtcgcagctaaacgcgtcgatctgctgaaaactttcagtcgagtgctcttacttattccgaaactgacatgcattattattccttttcctctcgatgaaggagctgagtgagctgggggctaggaagttcgtcgtgtccgacgtcgggccgctcggctgtataccctacgtccgtgc

SEQ ID NO: 46713 - DNA, 361 bp, Zea mays
  Clone ID: MRT4577_142611C.1
tatttgttcccacacttgtaagagggcgcggggggggagctactatacgggctatggagagctgaacaagcagaggatccctctgtccaacaaccaatccatcgaggagggcttgggcaagcacaacatcatctgcattgaggatcttgatcacgagatcatgactgctggcccacacttggggggggggaacaactgcctgtggccattcacgttgaaggcgccgttgggatgcctgatcaagaggaggatcccctatgcggagggcggtgatgccggtatccgggagaactacattaacgctctggtcgtcaggatgaattagggttactatcaagcttcttgatacggccctgtgctc

SEQ ID NO: 46714 - DNA, 576 bp, Zea mays
  unsure (1)..(576): unsure at all n locations
  Clone ID: MRT4577_142612C.1
ccgggccttctgcccgtgtttttcgtcctcgccgtcgcactgctcagggggccagccgcgggttacccgtggctatcgtgtggcaccagcagcagcttcgcggccaacggcacataccaggaccacttcaactgcaggagctgaagaacgagctggcgctggtggccaagctgaagcacaagaacctcgtcaggctcatcggcggctgcctggggcancaggagaggctgctcgtctacgagttcctgcccaaccggagcctcgatctcatcctattcgacacggagagtgaagagcgtggacgacgacggctggactgggcgcagaggtacaagatcatcaacggcgtcgcccgggggctgcagtacctccacgaggactcccagctcaagggggtgcaccgcgacctcaaggccagcaacgtcctgctagacgagaacatgaaccccaagatctcggacttcggcctggccaggatctttggccggggccagacgcaggccgtcacccgccgcgtcgtcggcacctacgggtacatggcgcncggatacatgatgcgggggaactactccgtca

SEQ ID NO: 46715 - DNA, 2006 bp, Zea mays
  Clone ID: MRT4577_142613C.1
cttttggaacctcgagccggccgggatacacaagcacgatggctcacaaccttctgcccgtgaccgtcgtcctcgccgtcgcactgctcatggccccagccgcgggttacccgtggctatcgtgtggcaccagcagcagcttcgcggccaacggcacataccaggaccacttcaacttcgccgccgccaccctgcccaagaacgcctcgacatcccctgacctttttgccagcatagtcgtcggcaccgtgccggagcagctctcagccatggccctttgccgcggcgacgtcaacagcacgacatgcttcagctgcctgaccgaggccttcggagacctgcccagcgcctgctccaacgacaaggctgccaccatctactacgatccctgcatggtccactactccgacgtgcacaccctccccgacgacgacgacaccggcccgtcgatcgacacgtaccccatcggcgacaaccagtacgtgaccgccgaccccggccagttcatacgcctgctggccgcgctcgtgaacgccaccgccgactacgccgcgtacaactccacgcggcggttcgcgactggccaggctgacaccggcttcgacccggagttcccagagctctacgctctggctcagtgcacgccggaccagacgccggcgcagtgccacaagtgcctcgccgggctcatatcacagtcgctaggcgggttccagaaccgtgacggggccaggatgctcgcggtcagctgcacctacaggtacgagaccaagcccttctataacgggccggcgatggtgcggctggcctcaccaagctctggagcgccggcgccggcgcccgctgtgaactctcgggttcgtgcggcggatggagggaggcgaaagtaccatgtgccctgggtggcgattgcaattgtgctgccagctctagcagccatgaaccttgtcgcctgcctctgcttgcggacgcggcggcggctactgatcgcacaggccaaacaccagaatcccatgtactccactgaagcagaggacaccgaaatggtggactccatgatgatggacgtctccgccctacgggccgccacgggggatttcgacgagagcaacaagctcggcgaaggcggctttggcgccgtgtacaagggtgtcctcccggatggcgaggagatagcggtgaagcgtctgtccagtagctcgtcgcagggggtgcaggagctgaagaacgagctggcgctggtggccaagctgaagcacaagaacctcgtcaggctcatcggcgtctgcctggggcagcaggagaggctgctcgtctacgagttcctgcccaaccggagcctcgatctcatcctattcgacacggagagtgaagagcgtggacgacgacggctggactgggcgcagaggtacaagatcatcaacggcgtcgcccgggggctgcagtacctccacgaggactcccagctcaagcgggtacatggcgccggagtacatgatgcgggggaactactccgtcaggtcggacgcgttcagcttcggcgtcatggtgctggagatcgtgacggggaggaagaacagcgacgatggctgcaacctcttggccacagtatggacgcactgggaggccgggacggtggcgcagctggtggaaccgagcagtatgggcggcagcttcccggagggcgacgtgctgcggtgcgtccacatcggcctgctgtgcgtccaggcagaccccgcggcgcggccggtgatgtcgtcggtcgtcatgatgctcggcagcgacaccgtcaccctccaggctccatccaagccggggttcttcgtcaggaacaacagcgccaacgcagccgcgtcgacggtgtcactggatcgttagctagccagcaggccatgggatcgagcccagaaattgggaacatatatttgtaccgttaccctgttaccgaaatgtatgacagcagctaataagcagctagcgtaagctacaaagattagattttgcac

SEQ ID NO: 46716 - DNA, 795 bp, Zea mays
  unsure (1)..(795): unsure at all n locations
  Clone ID: MRT4577_142614C.1
ggtcgaagaatgcactcctgggcggacatctgcatcagcacctcggccgcgccgaccttcttcccggacactacttcgagacggaagacggggacgggaggaccagggccttcaacctcgtcgacggaggcctcgccgctaacaatccaacactgtgcgccatgggccaggtgtccaaggacatcatcctcggggacgacgacttcttcccggtgaagccggcggactacggcaagttcatggtcatctccgttggctgtgggtcgaaccgggaccgcaggtacagcgccaaggccgccgccaagtggggcatcttcaactggctcatcaaggacggcacggctcccatcatcgacatgttcaactccgccagcgccgacatggtcgacatccacctctgcgtcctcttcagggccctccattccagcgaaaactacctgcgcattcagtatgatcaactgacgggcagcgcgggctccatcgacgactgctccaaggagaacatggataagctggtgcagatcgggaaggaccttctcagccagaacgtctcccgggtggacctagagactggcaagaacaaggacgttcccagcgcgggcacaaacgccgagcagctcgccaagttcgcgaagcagctctctgacgagcgacgccggcgccagaagctttcaaagtagcgtactgaaaagaaaaaaaaagaacncngattttataacgacgcttcaaaactgccgntcatgcatagggcattggtctgaacattctcgagctgcttgcacttcatgctctgga

SEQ ID NO: 46717 - DNA, 728 bp, Zea mays
  unsure (1)..(728): unsure at all n locations
  Clone ID: MRT4577_142615C.1
agctcggcgaaggcggctttggcgccgtgtacaagggtgtcctcccggatggcgaggagatagcggtgaagcgtctgtccagtagctcgtcgcagggggtgcaggagctgaagaacgagctggcgctggtggccaagctgaagcacaggaacctcgtcaggctcatcggcgtctgcctggggcagcaggagaggctgctcgtctacgagttcctgcccaaccggagcctcgacctcatcctattcgacacggagaatgaagagcgtggacgacgacggctggactgggcgcagaggtacaagatcatcaacggcgtcgcccgggggctgcagtacctccacgaggactcccagctcaaggtggtgcaccgcgacctcaaggccagcaacgtcctgctagacgagaacatgaaccccaagatctcggacttcggcctggccaggatctttggccggggccagacgcaggccgtcacccgccgcgtcgtcggcacctagtcagtgctgaagaacacagcagcctcaatcaatcaactgcttcattcatgcaagtccagtgttcgtgactatctgatcgaataaccgcacgagcttttgcttggntatttcgtcgttcttcatttttcagtgggtacatggcgccggagtacatgatgcgggggaactactccgtcaggtcggacgcgttcagcttcngcgtcatggtgctggagatcgtgacgggtcgga

SEQ ID NO: 46718 - DNA, 293 bp, Zea mays
  unsure (1)..(293): unsure at all n locations
  Clone ID: MRT4577_142616C.1
ggtaccggcgcccttccgcggatttttttttttttttttttttttttttttttttttttttaggctatccaaataaatacttctcaaaggctcttgacttttgatataaacccatgggtttgacttttgagatggcataacaacaaataaaaaccattgccaggcaagcttacgtgctggtctggcggtaaaatatattcagaactagacaccaaaaaaaaaacactgtaaatgccgggctgcgttgtggatcaacttgaatgttnatggctattnnaatttnaagcatgcct

SEQ ID NO: 46719 - DNA, 541 bp, Zea mays
  unsure (1)..(541): unsure at all n locations
  Clone ID: MRT4577_142617C.1
ccggccggggcaacccttgcctctaagatcgccagctgtgtggacaggcacgcgcacatcccggtacgctgcagtccgcactccactctggaccgtatcttgctactccgaactaggtccncgctgcgcacgtacgcgtcatagccgattggtcagagcgagaagcgacgcagcgacgccggcgtcacattgcgaacgggagtactgacatccggacgtccgagggagaatggcggaccactgagcatcgtgaatccatgtgtgcgaggaccataaagaaggaggcgcagaggcagcatgaaggactccagaacgattacacgcaacaccggagagacacctggtgcacgactcagaaggcaccctatgcggccacgtcttctgcatggccatgcctatacacagcggatggacatgcacgcgcactacaaggactgacgcgagggaatgcctgcagcgaggaagataagctagcgagtatgtacggacgcgatggagaatacaactgactggtacacacgcaaaacagcccatgtacaaa

SEQ ID NO: 46720 - DNA, 700 bp, Zea mays
  Clone ID: MRT4577_142618C.1
ccggccgggctggttattagatggcgagatggaggggggagacttgcaagtcaacgtgctccgtctcaaatgagcagagcttccagatctaggtagccccggcctcttggtcgcaaatgctcgtcgaaggagactgcacaccatgttggcctcaagcggagctctgctgcttccactcgtgccgtggcacgagcaggtttgccccccctggtctccctatcttgagcattcctttccctgtgagaaagctagtacttttttttccctaattttggggggcaaatctagttgtctggtttgttccgagccgagcaaatcgattgtcccagcaacagcaagaccgcagttccttctggagagccatcaaacaggatcactgaaatggaaaaatctgacagctcgctacaaaatgtgttagtacattttaaagggaagccaaggatggataatcttctgaatacatgagttgccatcgtccttcacctggtgaccaatggtactctcaacctcccagaagtagaattgtttgttcagtattttattatattcggtcaatactatacgtagaatgggccggtggctttaggcctatatcggtactatgcatcgaggcccaggttcagcctagatgcatatcagctagccctccctcgtcagtcgatattattgttctcagaaaaaaaaaaaaaaaaaagcggcc

SEQ ID NO: 46721 - DNA, 206 bp, Zea mays
  Clone ID: MRT4577_142619C.1
ctggaggaacgagtacgaacatcagtgcttggcgctcacaagagccatgtgagcgatcagatccagaacccggttgctgtagccccactcgttgtcataccaagacacgagcttcatgaaggaagagcctgtgaagaaagaggctgacaacattgtcgcagcacggaagcagtgaagtataccagcctgctgatcgaggccatttt

SEQ ID NO: 46722 - DNA, 335 bp, Zea mays
  Clone ID: MRT4577_14261C.1
gcaaaagaattagagtactcaataaacatcatcgaagaagtatttgacatgtttttttgacaaataaatagagactagaagaaggaagcgccctaccaggcggatgtaccagccacttatacacagaccttaattgaatattttctctataaataataggaaagtactctatacctttgcacttaattggtgcctactgtcttgctttaccatctccataagcattgtttgcaattcatcagctctttgaacaatagacactgcaaagagcttcatgcaaaagtcaactcccgtataaacagatccaatctccagtcattcaaatgtgttggaca

SEQ ID NO: 46723 - DNA, 676 bp, Zea mays
  unsure (1)..(676): unsure at all n locations
  Clone ID: MRT4577_142620C.1
gggtaccctcgggtctgccgggnaccccgcatcccacaacccccccgagctgagcttagctccactccagctccatcacagtcgtgaccagagcgcgagagctagctagagggccgtgaaaatgccgatcaataggctggtgtacacggtgtacgcgacggcggtggacccgaagaagggcagcctgggcaccatcgcccccatcgccatcggcttcatcgtgggcgccaacatcctggtgggcggcgccttcgacggcgcgtccatgaaccccgccgtgtccttcggccccgccctcgtcagctgggagtggggctaccagtgggtgtactgggtcggccccctcatcggcggcggcctcgccggcgtcatctacgagctgctcttcatctcccacacccacgagcagctcccctccaccgactactaaaagccgaagccgaccgacctaggggtgcgcagcgcagctagcgcatccagctctctctccccgctcgccgccgtttagtttctctcgtgcacgtgcatgcatcgtcgactgtctcaggccgccgctgcgccggcgccgctcgcatcgtttgcttccttggaccagcagtcgtcgccgtcaggctgaactgcttgtaaccgtgaattccggacccgtttgcttctgtaagatttgtgcatttgcctt

SEQ ID NO: 46724 - DNA, 610 bp, Zea mays
  unsure (1)..(610): unsure at all n locations
  Clone ID: MRT4577_142621C.1
gggtgacaaatgggatccttggagaatacgagtacttctattcgcgattacttgggatggcacaagggccagttcccatgggcagatgtgctgctgctccccagaactactagcaaaaatggtccacctccactgacacgaagggctcctgggtcctggaaaaagaaacatggtgtagtttttataatagtatcaggaaaagaagaatggtacagacgggccagaaaaaaaaatatcagacagggcttgggcttgatactagtagttcaaactgctccagttaagtaggcaagctgaccggcggcggcccgacgaccccggcgggcctgatcgcggcggcggtggcgcacgcgttcgcgctgttcgtggcggtgtctgtgggcgcgaacatctccggcgggcacgtgaaccctggcgtgaccttcggcgccttcgtgggcggcaacatcaccctggtccgggggctcctgtactgggtggcgcagctgctggggtccaccgtggcgtgcttcctggtccgcttctcgacgggngggcaggccacgggcaccttcgggctgacgggcgtgtccgtgtgggaagggctggtgctggagatcgtgatgacctt

SEQ ID NO: 46725 - DNA, 290 bp, Zea mays
  Clone ID: MRT4577_142622C.1
cattgggtacctcgaggccggccgggatccgaggttccaatccctgaaaaccgaacagggagaggaagaaacctgctggcttccttctcgtccccaacaggcgtccccaagactccaacttcctcgatctagccatgtcgtccgcgccgcctgcccaccagtccaagccttccccccaccgccggcagcaccacaacctcggaccgaagtcgccgccgccgccgcagtcccagcgctacgtacccaaatccgcccccgctgcggcgccaaaaccctcccccccgtcccag

SEQ ID NO: 46726 - DNA, 625 bp, Zea mays
  Clone ID: MRT4577_142623C.1
tttttttttttttaaccctaaacaaggccagtgtttaatagaagctcgcagaaatgtctttttgaaaaaaagtcaaaagcgaggaaagcgaagccttttaggtgaaatgattagtgcaaatgacagatttagacctgtcatcatgctagagggctgcagaggatgggaatccttggcagaatcagtagtaccttttattcgcgtattacttgtgatgccacaaggcccagttcccatgtgcagatgtgctgctgctcggctgctccccagaactactagcaaaaatgctccacctccactgacctgtgtcctgctggtgtccccctcgcgcaggcaagctgaccggcggcggcccgacgaccccggcgggcctgatcgcggcggcggtggcgcacgcgttcgcgctgttcgtggcggtgtcggtgggcgcgaacatctccggcgggcacgtgaacccggccgtgaccttcggcgccttcgtgggcggcaacatcaccctgttccgagggctcctgtactgggtggcgcagctgctggggtccaccgtggcgtgcttcctgctccgcttctcgacgggcgggcaggccacgggcaccttcgggctgacgggcgtgtcggtgtggga

SEQ ID NO: 46727 - DNA, 942 bp, Zea mays
  Clone ID: MRT4577_142624C.1
ggtgtccccctcgcgcaggcaagctgaccggcggcggcccgacgaccccggcgggcctgatcgcggcggcggtggcgcacgcgttcgcgctgttcgtggcggtgtcggtgggcgcgaacatctcgggcgggcacgtgaacccggccgtgaccttcggcgccttcgtgggcggcaacatcaccctgttccgggggctcctgtactgggtggcgcagctgctggggtccaccgtggcgtgcttcctgctccgcttctcgacgggcgggcaggccacgggcaccttcgggctgacgggcgtgtcggtgtgggaggcgctggtgctggagatcgtgatgaccttcgggctggtgtacacggtgtacgccacggcggtggacccgaagaagggcagcctgggcaccatcgcccccatcgccatcggcttcatcgtgggggccaacatcctggtgggcggcgccttcgacggcgcgtccatgaaccccgccgtgtccttcggccccgccctcgtcagctgggagtggggctaccagtgggtgtactgggtcggccccctcatcggcggcggcctcgccggcgtcatctacgagctgctcttcatctcccacacccacgagcagctcccctccaccgactactaaaagccgaagccgaccgacccaggggtgcgcagcgcagcgcagctagcatccagctctctctccccggcccgctcgccgccgtttagtttctctcgtgcacgtgcatgcatcgtagactgtctcaggccgccgctgcgccggcgccgctcgcatcgtttgcttttccttggaccagcagtcgtcgccgtcaggttgagctgcttgtaaccgttaattccggacccgtttgcttctgtaagatttgtgcatttgcctgtgagtaaaaaaaaaaaaaaaaagtaaaaaaaaaaaaaaaaaagcggcc

SEQ ID NO: 46728 - DNA, 353 bp, Zea mays
  Clone ID: MRT4577_142625C.1
ttgtttccaccttctggaaactataatattggggggggcttgaagggttatctgggggttcttagaagcgcctcaaacatacaagacctttctagtgagttgtaataaggcaccgtgtagggagatggtcttatttgccatagagattacttcctctcccagtccgagaagatcgtcctctatacacgatgatactgcatatgacacatctggctgcagttatactacttacagcttcactgcccgcgttcatccaggctacttacccgatgtacgcgactcctactgccatgtggctgtacagcttgttagtaaggattgaatggaaaaccacgggcgttccataatttgat

SEQ ID NO: 46729 - DNA, 531 bp, Zea mays
  Clone ID: MRT4577_142626C.1
tttttgggtcgggccccttatcggcggggggcttgccggcgttatctacgagctggtcttcatcttccacacccacgagcaggttcccttcaccgactactaaaagccgaagccgaccgacccaggggtgcgcagctagcattcagcttttttttcccgctcgccggcgatcgggtagtttctctcgtgcacgtgcatgcatcgtcgactgtctcaggccgccgctgcgccggcgccgctcgcatcgtttgcttttccttggaccagcagtcgtcgccgtcaggctgagctgtttgtaaccgtgaatccggacccgtttgcttctgtaagatttgtgcatttgcctgagtattcaccggccaaaaaaaaaaaaaaaataaaattgatagaaaaaacaccgtaaagatcaattagtgagcgactgggtcgctacacctaaaaaaactgcttcattataccacgttgtgcgacatattttaggaatccaattaaaaaatcttgccggtttccctcccgtttttaggggcggtt

SEQ ID NO: 46730 - DNA, 1067 bp, Zea mays
  Clone ID: MRT4577_142627C.1
cacacccctaagcttgagcttagcttagctccacactccagctccaagcacacagtcgtggttagagggccgtgaaaatgccgatcagcaggatcgccgtggggacccaccatgaggtgtaccaccctggcgccctcaaggcggcgttggctgagttcatctccaccctcatcttcgtcttcgccggccagggttccggcatggccttcagcaagctgacgagcggcggcgcgacgaccccctcgggcctgatcgcggcggctgtggcgcacgccttcgcgctgttcgtggcggtgtccgtgggcgccaacatctccggcggtcacgtgaaccctgccgtgaccttcggcgcgttcgtgggcggcaacatcaccctgttccgcggcctcctgtactgggtggcgcagctgctgggctcgacggtggcgtgcttcctgctccgcttctccacgggcgggctggccacgggcaccttcggcctgaccggcgtctccgtgtgggaggcggtggtgatggagatcgtgatgaccttcgggctggtgtacacggtgtacgccaccgccgttgaccccaagaagggcagcctgggcaccatcgcccccatcgccatcggcttcatcgtcggcgccaacatcctggtcggcggcgccttcaccggcgcgtccatgaaccccgccgtgtccttcggccctgccctcgtcagctgggagtggggataccagtgggtgtactgggtcggcccactcatcggcggcggcctcgctggcgtcatctacgagctgctcttcatctcccaaacccacgagcagctccccaccaccgactactaagccggccgccggcgaccccccaccaagcttgggttccgttccgtgcgcagctagcagatcatcaattctctcgatctctggatctccccctcgccgtttagtttctctcgtgcatgtgcatgcatcgtcgaacatctcaagctgctactgctgctgctgcgccggcgccgctcgatcgtcgcatcgtttgctttcttggacaagtctgtaaccgtgaattccggacccgtttgcttc

SEQ ID NO: 46731 - DNA, 265 bp, Zea mays
  Clone ID: MRT4577_142628C.1
cagctcgagcacacagatcatactcatatactgaagctctgtgaggtatataatatgaggactattgaggtacatgacgcacacgaagaccgcttactccgttcatggaaaaccgtgtccaggtagtctgattcgactgcccttgagatcttactcgggatctttgaggtcgcgccgaataccaagtagatgatgtcctacgagcgcgacgccggatacgcgacgctggagaaactctacgagctcgaggtcaacgacgtcgccg

SEQ ID NO: 46732 - DNA, 678 bp, Zea mays
  Clone ID: MRT4577_142629C.1
tgctccgcttctcgacgggcgggcaggccacgggcaccttcgggctgacgggcgtgtcggtgtgggaggcgctggtgctggagatctgatgaccttcgggctggtgtacacggtgtacgcgacggcggtggacccgaagaagggcagcctgggcaccatcgcccccattgccatcggcttcatcgtgggggccaacatcctggtgggcggcgccttcgacggcgcgtccatgaaccccgccgtgtccttcggccccgccctcgtcagctgggagtggggctaccagtgggtgtactgggtcgggcccctcatcggcggcggcctcgccggcgtcatctacgagctgctcttcatctcccacacccacgagcagctcccctccaccgactactaaaagccgaagccgaccgacccaggggtgcgcagcgcagcgcagctagcatccagctctctctcccccgctcgccgccgtttagtttctctcgtgcacgtgcatgcatcgtcgactgtctcaggccgccgctgcgccggcgccgctcgcatcgtttgcttttccttggatcagcagtcgtcgccgtcaggttgagctgcttgtaaccatgaattccggaccccgtttgcttctgtaagatttgtgcatttgcctgagtattcaccgggccgccagactccccacgt

SEQ ID NO: 46733 - DNA, 1027 bp, Zea mays
  Clone ID: MRT4577_14262C.1
gcaagttactgtggaagcaattcaaatcagaagctgagttcaccattacacaagcagtatccacacagcaagctcacaggcgtggtaatagtaagctgcctcctccttgggcaattgggccattgctattcttggtttcaatgagatcatggtgcttattaggaatcccatttatctgttcttgctatttgtgggctacttgatggtcaaagctttggcgatgcagctagatgtcagcagagaattccagaatggagtggttcctggaataatctctgtgtcggtgaagctcctaccagcgatacagaacctggtgaacaaagtggcagccgagcagcaagctgagcaccagcagcagcacccgcaccctcaccctcacactcaggccccaggacccccacagccacagatgcagccgccgccgctgctcctgagcccgagaagccccatgagcgagctgcggaggctgcacatgccgcgcagcccgcgcagcccgcgcaaggtggcgtcgccggcgccatcctcgtcgtcgtcatcgtctgccgtgtcgtcccctaggcacgttggcgaggaccagaagccaagaccaggggcagtcggggcgcctgagaacgaggccaccgtcgccgactcgatagtgtgatccacgcaccagccatcgtggcgcgcgtttgactggtataggtacaaggtatggagtatgaactatggaccttctgctgtctcctatttcaatgcatatatgtatagtgattatcgttatgcttcagtaggatatcaaggcagaaataatgcaggaccctcttctgccgtgcaatcctttagtttttgcaaggagagggaggggataatgcatagatggacaattgctacctggcaccatttttcagcatatgtatagaaaggagctacccatttgaaactgaaagtcgtaggcattgtttcttggtttcaatgagatcatgacgcttcttaggaatcccatttatgtgtttttgctatttgtgggctacttgatggtcaagct

SEQ ID NO: 46734 - DNA, 1843 bp, Zea mays
  Clone ID: MRT4577_142630C.1
tgcatgcaacacaggctcgatcggccctcgtcttgccttcaacgagcagctagttcacgccccaccaacagcttcacgacttcttcgaagctgttctttaaacatcttgtttaaaacagactctagtatctctttgagctcagcttggtctgtcatgctctagcactagcacaaggtcatggccggctcttttgagttcgacaccgaatgactgaaacgaaggggcagaaaaaaaagatgtccttttcgtcctactagctagtaccaggctttcggtaggtatttctttaatacaaggccagtgtttaatagaagctcgcagaaatgtctttttgaaaaaaagtcaaaagcgaggaaagcgaagccttttaggtgaaatgattagtgcaaatgacagatttagacctgtcatcatgctagagggctgcagaggatgggaatccttggcagaatcagtagtaccttctattcgcgtattacttgtgatgccacaaggcccagttcccatgtgcagatgtgctgctgctcggctgctccccagaactactagcaaaaatgctccacctccactgacctgtgtcctggaaaagaaacatgctgtagtttttataatagtatcaggaaaagaagaatgttacagacgggccagtaaaaaaatatcagacagtgcttgatactagtagttcaaactgctccagttaagtagctaggattagtaaacaaagaacagttacagactcaacagtggcagtaaaaaaatcacagcagtaaagcagaaggcagggaaaaagaaaataaaccctgaacatgtttttttttctacagtagttgtcagtatttgactgttttactcctacctgctggtgtccccctcgcgcaggcaagctgaccggcggcggcccgacgaccccggcgggcctgatcgcggcggcggtggcgcacgcgttcgcgctgttcgtggcggtgtcggtgggcgcgaacatctccggcgggcacgtgaacccggccgtgaccttcggcgccttcgtgggcggcaacatcaccctgttccgagggctcctgtactgggtggcgcagctgctggggtccaccgtggcgtgcttcctgctccgcttctcgacgggcgggcaggccacgggcaccttcgggctgacgggcgtgtcggtgtgggaggcgctggtgctggagatcgtgatgaccttcgggctggtgtacacggtgtacgcgacggcggtggacccgaagaagggcagcctgggcaccatcgcccccattgccatcggcttcatcgtgggggccaacatccctggtgggcggggccttcgacggcgcgtccatgaaccccgccgtgtccttcggccccgccctcgtcagctgggagtggggctaccagtgggtgtactgggtcggccccctcatcggcggcggcctcgccggcgtcatctacgagctgctcttcatctcccacacccacgagcagctcccctccaccgactactaaaagccgaagccgaccgacccaggggtgcgcagcgcagcgcagctagcatccagcgctctctccccgctcgccgccgtttagtttctctcgtgcacgtgcatgcatcgtagactgtctcaggccgccgctgcgccggcgccgctcgcatcgtttgcttccttggaccagcagtcgtcgccgtcaggctgaactgcttgtaaccgtgaattccggacccgtttgcttctgtaagatttgtgcatttgcctgagtacacctcgatctgcagcatgcgtgtgcttgaaaatctgggatgcttctgcagttctgcctccgatcgcgatgatttcgacgggggaatat

SEQ ID NO: 46735 - DNA, 1268 bp, Zea mays
  Clone ID: MRT4577_142631C.1
cattgggacctcgagccggccgggaaaaaaaactcgcgttccacccgatgaggcgataggctcggggagagctgcgagggtgtatatataccacctccatgccacatctcttcctcaccaccgcatcccacaccccccgagctgagcttagctccactccagctccaatcacagtcgtgaccagagcgcgagagctagctagagggccgtgaaaatgccgatcaataggatcgccctggggagccaccaggaggtgtaccacccgggcgccctcaaggcggcgttcgctgagttcatctccaccctcatcttcgtcttcgccggccagggctccggcatggccttcagcaagctgaccggcggcggcccgacgaccccggcgggcctgatcgcggcggcggtggcgcacgcgttcgcgctgttcgtggcggtgtcggtgggcgcgaacatctcgggcgggcacgtgaacccggccgtgaccttcggcgccttcgtgggcggcaacatcaccctgttccgggggctcctgtactgggtggcgcagctgctggggtccaccgtggcgtgcttcctgctccgcttctcgacgggcgggcaggccacgggcaccttcgggctgacgggcgtgtcggtgtgggaggcgctggtgctggagatcgtgatgaccttcgggctggtgtacacggtgtacgccacggcggtggacccgaagaagggcagcctgggcaccatcgcccccatcgccatcggcttcatcgtgggggccaacatcctggtgggcggcgccttcgacggcgcgtccatgaaccccgccgtgtccttcggccccgccctcgtcagctgggagtggggctaccagtgggtgtactgggtcggccccctcatcggcggcggcctcgccggcgtcatctacgagctgctcttcatctcccacacccacgagcagctcccctccaccgactactaaaagccgaagccgaccgacccaggggtgcgcagcgcagcgcagctagcatccagctctctctccccggcccgctcgccgccgtttagtttctctcgtgcacgtgcatgcatcgtagactgtctcaggccgccgctgcgccggcgccgctcgcatcgtttgcttttccttggaccagcagtcgtcgccgtcaggttgagctgcttgtaaccgttaattccggacccgtttgcttctgtaagatttgtgcatttgcctgtgagtattcaccggcccgccaaaaaaaaaaaaaaaaaaagcggcc

SEQ ID NO: 46736 - DNA, 237 bp, Zea mays
  Clone ID: MRT4577_142632C.1
ggcttagtccaaaatcgcaaccggcaaccctttttttttttttttttgttttttttggttaaaatatccaaaaaagcatacttaattaaggggggaacaacatgggttccaggccgaaggcaagcttcggaagcggaaggctgggggcttcctcccaacctaacccggaactccccgagatatggatagactaatcctggcaaccgggtgccgggataaaatcataaaatatatata

SEQ ID NO: 46737 - DNA, 297 bp, Zea mays
  unsure (1)..(297): unsure at all n locations
  Clone ID: MRT4577_142633C.1
aattcggcacgagggtcttccatggacaccggcgtcagtggcggcaccgtgcagccctacgtacaggagggttttccactacctgaggctggagcgctgctgcgacaacgctagacacttccagcagacggtgctcccaaaccgccaccggaaaataccattttaatagcgtgtgggggcgggggtttcctccacaaaatttcgttcttcncctctaatgcgcgtatgatcattttctccagacttaactgananncccctctcctctcaccctgcgcccctcctggctgctctgct

SEQ ID NO: 46738 - DNA, 620 bp, Zea mays
  unsure (1)..(620): unsure at all n locations
  Clone ID: MRT4577_142634C.1
ngacaactgctggttcccggtgagggggggggggggggggcgcacaagggcgagatcgggatggggttcgagcacccggggcagccgggcaaccagccgggcgggtggatggcgcggcagaagcacctcgagacatcggagagcgcgcagagcacgctgaagaagagcacgtccacgcggggggggagcacgtccaccgcgcagtacaccatgtgcgaggtgcgccgccacacgtccccggactccgcctggatcatcgtgcacgggcacatctacgactgcgcgggcttcctcaaggaccacccgggcggggccgacagcatcctcatcaacgccggcaccgactgcgccgaggagttcgacgccatccactccgacaagggccgcgggctcctcgagatgtaccgcgtgggcgagctcgttgtcaccggcagcgactactccccgcagaacagccacgccgacctcaagggcatcgtcgaggcccccgctgcagccgcgccgttaccggtgacgtcgaccgtcgcgctctccaatccgcgagagaaggtcangtgccggctcntcnataagaagagcctgtgttacaacgtgcgcctctttcgggtcgcgctgccatc

SEQ ID NO: 46739 - DNA, 312 bp, Zea mays
  Clone ID: MRT4577_142635C.1
gggcggaaaaattcagcattttccaagctggaaaagaacaaatacaaaatgtttgcacacaaagccagactacaacaggtttacgaacatacagagggacaggggaaaaatatatagtatatgagaacgacgactacccgttttttaatttgcaattccgaaaaagggcgggcatcggtttggaaagccttggacttgctccaaactggatttgggtggtggttcctgaacaatgcgggggggggggggatgattcacaagttgtgcaacgggttggagccggtcggggaaaacctcttggtgtccctgaaa

SEQ ID NO: 46740 - DNA, 390 bp, Zea mays
  Clone ID: MRT4577_142636C.1
tcccttgtgacccggcgcaaaaatatgggggcgtcttcgacgctgcgcccgacggacagactccgcaggcctccggactttcctttgtactgctgctttccggatggatgcgtgcgcggactagcttcgctatccagcgcctgtaggggtgtttgcctcttgtttcggcgcaggactgctgacggatgggcggcgctccaaacaccctcaagaggtgattgatgtgggtagtggtgaaggaactgacctacgtgaaggctgcactggtgcaagaaaagatggacacctgactgccgatcgtttctaaactcaagaactggtagaaaaactaacgaccattggaggtgctggggatcagtcatatggactacttaacactggctactatgt

SEQ ID NO: 46741 - DNA, 368 bp, Zea mays
  Clone ID: MRT4577_142637C.1
ggccgggcctgtaactccgtttcgaattctagggttttgctgctctccgaccccgagctccgaaggccgcagcatcaggcgcggcccccctcgcgtgtgaccgagatggcgctgccgaatcaggggaccgttgattaccccagcttcaagctcgtcatcgtacggcgatggtggaactggcaaaactacatttgtgaagaggcatctcactgagagagtttgacaagagatatgaaccaaaccattgcgcggggaagttcatcccgctgaatttcgccactaactgcgcctagactaggttctactgctgagatcccacacgaccacagaagtctcccgacctcttcaatgcacaatgcatccatgca

SEQ ID NO: 46742 - DNA, 443 bp, Zea mays
  Clone ID: MRT4577_142638C.1
ggccggcctggcccacagtgaaggaagagagagctctccggcagtctgctccggcttgggcgacgtgggtgccggagctcgatacctgtgggtggcttcggggcctcgggccctgcctgcggggggctgtgggcctgtgctgaccttgctcagagctgtgcggcggccttctcgccgtcggcgccgagcgccggcgcagcaccgggaaggtgatgccggacgagtacgactagcgggcctactgcctctacgacactgacgcctgcacggtgtacggcgagtgcgattggttgaggctggctggtccagcagggcattgtgaacgccggcgcggggtgcctgtggtgcggacccgtgctgtcctgccgcggctgggccgaagcggggtgcgggctgtgctggagagcatggctcgtggcagaatcttgtgtcatagggaggat

SEQ ID NO: 46743 - DNA, 292 bp, Zea mays
  Clone ID: MRT4577_142639C.1
tttttttttttttttttttttttttgcagatcttgggagtggaaaccacaagcagatgacctatgtccattctttatattatacccatttaaactagacctaaccccatgcaaatgctaatcgaaaatctaagccaagctatgcaagatcaacagagaatgacggtgatcgatccatgtacataaacatggcttggtcttgtgttggactcaccatggatcacgtggactagagccagatcaggttgaaccaggtcctcctggcttgggacgaatttacgaaggccctaagg

SEQ ID NO: 46744 - DNA, 493 bp, Zea mays
  Clone ID: MRT4577_14263C.1
gggtacctcgaggccggccgggactcttagtatagaagcgtcggagaaatctatctctggcggaggtcgtatggtcctcctgctcccgtatataaattcccctctgttgcttcctcgatgtgtactggccgtcagatgccagaagagggaagagctattcggaccttcggcccccgcttgagatacacaacttacccaagctgagttatgtggtgtggacgtcttctcgtcttagagacctccatcgcaaaaggtcttggtgtcacattgtgcactctcagccaaatcgagttttcagtgtaatgaatgtccactgttggtattcgctactgaacttcaagcccttcaatcagaacaatgcctgtcccatgtctgaagctgaagaagcgcctgatagagtacactgcacgacgttgtatccgtactccaatggaaggatactctgactccaacagagggtgaagatctcttctatgtacacacctagtctctg

SEQ ID NO: 46745 - DNA, 284 bp, Zea mays
  Clone ID: MRT4577_142640C.1
gtcaacacgcgtgcggggatatgccacaaaattctatgaacctttttacagcggatactcgaattatccatttaggccttcatacgtggtaccatgcaggagtcctctatctaaatcccaaaatagaatggttgagcatcgagtgcgagctatccgatctgaagtattcatttgtgtttcaataatgaataacaataacgttggcgttcctcagcttttgatgcttgaattatgctctctgatatgcttctctatattttctaacaaaagggcaaaacatattg

SEQ ID NO: 46746 - DNA, 1347 bp, Zea mays
  Clone ID: MRT4577_142641C.1
tccagctcatctcttcgttctgtttgtccagtatcttgcttgtcattcatattaacaatttaaaatggccaacaaattatatacttatccggaaaatttccgtgcttataaggcacttttggctgcccaatacagtggtgttcaacttgatgtcgaccgtactttcaagtatggtgtgaccaacaaaaccgaagagtttcaaagcaaattcccattgggaaaattgccattgctggaaaccgcagatggacagcgtttatttgaaagtaatgccattgctttttacttagcaaatgaacaattacgaggatctactccagctgaacaagctcaagttattcaatggactgcttttgctgataacgaattgttgccaccagtcgctactttagtgtttactgcttctaaagtaatcactcgccctgctgaagaaacagccgcatctgaaaaacaattagctacacttttggcttttgttaatactagtttgaacggtcgttcttatttggttggtgaacaagttactttggctgatttggctgtagttggaatcttaattgctttgtatcaacaagtgcaaactccagaacaacgtgccacttacgccaatttgaacaaatggttcaacaatttggtggctcaaccccaattcactgctgctttgggtgatttgaaattgaagcaagctgctgctgctgccgctgtgccagcaggtggtgacgaattcccaactgaacccaaaaagaaagatccttttgccgcttttccagctggcacattcgtaatggatgcttttaaacgcgaatattctaataaatcagaagacgaatctattgcctggttctggcaaaactttgacaaagaaaattactctatttggttctgcgagtacttgtaccctgaagaattaaaaatggtattcatgagctgcaacttgatcggagttatgatgcaacgtttggacacaatgcgcaaacatgcttttggttcaatgtgcttgtttggagaagacaatgcttctaccatttctggagtttggatttggagaggacacgaattagctttcactttaagcccagactggcaagttgattatgaaagctacaaatggacaaaattagatcctgacaatgctgaacatcgcaagactgttgatgaatatttgcgttgggatggcgaattcggaggcaagaaattcaaccaaggcaaaatctttaagtaaatttattggttttgaacatttctaatgcgtctgtaattctccatttcacttttgtactttaaaacccactgtttttacttcagatgattttttttttgattaaattatttttaattttattattt

SEQ ID NO: 46747 - DNA, 324 bp, Zea mays
  Clone ID: MRT4577_142642C.1
ctcattcgaattcccaggcaggcatgtcgttgaggagggcaggaagaccgaagaccgagccgtgcgggggctcgggacgggaacgggacaggaccccaaaatatgagattctttctgtccgaccgaccgtgcccgtcgacgcgttgttcttgccgggcgagccctacctacggcctgttttactgcagggggatcggatacgccacatgctgcgcgatggtgctttgggtttttggctaccgcttccttatatggaaccccggctttggcttctacgacaaaatcctaggttttatcaagggctacaagcgcacctttaatctc

SEQ ID NO: 46748 - DNA, 535 bp, Zea mays
  unsure (1)..(535): unsure at all n locations
  Clone ID: MRT4577_142643C.1
cagcaccaggtggaagccagactaaattatccatatgtgatggtgaatgcgcctcataatgacgatattttgggactgccttacaaagtcgcaggagtcctctcatcaaaatcctccgctcctacttgaaaccttgcagatgatggtgaaattggaaaaatccccttgggtcatgtaccccgtactggcctggtgagacataggcagggctccaaggagaatccatctctccatacctctgactatgtgttggacgagggacattcaaatgtctcaagccagcaaaatcaggaattcctgaatcattgcctccaatgccaaaaagctgctccacagacacaggggaggaaggtgacttaacatcaccaaggctgttaagcgcatctacataccttctctctgtttcccgctcgtctacattgnaatgcacatccactgatgcagcatcatcatccaaatgctgagaaaataagaagatcctgagccgagtgaacgcctcccctgtcgcaatgaccttggcatactcctccatcat

SEQ ID NO: 46749 - DNA, 202 bp, Zea mays
  Clone ID: MRT4577_142644C.1
attatctacttcatatctagtgcgcctggagcttatgtcttatggtatcgacctctttataatgcaattagaactgagaaccactttgaaatttcccgtggtttttcctattttacatcattcatataatattctctgttcggcagctttggctcctccattccctttcaaaagaaaatcttttacttgattttaccaacaa

SEQ ID NO: 46750 - DNA, 255 bp, Zea mays
  Clone ID: MRT4577_142645C.1
gccggccggttcgtgagatctcagtcttccactcctcgccatccataaaaccagtgcaagcggaagcagcgcaatggcgagcagcaccatggccctctcctccacagccttcgccggaaagggagtgaacgtgccgtcgtctctcttcggcgaggtccgcgtgacgatgcgcaagacggcggcgaaggcaaagccggcggtgagctccggcagtccgtggcagggccccgaccgcgtggtctacctgggcccgct

SEQ ID NO: 46751 - DNA, 757 bp, Zea mays
  unsure (1)..(757): unsure at all n locations
  Clone ID: MRT4577_142646C.1
ccggggatggtgtcagtactgctcgctttggtgcatatgcccaaggaaattctacctacctacataatgcactccctaattctagtcattatagttggagatcgcaaaggggatctggcagtggtttacctttggacccttcttctagccgtggttcttttccacccaccaattactatggctttcctttacactccgatgcgtcagcagatacattgccctccacctcatcagtatcagatccagccgattgggatctcaactctagtgacaagtcgctcctgcaagaggaccgaacactgtcagctgggttaagtgatcttcgcttgatagacgcaagtggccaaacaaacagatctagcagattggctcctttccaaagtcatgatattttaagttcaaacccttcgactatgaatcaaaggagggaggggtggccattcgtttgcagcgagcggactgccacctacacttaggaaagattttgggagaatcttttagtcctgaatccggaggaatgccgaatgccaccaaattgatggcatcagttgtttgcatctgcaattccgggttggattatttgctgggggtgcctactggtattgcaatttgttgtgttcctccgatgtctcccgggatgttcggttcaaatgattatatggtacgggatatgattacagtgctcgttctttgctatacctgcacgatctagtagaaaaatgtcagntgtgctacttgatgcgaatcttgctagttc

SEQ ID NO: 46752 - DNA, 321 bp, Zea mays
  Clone ID: MRT4577_142647C.1
ttcaaaagcatttcaccaaaaaaaaataatctctaggcatggaacctatgcccagtggcaaaattgtacatcacaaattcattattttgaatactccttaacagctcatatttaaatataaaaaagggtaatggtactcctgcaactgaagcccagatgggtaaggatgttgtatcattcccttcatgggcagcttgagctcttagatggttttagattaatgttgttctttatgatttaattttatttatctatttttttcttaatctcccttttttatgttttatatttatctcctttatttatgttttttaattcatt

SEQ ID NO: 46753 - DNA, 2478 bp, Zea mays
  Clone ID: MRT4577_142648C.1
aaacatccttatagctcctaactgtaaaaacgcagttggaggtgaagtaattgattttggatcagtgtgcatggagggtaaaaccatttattcatatattcagagccgttattacaggtctccagaagtacttcttggttatccatatactactgccattgatatgtggtcattcggttgcatcgttgctgagctatatatagggctgcctttatttcctggtgcatcagaatatgatgttctttgccgtatgattgagattattggtgggcaaccaccagatgatctgctacgtgaggctaaaaacactgggaaattttttaagcatgttggaagtatctatcctagtagtgaggctcggaatggcgctagcagtgcatacagaattttaagtgaagatgagatcgaagcaagggactccaagaaaccgaaggttgggagatggtatttccctcgtggaaggcttgacagactcatatatacatacccctggaagaatttgagcgagggaaacttgccagagacagaaaaggctgattgcttggccgggtattagtttgtttctatgggacttgttgaatttgtatcttgaagaatcattatatgttcttcacaaatgtgaaaacctattttaggcctcgtatcatccattcatcactggtgaagccttcactggtccttacgagcctgttcaggagaccccacgaattcctgttggacgtgctgcagtagttgaccacaatccaggaggaggtcacttgctgggtgctggtctttctcctcaggttggaagcattaacagatgcttacgatttaacaacgctttgcaaccaaatatgcctttttcatatggaagcagttgtggcagttttgggagccatggtagctttaacgataatgctggctttagctatggaagctatgattttaacagtgtcgacatatataattcaccaatggatccttctgggtttaatttacgttcacaacttggaggatcgtttctcggatctagcccacatattcgacgaagacctcatctctcacatggtgggtggcattcggttaagccctggtggtccagggcatatgtctcttggggccagtccatcacaatttacaccgccaaattcccagatgcaaatcccaacaggtcctaatggaaggtatggtgcctctccttcaagaggtggacatggctcttcgttgggaaaggttgctgttgtaggccaatacaataggaggaggaatcagggttatccacctatgccaatgccaccacatgaacacacatctcaactgatccaggggcaccaaggagatggtgtcagtactgctcgctttggtgcatatgcccaaggaaattctacctacctacataatgcactccctaattctagtcattatagttggagatcgcaaaggggatctggcagtggtttacctttggacccttcttctagccgtggttcttttccacccaccaattactatggctttcctttacactccgatgcgtcagcagatacattgccctccacctcatcagtatcagatccagccgattgggatctcaactctagtgacaagtcactcctgcaagaggaccgaacactgtcagctgggttaagtgatcttcgcttgatagacgcaagtggccaaacaaacagatctagcagattggctcctttccaaagtcatgatattttaagttcaaacccttcgactatgaatcaaagaaatggacacctatttcatgcatcatctctgggagagagtacacatactccaggtcatgtcacattggatggatacgaacacacaacttattctcagcgaagtttcccaatctatcgtgggcaaccatttcagcagtacaacaacatgacttccagttacatccgaccgatgagggctcatcacaatggtcagcctgtctggtctaattataggctgacagaacctccaccaactacaatgggtgacggaatgctctggggagggaggggtggccattcgtttgcagcgagcggactgccacctacacttaggaaagattttgggagaatcttttagtcctgaatccggaggaatgccgaatgccaccaaattgatggcatcagttgtttgcatctgcaattccgggttggattatttgctgggggtgcctactggtattgcaatttgttgtgttcctccgatgtctcccaggatgttcggttcaaatgattatatggtacgggatatgattacagtgctcgttctttgctatacctgcacgatctagtagaaaaatgtcagttgtgctacttgatgcgaatcttgctagttcgaggtttgggagagtttttctgtctcggttattgtcttcctttctctattctatttttgacagagggttaagttcctgaaccttaacatggctaagactgaagtgaaggccacgtggtcgtggtgacatgatttcgttttcgtgat

SEQ ID NO: 46754 - DNA, 1175 bp, Zea mays
  Clone ID: MRT4577_142649C.1
tgacgcgtcgactcaaccgaggccaacaagtcaaaacgagtgccgggtgcgggcgcgcggggaagccctcgcagacacgggcgcgcctactcaaccgaggccaacaagtcaaggcgagtgcggagtagaggcacaaggtcggatgcctagagagatttcccggtcgcctccgccattccgccggcgaggctcccctcctctgcggtacgctagccggagaaacagacgagatcggagccgctccccttacgcctctcggcgaaaaactcgttctccttctccactatgggataggagcaactcaccaagtccaagaaggcatagaagcccactatctccaaggagacacagaagacagagaagtcggagcactacaagttcattagagaataacccatccagtccaagtcacgcatcagagaaaataaattcctctgtaaaacaaaggctggaagaagaaaagaaaaggcgtcaaaaggaagctgaatttaagttactggaagaggagcttgctagaagggtcgaagaagctataagaaaaaatgtcgaggaacgtctgaaatctgaagaggtgaaacgtgacatagaacaccgaattgaggagggtattagaaagttatttgatgaggttgacgctcagctacaaaaagagaaagaagtggccctttatgaggccaggcagaaagcagaacaagaaagaagagagagggaggagttggatagaatgctcgaagagaacaggcgtaaagtggaggaagcacaaagaaaggaagctcttgagcagcagcagaaagagttggaacgatatttggagctggaaaggatacaaaggcaaagagaggaagcgttgcgcagaaagaaaatggaggaggaagaagagagagccaacaagctgagattgctggggaaaaaccggggttgagagctgtcatctttctatacacagcggtctatgtgccgtggttgccccccatttgacttgttagttgttgccttaccagtgcgagaacttttgtttgatgtacgagcatgaaaatggtcatgtatgacatatatgaatggaacctgcagcgtattctttgagtacgttttaagacaggttatttagattcctcaatgttttgctttgccatgcttaatatatttttttaaatgccctaaaaaaaaaaccaaaa

SEQ ID NO: 46755 - DNA, 413 bp, Zea mays
  Clone ID: MRT4577_14264C.1
agctatgagcatactcccttgtggtcaaacactatgatagttttgcaactcgtcatacatgcccaccgaatggtgatcagaaagatcataaggggcctactgacgagggtacacgcatatacggcttactaccgagagaggcatcctgagggttgctagagatgtggagaagccacaagtgcaaccgctcccagagcctgagacctggcataagccagcggaacctccacagctaaatgctgctacacctggttttgggaaagcaaccacctccttggagctcgcccatgccttcttaacgtctatgtatgatactgctccacagaatcagctgaccagtgctcccaatccaagagtttcttctagcccagaggctactaacgatcagtcttgcttttctgggctcactgtca

SEQ ID NO: 46756 - DNA, 304 bp, Zea mays
  unsure (1)..(304): unsure at all n locations
  Clone ID: MRT4577_142650C.1
acgcggtgttattagttattctggagagatcaagggggtttacatgcattgcaggttttatcacaatgaancaacaccggggtaccggggctcataacctgtgacaggtttaggacaatgcctgcacataaatgactccccaggtaatgtaccgaacttattgtaagagctgtaaccatgtttcgacccaaaagcacgaaagttgtgctgagaccagaagacccacactgatgagagggatcaccttataccacccgcccattcattggagtctctacagcaaattgggaaccatccactatct

SEQ ID NO: 46757 - DNA, 805 bp, Zea mays
  Clone ID: MRT4577_142651C.1
gtaccctccggctctccggtgtgtacttgtgtttctccaggcgaaggcggccgagcacgcgaccgagatggaggtggcggtggccgtcgcggctgccgcggaggccgaggaggacgaggctgctgctgctgctgcgacttcgacgctgcagcagtctgggaggaaacagccccgcgcgattgggagtgggcggtatcgctcggtatccagggatttggaggaggctgcccctaagaaaccgctgccaccatcatcgcagggtttggatttaggcggcctccctgttctcgatgtctttcaagtttactcctgcttaaggtcgtttagcaagcagtttttcctcagcaccttctcactggagacatttgtggctgcgttgtggagcacctatgtcaacccgttgatcgactgggtgcatttcacgctgctgcgggctctcaagagtcatctggaggactcagccaatgaaggagacccgtcggcggtacactgcattaggaatcttaactgggagctgttagacctagcaacttggccaatctatcttactgaatacttgctaactaggggctcagaattaaggttgtcagagtcagatggaaacgacgagggcttcaaaagcactggtgtaagaaggaaaaagaggggcagaggctcttctgctaaggtggcagtgggttcttctcaatttccagaaggatctactgaagtggatgatggaaacagcgatgaatgttatctttgtggcatggatggcaacttgttatgctgtgatggctgtccagctgcatttcattcgaaatgt

SEQ ID NO: 46758 - DNA, 308 bp, Zea mays
  Clone ID: MRT4577_142652C.1
aatatgccgctcgacccactcgtccgtccacgcgtccgcttctttaatttagcatttcacatgcatgattccatcttaggccttgttactttcatacgttggacatgtcatgtccaagataccacttacgtcttactcttcatttcttgcaaaactaatccattactattaattctcattacttagattgtaacattctcatactgtcttaagattctgcgttacatatatgtctatccatattatacatccttatcactttattgtcactaaccactatttattacatctatcgtctaataatacta

SEQ ID NO: 46759 - DNA, 2248 bp, Zea mays
  Clone ID: MRT4577_142653C.1
ggccgggccgggatctgaatcgggggggctcggcgttgatgtagcctcatcccttttcttcaccgcttcgaatcctccgccggtcgccaaaaaaccaccctcgttttcgtccaccctcgccgcttccgcccatttcacctcgtcttcttctgaaacgcccacgcccccgccgcctctctcgctagcaccagaatccatctctactcgctgccaccatgcacctcacggtcatgtccctctcggcggcggttgccaacggcgccgctgcctacaggtacgacacgatccagccggttgcgaggctccgcttctgcggcctcaggcgcaaggcccaccggctccactcgccccggtactcgcggcacttggtggccgctaggcggagcgtggtggttgcggcgacggctggcaatggcgcggccgcgagcggcacgttcgactacgacctcgtgatcatcggagctggcgtcggcggccacggcgccgccctccatgcagtcgagaagggtttgaaaactgccataattgagggagacgtcgtgggtggaacttgtgtcaacagaggctgtgttccgtcaaaggctctccttgctgtaagtggtaggatgcgagaacttcaagatgaacatcacatgaaatcactgggcctacaggtctcatcaccaggatatgacaggcaggttgttgctgaccatgcaaataatcttgcatctaaaatccgcagcaacttgactaattcaatgaaagctctgggtgtggatatactcactggtattggcaccattgtggggaagcaaaaagtgagatatgggaaagttggtttcccagacaatgaaatcactgctagaaacatcataattgccactggatctgttccttttgtccccaagggcattgaaatagatggtaaaactgtatttactagtgatcatgcactaaaacttgagtcagtccctgaatggattgctattgttggaagtggttacattggacttgaattcagtgatgtatacacagctctaggaagtgaggttacttttgttgaagctcttgatcaattaatgcctgggtttgatcccgagattgcaaaattggcgcagaggattcttattagtcctcgtaaaattgactatcacactggtgtttttgcaagcaagattaccccagcaaaggatggtaagcctgttttgattgagctgattgatgctaaaacaaaagaacacaaggagacacttgaggtggatgcagcactcatagctactggaagggcacccttcaccaaaggacttggcttggaaaatatcaatgtcgttacacaacaagggtttgttcctgttgatgagcggatgcaagttatggatgcaactggcaatgtggttcctaatttatattgtatcggagatgccaatggtaagctcatgcttgctcatgcagccagcgcacaaggaatctcagttgtggagcaaatcagtgggagggacaacattttaaatcacctaagcatcccagctgcttgtttcactcaccctgagatcagtatggttggcttgacagagccacaggctagggagaaggctgacaaggaaggatttgaaataagtgttgtaaagaccagttttaaggctaacacaaaggccctggcagagaatgaaggagatggacttgctaagatgatttatcgccctgacaccggagaaattcttggagttcatattttgggcttgcatgctgctgatctcatccatgaggcatcaaatgccattgcccttggaacccatgtgcaggacatcaagtttgctgttcatgcacacccaacgttgtctgaagttctggatgaactcttcaaggctgccaaggttaacacagctggttcgcattctatgaatgagccagttgcggtgtagagaggagccatagttgaaacaatctatctgctgcagccccacaccccagttatattgcctttagtacttaactagcctgctactcagaaaactgattttgtagccatttgcggacattttcgttatgagattcaggattagtgccagcactatctatttcatgagaaaatagaaatccaatgatctgtcccatgtatggaaaaatgtaaattttgtagtccttgtagagtaaatgtagtgcctttacgtggcaaaactcgctcttatgaatctatgattacttcaattcataagatgggcttgtttggtcagcattatgaaaaaaaaaaaaaaaaaggcccctg

SEQ ID NO: 46760 - DNA, 188 bp, Zea mays
  Clone ID: MRT4577_142654C.1
attattttttttttaaaggcttcccttgcaacaaggaaggcagaatcgggacaagaaatgccacaactaagtagtgttaccaaatacaacacggccggttgtcctgaatgcacatgttacatggatcatggaatgttgatacaacacgagcagagctgatgaaatcagttcctctgacaggaggttct

SEQ ID NO: 46761 - DNA, 1169 bp, Zea mays
  Clone ID: MRT4577_142655C.1
ctcatagctactggaagggcacccttcaccaaaggacttggcttggaaaatgtaagtacatggaaatggttgctatcagaattcacaagttttaaatatggtagcatccaaaacatgcccttttatacagatcaatgtcgttacacaacaaggttttgttcctgttgatgagcggatgcaagttatggatgcaactggcaatgtggtatgctaaacctgtagtgtgttactgttactcttttgttcctttacaacaatggtaggcatttcattcaagtttgctacataaacattaaccggtatgcaggttcctaatttatattgtatcggagatgccaatggtaagctcatgcttgctcatgcagccagcgcacaaggaatctcagttgtggagcaaatcagtgggagggacaacattttaaatcacctaagcatcccagctgcttgtttcactcaccctgagatcagtatggttggcttgacagagccacaggctagggagaaggctgacaaggaaggatttgaaataagtgttgtaaagaccagttttaaggctaacacaaaggccctggcagagaatgaaggagatggacttgctaagatgatttatcgccctgacaccggagaaaatcttggagttcatattttgggcttgcatgctgctgatctcatccatgaggcatcaaatgccattgcccttggaacccatgtgcaggacatcaagtttgctgttcatgcacacccaacgttgtctgaagttctggatgaactcttcaaggctgccaaggttaacacagctggttcgcattctatgaatgagccagtttcggtgtaaaaaggagccatagtttaaacaatctatttgctgcagccccacaccccagttatattgcctttagtacttaactagcctgctactcagaaaactgattttgtagccatttgcggacattttcgttatgagattcaggattagtgccagccctatctatttcatgagaaaatagaaaccccctcctctgtcccatgtatggaaaaatgtaaattttgtagtccttgtagagtaaatgtagtgcctttacgtggcaaaactcgctcttatgaatctatgattacttccattcataagaaaaaaaaaaaaaaaaaaaaaaaaaaaaaaacccaaaccc

SEQ ID NO: 46762 - DNA, 721 bp, Zea mays
  Clone ID: MRT4577_142656C.1
ccggccgggatcgagtacaatcgaccacttctctggcaagcccgcaggccgcagcccctcctctctccagagccgccgcggctgctccccccctagcaaacccgccatggccgagcgcctcgcagcatccgccgccaccctccgcgcctcggccgccgccaccccattcgccctcttcgctcccacagaaggcgagggcagtgaggtgcgcggctgtggcgatggcgtctgacgcggctcaggtgaaggccgcacgcgaggacatcagggagcttctcaggacgactcactcccaccccatcctggtccgtctaggatggcatgatgctggtacgtatgacaagaatattgaggagtggccacaacgaggtggagctaatggaagtttaagatttgatgttgagttgaaacatggagccaatgctggtctgataaatgctctaaagcttatccaaccaatcaaggacaagtaccctagtatcacttatgcagatttatttcagttggcaagtgctacagcaattgaggaagctggtggcccaaagattccaatgaaatacggacgagttgatgttacaggacctgagcagtgcccccctgaggggaaacttcctgatgctggcccaagttcacctgctgaccacttgagggaggtattctacagaatgggccttaatgacaaggaaattgttgccttgtctggagcacatacacttggaag

SEQ ID NO: 46763 - DNA, 840 bp, Zea mays
  Clone ID: MRT4577_142657C.1
ctgcgccggcgcgcctcatcttccaccttaccgtcctcgtctcctccacggccacgatcctacgatgctgcggattcatggatggcgcggaacaggaggcgaagctgctcgccgccgcggctgggctgcagctgctggcggcgcggcctgccgtgcaaatgtacctcaatgaggctgtgttctgctggtaccagcgtctgcacgcgagccgtgcgccggacactgagtacggccgggccaaggttttcttgcacaaccaccacctctgcgccgtggccacgcagctcgttgcgccgccactgctcgtgctgtcgctgcttgcattgtggcgggttcaagggaaggacttctttgagggcttagaggggatgtactggcttgttggatggtctgttgccatgaaggaggccgcattgcttgcggcccggtggatcgtggctgtgtggtcggcggcgacggtgatcacactcatgtgctacaaacgtggatggttattcgtctcgtgatcctttcttctcttgcttcctgcctgcgtgattggttcatatggagaccggagttgtgtacctgtgtttgatagagtgagatcccaacctggatctctggagttctggtaccacggcacaagtttttgtgtgcactgtttattttgcaagagaaatgttggatcaaattcttttgatttccttgtgtctgttcttactggagaagcaatttgaggtcagattttttgtccgccctttggggtggagtaatgtaacagaaaactgactggccagtcaccctgttgtaccctttgattgatggatatcaatgaatcatattcttccttttatgatc

SEQ ID NO: 46764 - DNA, 1737 bp, Zea mays
  Clone ID: MRT4577_142658C.1
accaacctaggctacgcagtgccgcacaggccctatcggcagtgagagtgagagcaggagcacgctccgcgcaccaaacccccgagacgcctcaaaacgcaggcaaaggggacgtggccgggagtcaaatcgaccacttctctggcaagcccgcaggccgcagcccctcctctctccaagagccgccgcggctgctccccccctagcaaacccgccatggccgagcgcctcgcagcatccgccgccaccctccgcgcctcggccgccgccaccccattcgcccgccgcgcggcgccggccaaccgcgccttcttctcgccttcgctagctcgcgcgcgcgtcggcctccgcgccgcgccctcttcgctcccacagaaggcgagggcagtgaggtgcgcggctgtggcgatggcgtctgacgcggctcaggtgaaggccgcacgcgaggacatcagggagcttctcaggacgactcactcccaccccatcctggtccgtctaggatggcatgatgctggtacgtatgacaagaatattgaggagtggccacaacgaggtggagctaatggaagtttaagatttgatgttgagttgaaacatggagccaatgctggtctgataaatgctctaaagcttatccaaccaatcaaggacaagtaccctagtatcacttatgcagatttatttcagttggcaagtgctacagcaattgaggaagctggtggcccaaagattccaatgaaatacggacgagttgatgttacaggacctgagcagtgcccccctgaggggaaacttcctgatgctggcccaagttcacctgctgaccacttgagggaggtattctacagaatgggccttaatgacaaggaaattgttgccttgtctggagcacatacacttggaaggtccaggcctgaacggagtggctgggggaaaccagaaacaaaatatactaaaaatggtcctggtgcacctggtgggcaatcatggacagttgaatggctgaggtttgataacagttacttcaaggatatcaaagagaaacgagatcaggatcttctggtcctacctacagatgctgctttatttgaggacccaaagttcaaggtctatgcggagaaatatgcagaggaccaagacgcattcttcagagactacgctgaggctcatgctaaactgagcgaattgggtgcaaagttccaaccaccgcagggattctctttggatgattagtgcggcaccagaaccacagtccgtgaaacaggaaaaccctgtccttgaaaaggatcaagagggagcatacaattcattgttcttctcatatcatcgtacaagatggactggtccccctttttcatgatgctatatggagtcttctaatttagctagatttctgaaccgagcttgcaaataaaaaagaaccgacacagtggcactacataattttcagagccattgggagaactgacacagtgctatcagatttggttttatcccttccacatgacgctctgcgctgctgtcaattttctactattagcaccatggttgttgcttccctcctgctgcgattgggcttatccataggccatagcggatctgcagcacttaaaaactctggtatgtcgaccctacctctggctctctgtctctggggtagctggtcatcagagtgcttcccagcacaacacagccaggagtaaaatcttcatctggccaaaaaaaaaaaaaaaa

SEQ ID NO: 46765 - DNA, 1855 bp, Zea mays
  Clone ID: MRT4577_142659C.1
gggtacccctcgaggggccggccggggcccgggaaaaaaaaaaaaaaaaaaaatcgacacgactctcggcaacggatatctcggctctcgcatcgatgaagaacgtagcaaaatgcgatacctggtgtgaattgcagaatcccgcgaaccatcgagtttttgaacgcaagttgcgcccgaagccttctggcggagggcacgtctgcctgggcgtcacgccaaaagacactaaaaggaaaaaattccaccctcccccactttctcctcaccgggtcacaaagccaaaccctaattcacggccgccggagatgggacaaggttctcccggcgggatgggcaagcagcccggcctcccgggcgaccgcaagcagggagacggcaagaaagagaagaaatatgaaccacccgctgccccttcccgtgtcggccggaagcagaagcggcagaagggctccgaggcggcggcgcggctccccgccgtggcgccgctctccaagtgccgccttcgcctcctcaagctcgaacgcgtcaaggactacctcctcatggaggaggagttcgttgccagccaggaacgcctccgtccccaggaggacaaggccgaggaggaccgatccaaggtcgacgacctccgcggcacccccatgagcgtcggatccctcgaggagattatcgacgagagccacgccatcgtctcctcctctgtcggacccgagtactatgtcagcatcctctcctttgtcgacaaggaccagctcgagccgggatgctccatcctcatgcacaataagattcaagaaattaaagaggctgtgaagcttcccttgactcatcctgagttgtatgaagacattgggatcaggccacccaagggagtcatattatatggcgaacctggaactggaaaaactctactcgccaaggctgttgccaattcaacatctgcgactttcttgcgtgttgtcggtagtgaacttattcaaaagtaccttggggatggtcccaagctagtcagagaattgtttagggtggctgatgaactttctccctcaatagtcttcattgatgagattgacgcagttggaacgaagaggtatgatgctcattcaggaggggagcgtgagattcaaagaactatgttggagctgctgaatcagctagatggttttgactcacgtggagatgttaaagtcattctagcaacaaaccgcattgaaagtcttgatccagccttgcttcggccaggccgtatagaccggaagattgaatttcctctaccagatattaaaactagacgacgcatcttccagatacacacatcgaaaatgacattagctgatgatgtgaacttggaagagtttgttatgaccaaagacgagttttcgggtgctgatattaaggcaatctgcacagaggctggattgcttgccttaagagaacgcagaatgaaggtgacccatgcagatttcaagaaggcaaaggagaaggtgatgtacaagaagaaggaaggtgttccggatggtctctacatgtagccaatctattcatcatgccgaacaagttacccgattgtgtgtgtactagcacatctcttcatcatgggagatatgttaccacaatacttgttgcatactgtgctaagtggtcaggagaaccttgtattaattaattatcctttcattgtctcaaagtaaaaatttcccttgcgctaaaaatatgcatccgttcagcatcaaaaaaaaaaaaaaaaaaaaaaaaactcgagacctcgtgccgtgtgacgtgttggcagcttgatcgcatggtgactattgcgtacacgaaattgcaacttatttgaatgaaaaaattggat

SEQ ID NO: 46766 - DNA, 542 bp, Zea mays
  Clone ID: MRT4577_14265C.1
gtgggcggaatcatgggcggccgcgggtatcactcatggaattgggggaccgtgacttgtaggcttactggcttgccctatagagagatgctattctgggtcgggggagtactggaacatagttgttctgtgagtgaagttggcagcgactgacattgttcacagaccgtactagctgcaggcttataccgtgcagcatggcggtgacttaatgaggtgatctatacattacaaaaatggtgttgggctcaatgactgttaaggatcttaccaaatgctgagatccaatttgcattaacgaattcgcccacccaagtggagaggaggattgtttactgtgaccaacggtggtgggtgatcaaaaccgggaagaggggcatgacgtaaaagagggtaataccggctgcccctgaaaagaggaatactaagtactctacctctggtcaagatcaagcgaagcaaaaatcatggtttgttggtgtgatgacgcggatacttttacagagtgctgttagtaaaaataaacaaataggcactaccga

SEQ ID NO: 46767 - DNA, 938 bp, Zea mays
  Clone ID: MRT4577_142660C.1
cccacgcgtccgcccaaacccaaatccaaagcaagcacttcgtcggcgggcggcggccgagggcgaccatggggcagggcactccgggagggatgggcaagctcgagcgggtcaaggactacctcctcatggaggaggagttcgtcgccgcgcaggaacgcctccgtccccaggaagacaaggccgaggaggaccgatccaaggtcgacgacctccgcggcacccccatgagcgtcggatccctcgaggagattatcgacgagagccacgccatcgtctcctcctctgtcggacccgattactatgtcagcatcctctcctttgtcgacaaggaccagctcgagccgggatgctccatggcttatatatgtgagactcatcagcagcgctattagtcttagtgagagaactggcgtttgtaatctgcttaaatggtccgaaaatgtttgcttacagcatttattttggttgaaaacacacaactcaaacaaatagttatcctattatgagtacttggatatatgaaatggcagcgacgagtcaagatgatgttgaaaaaaaaaaaaaaaaaaaaaaaaaaaaaaaaaaaatgatgcacaacaaggttctgtcagtggttggtattttgcaagacgaagttgatcctatggtttctgtgatgaaagttgaaaaggcacctttggagtcttatgctgacattggtggcttggatgctcaaattcaagaaatcaaagaagcagttgaacttcccttaacacatcctgagctatatgaggacattgggatcaggcctccgaagggagttatactatatggggaacctgaaacagggaaaactctactcgcaaaggctgttgccaattcttacttcagcaacgttcttgcgtgttgttgggagtgaattgatccaaaagtccttggtgatggtcccaagcttg

SEQ ID NO: 46768 - DNA, 1774 bp, Zea mays
  Clone ID: MRT4577_142661C.1
gttgggtacctcgaggccggccggggctaacctgatccttttcctcacgggaccttccaccctcccccactttctcctcctcaccgagtcacaaagccaaaccctaattcacggccgccggagatgggacaaggttctcccggcgggatgggcaagcagcccggcctcccgggcgaccgcaagcagggagacggcaagaaagagaagaaatatgaaccacccgctgccccttcccgtgtcggccggaagcagaagcggcagaagggctccgaggcggcggcgcggctccccgccgtggcgccgctctcaaagtgccgccttcgcctactcaagctcgaacgcgtcaaggactaccttctcatggaagaggagttcgttgccagccaggagcgcctgcgccccagcgaggataagacggaggaggaccgatccaaggtcgacgacctccgcggcactcccatgaacgtcggatcgctggaggagatcatcgacgagagccatgccatcgtctcctcgtccgtcggtcccgagtactacgtcgggatactttccttcgttgataaggaccagctcgagcctggatgtgccattctgatgcacaacaaggttctgtcagtggttggtattttgcaagacgaagttgatcctatggtttctgtgatgaaagttgaaaaggcacctttggagtcttatgctgacattggtggcttggatgctcaaattcaagaaatcaaagaagcagttgagcttcccttgacacatcctgagctgtatgaagacattgggatcaggccacccaagggagtcatattatatggcgaacctggaacaggaaaaactctactcgccaaggctgttgccaattcaacatctgcgactttcttgcgtgttgtcggtagtgaacttattcaaaagtaccttggggatggtcccaagctagtcagagaattgtttagggtggctgatgaactttctccctcaatagtcttcattgatgagattgacgcagttggaacgaagaggtatgatgctcattcaggaggggagcgtgagattcaaagaactatgttggagctgctgaatcagctagatggttttgactcacgtggagatgttaaagtcattctagcaacaaaccgcattgaaagtcttgatccagccttgcttcggccaggccgtatagaccggaagattgaatttcctctaccagatattaaaactagacgacgcatcttccagatacacacatcgaaaatgacattagctgatgatgtaaacttggaagagtttattatgtcaaaagatgagttttcaggtgctgacatcaaggccatttgtactgaagctggcttgcttgctttgagagaacggcgaatgaaggtgacgcatgcagacttcaagaaggccaaagaaaaggttatgttcaagaagaaagaaggcgtgccggagggcctatatatgtgagactcatcagcagcgctattagtctttgtgagagaactggcgtttgtaatctgcttaaatggtccgaaaatgtttgcttacagcatttattttggttggaaacacacaactcaaacaaatagttatcctattatgagtacttggatatatgaaatggcagcgacgagtcaagatgatgttgaatgttggttgtctgtgcaggcgtggacatgtatgacaagcatcctaggtttcaatcctaggttaatatgataattttattttttttataaaaaaaaaaaaaaaaaaaaaaaaactcgagacctcgtgc

SEQ ID NO: 46769 - DNA, 314 bp, Zea mays
  unsure (1)..(314): unsure at all n locations
  Clone ID: MRT4577_142662C.1
gcacgcatagcagtcaacttacatggccttgaacgttccgactggacacagatgccgcgcgtccatacccatcaaacaaagtcaaccctgcctggccgcctacgatacacatgtcattgagagctccaaccaacaatgtcactaccatccaggctgcccagcctaagacgaatggacacaaggatcactcgcgatcccacaccatggtgaacaccatggaggcctgacgctgactcntatcgacagcaagggcagacatgtgcgccacgacggatgacatgatacgtctacgagcacgcgcgatgacaccacac

SEQ ID NO: 46770 - DNA, 492 bp, Zea mays
  Clone ID: MRT4577_142663C.1
ggggggggggtttttttttttttttttttttttttttttttttttttttttttttttttttttttttttttttttttttttggaaattaaactaagtttaaattggttattttccacgtgtacttaacacgagcccggaaaatggcagggggggaagacggcgcccccaaacatgcatgcctgggttttctatttcaaatgaaaatgcacgagggccccccccccttcctgggttggtggtgggggcggccattctttttttttttcgccccctggcagtcggcgtcggggttgtcctcggtgcccttggaacaaccaggcttgcactggttgccaccagcgttggcagtaggcggtagcattggttttattattagcgttcccgggggcgggggcgcggtgccgctttagcactttccccagtttcgtgacggccaacaccggggtgaccgccttcagcgtgcgcatttgccacccctccgcctcggcggg

SEQ ID NO: 46771 - DNA, 842 bp, Zea mays
  Clone ID: MRT4577_142664C.1
cattgggtacctcgaggccggccgggcttccaccctcccccactttctcctcctcaccgagtcacaaagccaaaccctaattcacggccgccggagatgggacaaggttctcccggcgggatgggcaagcagcccggccttccgggcgaccgcaagcagggagacggcaagaaagagaagaaatatgaaccacccgctgccccttcccgtgtcggccggaagcagaagcggcagaagggctccgaggcggcggcgcggctccccgccgtggcgccgctctcaaagtgccgccttcgcctactcaagctcgaacgcgtcaaggactaccttctcatggaagaggagttcgttgccagccaggagcgcctgcgccccagcgaggataagacggaggaggaccgatccaaggtcgacgacctccgcggcactcccatgaacgtcggatcgctggaggagatcatcgacgagacccatgccatcgtctcctcgtccgtcggtcccgagtactacgtcgggatactttccttcgttgataaggaccagctcgagcctggatgtgccattctgatgcacaacaaggttctgtcagtggttggtattttgcaagacgaagttgatcctatggtttctgtgatgaaagttgaaaaggcacctttggagtcttatgctgacattggtggcttggatgctcaaattcaagaaatcaaagaagcagttgaacttcccttaacacatcctgagctatatgaggacattgggatcagagctccgaagggagttatactatatggggggacctggaacagggaaaactctactcgcaaaggctggtgccattctac

SEQ ID NO: 46772 - DNA, 590 bp, Zea mays
  Clone ID: MRT4577_142665C.1
taggggccttttttttttttttttttctctaatatccaattttttcattcaaataagttgcaatttcgtgtacgcaatagtcaccatgcgatcaagctgccaacacgtcacacggatgctgaacggatgcatatttttagcgcaagggaaatttttactttgagacaatgggaggggtgggggattaatacaagggtctcctgaccacttagcacagtatgcaacaagtattggggtaacatatctcccatgatgaagagatgtgctagtacacacacaatcgggtaacttgttcggcatgatgaatagattggctacatgtagagaccatccggaacaccttccttcttcttgtacatcaccttctcctttgccttcttgaaatctgcatgggtcaccttcattctgcgttctcttaaggcaagcaatccagcctctgtgcagattgccttaatatcagcacccgaaaactcgtctttggtcataacaaactcttccaagttcacatcatcagctaatgtcattttcgatgtgtgtatctggaagatgcgtcgcctagttttaatatctggtagaggaaattcaatctt

SEQ ID NO: 46773 - DNA, 222 bp, Zea mays
  unsure (1)..(222): unsure at all n locations
  Clone ID: MRT4577_142666C.1
accgccccggaattaatataccgggttgacgagctgttcctgncggcggccgcccttcttttttttttttgggctaattaaaactttacccgcctttgtccgccggagatacacaccaggacatttttcaaaagtaatacagacaccggggacctaacaccacaggacgtgccggagggaaccaggacggtacgggaccctggacacaacatacacaccgtt

SEQ ID NO: 46774 - DNA, 352 bp, Zea mays
  Clone ID: MRT4577_142667C.1
ttggtttttggtcaggccggagtggagatatactaataaggagacacaaaagacagcataggcctttctgtagacagagaaaactactcgctagccatatacggatatctatttggcctaccccatagtacaaaatttcttgaagtagccggcgggcgctgacgcggggaacatcactacaggtaaactggcgtgcgcatctcattatcattagaaacagtaaaaaagatatgaaaaggaaaccaagaaaaagctctgacggcatgaagagaggattgacctctatactaaggggaagaggccagcatcaggctactctacttacatccagaaatagagagagggtcctcta

SEQ ID NO: 46775 - DNA, 484 bp, Zea mays
  Clone ID: MRT4577_142668C.1
tcccacgcgtccgcgcaatttgttccatctttatcagatctccaccttatccacctgcagtcgagcctgctgtaccctgggctccgccgtcccgaccatgtcggtccgacgatccctatcccgtcaggaatcagcaccgacctgaccatcggaggcgcaccggcgcgcgacggcgtaccgtgtaccctctccgtcggtgccagcaagcagaaccccgtcgccgtcaagccggcggggctgatgctcttcggacggaccatactaaccgagcatcagatgagcctcagcagctccggcggcgccacctccccagcggcgaccggtaacagctctctgtgctggaccgccgagaagggccccaatgtctcggagggctcgggctcgggctccggcgtcatccagaacagcccgaccaagaacccgtcgtcagagaggctgacgaggttcggggacggcagcagccagcaggtgttcgagcccgggc

SEQ ID NO: 46776 - DNA, 558 bp, Zea mays
  unsure (1)..(558): unsure at all n locations
  Clone ID: MRT4577_142669C.1
natacaaagaatactttttgctcattatcgtgcaccaacgaactctcaacactccaacgacgaatcaacagaaaaagaaaaaagaaaaccaaaaaaaaaaaaaagaaaacgaaaaaaaaaaaaaaaaaagaaaaaaaaactttttccatatccgggccgaggtttctcctgatcggaataaaccggaaaattttggttccaccccgaggggccgggcaggccaccttgccctatccgaagggcggcaagccgccccactgtaaacaagatcaaagccgccgcagaggaaaactcaaagacaccccaccgcgctagaaagacccgcgcacatagtttgagccgctaatggccccaggaaatccccccaacggtatcccgagaagggggagaagattaattgccagagaatgcccaaaaaaaaaaaaaagcgggacaaggatcctgaagatgggcagcttattgaaccacccccccatgtactcgatgccaaaatgacaaaacgtgaaaaggtacccagtgacgaaaaaagaaaggggggagttctctggctaattttcg

SEQ ID NO: 46777 - DNA, 303 bp, Zea mays
  unsure (1)..(303): unsure at all n locations
  Clone ID: MRT4577_14266C.1
ggggggggtnggtnnncgggggggggcgatgggacctctagcggcgggaaccgttccttagggcgtgtgaaggacctgttcccgagagaactgattgatatagcctacacgagaggacagggtgggacttagctcagagctgccgcgtagggatacgaaccggcgactgacaggagggataaaggtatgggcaggatcggaccgatcagtcagtactgtcagccgccgggttcgagtacgacttcactctccatgaggcgtcaataaggatgagaccgtcgtcgacgccgcgtgccgagcgag

SEQ ID NO: 46778 - DNA, 1608 bp, Zea mays
  unsure (1)..(1608): unsure at all n locations
  Clone ID: MRT4577_142670C.1
gcacggcaagnncgggaggcgtggggaccagatctacgaggcggccgagacgctcggcaaggagggcaagttgcactggctccagctgctgcacttccacatcggctccatgatcccgacgacggggaaagtgtacgacgcggtgagcgaggccgctggcatctactgcaacctggtgaacgagcacggcgccaagtggttggccacgctggactgcggcggcgggctcggggtcgactacgacgggacccgttcaggcgactccgacatgtcggtggcgtacgggatacaggagtacgcctccgccgtcgtgcaggcggtgcggctcaagtgcgactacaacggcgtcgcgcacccggtcgtgtgcaccgagagcgggcgcgccatggcgtcgcaccactccatgatcatcctcgagacgctctcggcgatcccggagccgcaggacgaggacacctccgagcagctgttgaacaggatccaggacctatcttacaagcagccgagagctccggttggcggcgccacggcggccgtttactctcacgccgcagacctcaagaagcacggcatcgagatgtacaagcttggcaagaagctcggcaagagggtcgtcgccgatgccaacaccgtctataactaccacatgaacctctccgtcttctcgctgttgcctgacttctggggcatagggcagctcttcccgatgatgccggtgagccgcctcaacgaggagccgactctcaagggcacgctggtggacatcacctgcgacagtgacgggaagatcgagaacttcatcagccgcgaaaacacattgccgctgcacctgttcgagccgagcctcggtggctactacgtggccgtactcgtctccggggcgtaccaggaggccattgctggcaagcacaacctgttcagtggcccaaccctcgttcgtgtcaatagtagcactacaaaagatggcggcttcgagattgaacgcgttgacctgggcccagctgcggatgagatcatcggcagcatgaggtacagcgtcgaggaagacattatcaccgtcatcgagaagaaagccaaggggacagaagaagaagaacgtgtgtgggcgtgggagatggtggagccactcatgaccaaagcgctcaccaccatgccctacctcaacgaatacaaggtccctgaacctgaacctgaacctgaacccatcccttgaacttctgcactgcagagtctccggatttggctgcgactgcgatcatatatacaataagaactgcctggttgatgatggataagcagataacgaaagcagcctacgtatgtatgtttcccttttttgagtttaccctgctcgcttgcatcttgttattgtacgtgttatccaataaataaaacaagcttcactggtgtgtttaattgctaaaaaaaaaaaaaaaaaaaaaaaaaaggcccctaaaaaaaaaaaaaaaacaaaaaaaaaaaaaaaaaaaaaaanattaaaaaaaaaaaaaaaaaaaaaaggggggggcggttttgggggttcccaagctttacttccccgtggcttggcaacgncaaaagctttttttttgggggccccctaaattt

SEQ ID NO: 46779 - DNA, 251 bp, Zea mays
  Clone ID: MRT4577_142671C.1
tggatttttaggttgaaaggcaatgggctgttgatcagtgtggggagggagtggaaggaccgagggggcacggcaacggatgaaaagggggatggcgctccctggtatgaggaaaatatttcgcatagaatcacccgactgagtacaagacattttgagttttgacagagaaagctgcttacatcaaacatgttattagctgaattctgtagatgaactctttttttcgatggaaatagctacttcatgtt

SEQ ID NO: 46780 - DNA, 573 bp, Zea mays
  Clone ID: MRT4577_142672C.1
gcggccgctccgaaaggccggccggttcactcgatactaccggcccacactcagagcacctcgtcccccagtgacgcgagagtggttgatgtactcttccccgacgggtttcccaattgggcagctggcttcgctccgcattcaaccatagtgagacagcgtcactcatgatggactcgcagggtcgagacgatatcgcgttacgtcctcgcatgctacgtctgattgctatactgcatcaaattcccgacgacgacactgcgatgcaccatggatcactaccgagcgagtgagtaaccactcccaacagtgtacatcaacttgacctcagcgagtatggcaagactcagctccacatctactggatccgaagacatgtacgagttgtatagtgaggtatactctatatcgttggaccctgaggaggccaaggtttctctcatcatcctatggggagtacgaactctatcggtgactggacgctcatctcaaatggcccggctgatattaacactctcccttccaaagatttggctataggatgcatagccctggtatcagctggcgctacag

SEQ ID NO: 46781 - DNA, 189 bp, Zea mays
  Clone ID: MRT4577_142673C.1
caatagaggccgccgctgatgacatccacctctcagctccaacgccgacaggagctactgctgcgcttcgcgtgagcccaagagtaaggtgctcatcgtcactgccgagggatgaataagacatccgctgccagtgcgacatgcatcttaagccacgtcaactcctctctctgtgttctaagaatatag

SEQ ID NO: 46782 - DNA, 316 bp, Zea mays
  Clone ID: MRT4577_142674C.1
tcttacaaaaatataataatcaccaactctctcaactgtatcaaaccaatgcgacaaccagcgcgcggtctaaatgtacgatgtgacaagcaaaaactagaccatatttccccctcctacttaattcacctacttcattttctccaatacctcccttcatatctcataaaacctaaatattttttcacctatacataccttcattatctatcaaaacacataaatgctacttctactactaatactattacggtaaaaccaactttatttccaaccaccattgctttataatattaacacttttacttccacatct

SEQ ID NO: 46783 - DNA, 525 bp, Zea mays
  Clone ID: MRT4577_142675C.1
aaaacatccttccttttccacacaaataataaaatccaggcccgtttcaacactaagggggggtcacagatttttttttgctaacaaggttcgcaacaatgccttacatttacagttacatgtgggcactgggacgtcaacaacaacaagctccgtgtgacaaccccacgttgtcacctgccgggggacagttcgatcgcgtcctggttgtaaatggagtcctccccccaatcaaagcgctgttgcatcccctcgtagtcctgcctccttgtaacctccacctggtgccactcctcccaccttttggggaggcccttgccctccaacatccggaccaccttggacatggacgggcggtccttgggcgacccctgcgtgcaaagcaacgcgatctggatcattatttccacctcctgcccgttgtaacaactgttcaagttgcggtcaacgatggcgtcaaaatgcccttccctttgcagctttttgacatgggcaagtaacaacacgttatttttttcctccaaa

SEQ ID NO: 46784 - DNA, 763 bp, Zea mays
  Clone ID: MRT4577_142676C.1
ggcccgggatcatcaacacaacataaaaatactttctaaacctcaatccaacgcaatggccgaccagaaagcatccaagtactacgctgccgaggaggaggcgcaaatgaagaaggcgcgcaagacggcacaccccaccaaataccgcgagtcgctcacccccggcaccgtcctcatcctcctctctggtcgattccgtggcaagcgcgtcgtgcttctgcgccagctcgaacagggcgttctcctcatcaccggccccttcaagtctaacggtgtacctctccgtcgcgtcaaccaccgctacgtcatcgctacttccaccgttgtcgacatcgctggtctcgacgaggaggttgtcgcacgcgtaagcaaagacgagtactgggcacgtgagaagaaggacggcaagggcgaagacgacttcttcaaggacggcgagacacccacaaagaaggagaccgacccccagcggatagaagaccagaagaaggtggacaaggcgctcatggccaacatcaagaggactcccgacctcgagtcttacctcggcgccagcttcagcctgaggagcaacgagaagccccacgagatggtcttctaggtgtctacacgagaacgggacgagaacgagacgaaaacttgcggcaacgatctgaccgagaacgacggttcggacgaggatgagcacccggacgctacgagcgatacggtacgatttcatatgtagatgagatacccatgaaccaattcacagcaccaactc

SEQ ID NO: 46785 - DNA, 432 bp, Zea mays
  unsure (1)..(432): unsure at all n locations
  Clone ID: MRT4577_142677C.1
ggcgggcttcgcactcctgtccttgctcatggcggccacgctggtgtacaccttggccactcccagctcgccgttccgccttgagctgtttacctcgtcgattctgccaacactgggggtttgtttgggtaatnctctatcaatctccccttgatctatctacaaggaaacaaactgatttagctctcgctgtgtgggtggttctgttgttttgctttgaacacttctgtcacttgcgcttaattcttcataaacttcttcatgtctcatctgcacggtcattgccaagatccgtctggaccttctatttataaggccaggctcgtctctcccaaacaaagtcctcttatgtcttcatcaccaaggggatttctcatcattttccggatattcatggctgcggttgccacatctcctggtttcactcgatgg

SEQ ID NO: 46786 - DNA, 148 bp, Zea mays
  Clone ID: MRT4577_142678C.1
gaagctcggaacccggctcgttcgagcagcagaatgtagctcgtgggcgaggagcagaccagcacccagcagccctcgtcggggggcggcaccagcagcatccaccagccgacgactttccccgactcctatgcctctgcccctcccc

SEQ ID NO: 46787 - DNA, 259 bp, Zea mays
  Clone ID: MRT4577_142679C.1
ttgtttttcattcgacctgtttctagagcagtttctaataaaatggcaacgaaaaatgtagcgctggttacggtagccactacttgagccacccgacgtgtggtgcacgtccttgataacaaggtccttcctattcgcgtattggctagaaatttgtacaaggcatggacacatgttaaggcccgatgtacctcttttcataccttatgtcacatcggaagatacacttgaatctacactatttactaggatataaaaa

SEQ ID NO: 46788 - DNA, 781 bp, Zea mays
  Clone ID: MRT4577_14267C.1
ccgggtttactttagtagactagtaataccaagtaacgattctggtattctctttcgcttcgagggaaacatacggatttccaactccactgaggtcccttactcccacctacgctatagctatgctacgcctacgagaatgaagctgctgtcgtcagtcctgtcatgtagattgtgggcgccatgtgcgccaaaagattcggaaaccttatccggagtccgggcaacatgtctagtcgccaacaactagttgcagctgcacaacgacagtcacagtcacaaactgagaggcgacatggagccaccggagttgacccacttcttgcccgttgcattcgtggcgtgcagtgctggcctctcttcgccggtgacacttttgtcctgttgccggcggtggttgggttattgcagtggccacggcggagcacgaggttttgtctttttcagcatgtgctacgagggttgggccgttggggattgtaagcgtgtacggcagaaaggagagatccataatggacatgcgtgggcctggactttacatgtactcctacttagggagcataagtgggccacgagcccatggacaaggactcgtgattctgtcttacgttacgtatacctgctttgatgcgtaccggaaatgattcaaacttgcgctcccttccctccaacttcaacgcatatgataaacaacaataatgttggcatgcatgctcacccggtggttccatgcatccaccaccagggcatgttcctgctgaccatgacggccggcgcgaac

SEQ ID NO: 46789 - DNA, 408 bp, Zea mays
  Clone ID: MRT4577_142680C.1
attcccgggccgacccacgcgtccgcccacgcgtccgcaatcgaccaccaaactttacatacaagatgaaactcgtcagattcctcatgaaattgaacaatgaatcggtaacgatcgagttgaagaatggtacaacagtttctggaacgattactggtgtcgacccttcaatgaatacgcatctcaaaaccgtcaagatgactgtacgaaaccgggaaccgacgacacttgaaactctagcgattcgcggcaacaacgttcgatactttatcttgcccgacagtctaccgttagatactctcttgatcgatgatgcacctaaacctaaaaagaagaaggctgacggtgctgcacgaggaggagctgccggtcgaggagcgagaggtatggatcgtggtggaaggaggg

SEQ ID NO: 46790 - DNA, 568 bp, Zea mays
  unsure (1)..(568): unsure at all n locations
  Clone ID: MRT4577_142681C.1
gagaaatttcagaagtgcctgagctagggaatggaaatgaggaattgtggacttttgttatatatgcaggagaagaccacacaaacacacaaactcttgtggcctttcttggacttcttagtactttggcttccactgaagttggtgctgccaaagtctatgagctgctccnagggaaaaacttaccgttcagttggttggagcactttgtttgattgcttatctatctatgaggagaagttcaaaaaatcaattcaatcttctgcaaacatactgcctgattttcctgagggggatgcacaagcgcttgttgcatatttagctgttcttcagaaggtggtggaaaatgggaatcttacggaacgcaggaagtggttccctgacattgaacctttattcaagcttctcagctatgaaaatgtgcctccatacttgaagggggctttgcgaaattcaataactgcatttataaaagtgtcacccatactaaaggatgcaatttggaattatcttgagcaatatgatcttccggtggttacagctccattaggtcaccatacagcaacac

SEQ ID NO: 46791 - DNA, 174 bp, Zea mays
  Clone ID: MRT4577_142682C.1
acaacaaaaatgaccatactcttcctcatcactacaaccactactacattacaactcttgactaactctccctacaatacatattcaatagctacataaatgctgatcattatcacaatcacaagcaccaccacataaacatctaagccatcccctactacaacattgaccttt

SEQ ID NO: 46792 - DNA, 206 bp, Zea mays
  Clone ID: MRT4577_142683C.1
ctcgagccgctagtttgatcatggctggatgatgtggaagaagagcatgatcttggaactgatggtggtgatgatcgtcccgcgggatgttcatggttggttctactttaatcatggctgggattaggactcataatcataatatcgtgaatgctaatcccagccatgatcaaactagagccaatcaaaaacatcccaagatcatg

SEQ ID NO: 46793 - DNA, 587 bp, Zea mays
  unsure (1)..(587): unsure at all n locations
  Clone ID: MRT4577_142685C.1
cgcccagcgtccgttccgcgtccggggcgntcaccttcaccgccccctnanggggttcaccttcnnngnggtccgttcgccttcaccacccctnnaaaaggcttcaccccctcagaaagtgtcncctcctgctgaatcannctgcctctgcctcgcccatnnntcaagggctggggatgaggctcnctngnnngagatctccggaaaccccggcgacccggcgattgtggngctctcactggaccgannggnnaacccccctcgnggctctggatatatngaatncaagaagagagcngntgcngagaaggctcttcttcacatggntggnggtcancttgntggaaatattgttaagttgttatttattcttcatcctcgccaangggctgcttcacctgtttaagctccnccccctcctccaatattatattctcttttttttgnaaaaggtgttatccttgctttttttttttttttagcagcgtcctaaggaatcaatctcccnnnggggccccgctttncctcttctgtttttttctccaactcnataggctgtattccccatgcntccacctgtcccttcc

SEQ ID NO: 46794 - DNA, 774 bp, Zea mays
  Clone ID: MRT4577_142687C.1
atgtggcctcccagtcaccagcgccacgacgcctcttgtgaagaggacgatttgtacgggtatgggggcatcgtcaatgagtggggcacgattgggctgttgctgctcgaggcggcagccgagcggattgtcggggatggggccctcgagacatggggtgtcgcggataaggccactcgtgtgaagctctgcatgttgggtgtccctgtgggggtccagcgcgagggagatcacacgcgctgcaccacgcggaacgtgttcgaggagcgccagctccatagccacctccatcgtgtcgccgtggctgccctctccattcaggtactcccaccattcattgttatttgttgccgcatctctgaagaaaagaatgtctgggttatgaatgtagttcctttcacggaatctggaaagctgaaaattatatatgatcgtggtttaatggggactacccatgactggtgtgaatcattctcgacatacccgcgcacctacgacctccttcatgcctggctcctgttttctgagatagagaagcagggatgtagcctggaggatcttctgatcaagatggaccgcatcctaaggccttatggttacgccatcatcagagacaaagttgatgtcggtacctacatcaagaaacttttaccagcgctaaggagatttggcattctagaagtactggaagcacttgaagttcgagatacaaaaggattcctttctgctaagagcggcaaagactgctcgattttgctgaatttctggaaataa

SEQ ID NO: 46795 - DNA, 379 bp, Zea mays
  Clone ID: MRT4577_142688C.1
acccagaaatgaacaacattatttctggagagccacgaacatcaggcagaacacttcattattgaaccatagctgataatagatttaaaagagggcaccaccaatgatgggcagtagtcagaatgctgatgagttcattaaagcatgttcggtgcatggccgacattgatgcagctgaaagagggtgacagaagatgacgcagcctgcttttggatcgacaacaacttgaggatgaccaatatagtagtagcgctcacaccaactagctagatgaatggcacaagctagcgctgctgtcagtaagtacgacagatcaacgttgtcaggtggttcaagggaataaaatgatgaggggtggcaatccatagccggctgaat

SEQ ID NO: 46796 - DNA, 443 bp, Zea mays
  Clone ID: MRT4577_142689C.1
gcaaaagggcggtggggggggcggtatatatgaggctatgctctcaacaaaaaattaaatcatccggggttatctccaactgggcaactgaactttttttttgtgtagctaagggctgagagaactgagaaaaaaaaaataccgggggaaaaaaaaaatggggttacggcgggagcccaggtattccagtaacacattcccaacaaactacgggggccatagcttttgggagtgaggggagagcaaccaagcgggtaaaagcgggggcaccaaaaatttccatggcatgggcgcgccttcatcctaaccttgctgggttccggggggggggggggcaacgtcttgggccccaaaaatgcgcttgcggaagtccgaaaccatgaggggaaggccctcacccggggggagcttccggtcccacccaaggaactcctttgggcggg

SEQ ID NO: 46797 - DNA, 632 bp, Zea mays
  Clone ID: MRT4577_14268C.1
gccggccggtccggggacatgcagccaaccgtctaccacacgactcctcgagcgagagcagcacacactgcacgcagctagctaggagcagcaacaacggcgtggatggcggcctccatgatcgcctcgacagctctggcggcggcgcctcaggggctgtcgcccctcggccgccgagcctcctccttcgccggcatctgctccaagaagaagatcaagaccgacgagccctacgtggattgggggtggcctgaccgtcgacgtcgacaccaacgcgacaaagggcgaagggaacagggcggtgtaccatgctcgtcgacgatgacggcgcgaacgtcgacggatgtggccccgtctacagacgaggatgactgggcatcccaccgacgacgtctacgacgatggaaacactgagctgctgatctggctcgtcaacctcggtgagatcctcgccggaggcgtcctcctcgtctacataaccagcgccctctccggttaaggatatcctgtgcctgacgcttcttgcgattctacatgtgaaatcagggtgtctgactataatctagcctcgatgcatggtcaaccttccttctgatgcagtaatcagcggtactcttcattacataattttg

SEQ ID NO: 46798 - DNA, 824 bp, Zea mays
  unsure (1)..(824): unsure at all n locations
  Clone ID: MRT4577_142690C.1
cattgggtacctcgaggccggccgggtcagctctactcaaagagcgctctaccagtacaactacaaccacactaaaacccaaacaaaacaaacaaaaaaaggaagcaggtgctgccgatatatcgatcgatcgatcatggcggcggccgtggccaagatcagcatggagtggctccaagaccctctgagctgggtgttcctgggcacggtgtgcttggtggtcctgcagcagctgcgacgtcggcggggcaaagcgccgctgccgcccgggcctcagccgctgccgatcgtgggcaacatggggatgatggaccagctgacgcaccgcgggctggcggcgctggcggagacgtacggcgggctgctgcacctccggctggggcggctgcacgcgttcgcggtgtcgacgcccgagtacgcgcgcgaggtgctgcaggcgcaggacggcgcgttctcgaaccggccggcgaccgcggcgatcgcgtacctgacgtacgaccgcgcggacatggcgttcgcgcactacgggcccttctggcggcagatgcgcaagctgtgcgtgatgaagctgttcagccggcggcgcgccgagacgtgggcggccgtgcgcgacgagtgcgcggcgctggtccgggccgtggccgtgggcggcgggggcgggggcgaggccgtgaacctgggcgagctcatcttcagcctgacgaagaacgtgacgttccgcgcggcgttcggcacccgcgacggcgagggccaagaggagttcatcgccatcctgcagganttctccaagctgttcggcgccttcaacgtgggcgacttcctgc

SEQ ID NO: 46799 - DNA, 215 bp, Zea mays
  Clone ID: MRT4577_142691C.1
ctaaaaacaatatttcggcggggacctggttcctttttacaaaattctacggctccgggtttacggaaaaactacattccacgagattgtaaataaacaggaataaattagcgccgtgtgcatgcaggcttacgtgccctggggtggccgacatgatacataacatctaatctattattttacgcgaaaacgcaactttttgtggacacgacttc

SEQ ID NO: 46800 - DNA, 322 bp, Zea mays
  unsure (1)..(322): unsure at all n locations
  Clone ID: MRT4577_142692C.1
gcgcgggggttttttttttttttttttttttttggggggtttttttttttttttttttttttttacgaaatcgaccccccagatatatagcaaacatgttaccaggggtcttttcaacaagcctagtcaagggtcaacttggcccccctaaggggggggggggggggcaaaacaacccacaaatcgctcaaagaactggggagaaccatggggacaaagggaccaccacatgggcgggtccaagggaagaaaaccccaccccacttttttagaacattggaaaggggggccgcattccccagnttgccccccagaggggggg

SEQ ID NO: 46801 - DNA, 1847 bp, Zea mays
  Clone ID: MRT4577_142693C.1
ttgttgatggggtcacaggcggattcaacaggaagaatttctcctgcaaaggacatgtttggctgtctcttgctttccatagtgccaagcgatatctttgtaattggaacacctcctgcgcctaccctcaccaccgctcgccgcgccaccgtattctccaggacgagatgtctctcttctacccccgcctctcctacctacgagcaggggcagcacgaggaggagccatcgttggtcgttgtggggggcggcgcggcgggcgtgtacgcctccataagggccaagacccttgctccgcacctcaacgtcgcggttgtggagaaaggcaggttcttgtccaaggtcaagatctccggcggtggccgctgcaacgtaaccaatggccatcaccttgagcccatgggactggcgagaaattatccaagggggaacaaggagctccgaggatccttctttaccgctcacggtccgcaggataccatgcgctggttcacagatcacggtgtaaagcttaagacggaggacgatggcagagtcttccctgtcactgacaattcagcttcagttgtagactgtctactgaacgaagcaagaaggcttggggtttctctgcaggccggcaaaactgtgtctagtgcatctgttgctcaagacgggaagtttgttctcaaggtggagaagcgtactgccgatcttgttgattatatcaacgctaattacatcttggttgctacaggtagcagccaacatggctattcaatcgctgcacaactcggtcattccattattgcaccagttcccagcttgttcacatttaaaatcgcagacaagcggctggctgatctcgccggggttacatttccaatagtcaaagcaaaactgaagctagatggtgttcaaaaaagtgttcccgagttaactcagactgggcctatgttagtaacacactgggggcttagtgggcctgttgtgctgcgattgtcggcatggggagcacgtgagctacatcagtgcaactaccaaggaaatcttatggttgactttgtacctgatattcatatcgaggacgtgaagcgcgtcctattccactacaaagatcagcatgcgaagcacaaagtgagtaacacgttccccacggagtttggcctggtgaagagattttggagattcctgctagaacaggagagtttaaatggtgatacacactgggcctccatgccaaataatcatctaaacgcagtggccttccggttgaaacaatggacgtttgaggttgttggaaagggccaatttaaagatgaatttgtgactgcaggaggtgttccaattacagagatatcgcttggcactatggaaagcaagaaacagccaaacctgttctttgcaggagaggttcttaatgttgatggggtcacaggcggattcaattttcagaatgcatggaccggtgggtatatagctgggacaagcataggcacattggcatcgactagcaatctcccagagcagcagtcatgtttccagttgtaactgggagtttcagagaaggaaatggattgagttatgaaagagactcctcagatcatctgggaatgattcagggataccaacaagtttgcaatcaagataaggatattccaagatgaccaggatcagggagctacaattgctactgaattgtaacactaacctaagatggggtacatatgacaagaccgcacgattttggttacaatctaggtgtacaaagtgcaatctggaacgataatagttacaatcgagttaaacaagttgtgatttgtacttgaccgatcagagtgtgcatccagctatgattcttctgtctc

SEQ ID NO: 46802 - DNA, 4866 bp, Zea mays
  Clone ID: MRT4577_142694C.1
atgacggtgtgcaccgcccccgacgcgacttcaccaccgtccaacgaccaagaggtaccgtccgttttccatcccatacgttttcggttcagcttcgatccacctagcgaccccgctatggtgagcgccttcgtaaaggcgtatctaaaccttccggggtaccacatgtggtcgacctgggaccgactgacagctgtctcgaccttcggactagcggattctgaggaagaggacgaccccgactccggttgggatttctctgccctcaatgaccccggtgccatgcggggcttcatgtccgcatgtgaccactgcctctccggttgttctaatgatggccatgaccttgacgacgagggttacggcccaagtcatgaatgtttccacatcgatctgggagatcacaacgaaggcaaccacctcggtatgccagaggttgacgatccccctgggccctcatctcgcgttgacatcccgcgggagctagctgtcgtcccagtccctgtggggggccggcttgtacagctccgacagaacatcgaacaggagtgggtaggccgatcactcgccagagaagcctgtcatcgggcccaagacatccggcaccgcatcgtcgacaatgccagggcagcgctgcctccgaccttcagcgagtccggccaggacctagctgcagcggcgatgctgcttcgggccatgccgaagccatccaccaccgagggacggcgcatccagggcgaactcaagaatcttctagaaggcgccgcggttcgacgagctaagagctccgcctcccgtaggcgagctgacccctcggagaatcacgcagtgtcctcctggcgcattcgggaagcctcggtccatcccaagcgtacatgggacgaggtgcccaccgcccgggaacgcctcgacaacgagcaccaccatctcgaccatcgagcctgccttgacgagaagtactcgggggagacgaggccggagctatgcctcgcggactaccgactggcctgccagttgggaggggcggatgatgacaacttcatcatccgtaatctaccccttttcctctccgatgccgcccgagcctggctggagcatctgcctcctgcgcagatctccgactgggatggtctggtcaaagctttcgcggggaacttccaaggcacgtacgtgcgccctgggaactcatgggacctccgaagctgccgccagcagccaggggagtccctccgagagtacctccggcggttttcgaagcagcgcagcgagctgcccaacgttaccgactcggatgtcatcggggctttccttgccggcaccacttgccgagacctggtgagaaaactggggcgcaagactcccacccacgcgagcaaactgatggacgtcgccaccaagtttgcctcgggtcaagaggcggttgaagccatcttctggaaggacaagcagcctcagggggagccgaaaacagacgcccctgaggcgtccgctcagcggggcacgaagaagaaggccaaaaacaagtcacgagcgaagcacgacaccgcagacgtgaatctcgtcgctgcggccgagcacaggaaccctcggaaaccacctggaggggccggcgcgttcgacaagatgctcaaagagccgtgcccctatcaccaggggcccgtcaagcacaccctcgaagaatgtgtcatgctccgatgccacttccataagaccgggcccctggcggaggatggcaagggccatgacaacgacaagaaggagggcggcaaggaagagggattcccgaaagtccataactgcttcatgatctacggtgggcaggcggcgaacgcctcgactcggcaccgcaagcagaagcgccgggaagtctgcttggtgaaggtggaggcgccagtctacctagacgggtccgataagcctatcacctttgaccaaggcgaccaccccgacttcgtgccaagcccaggaaggtacccgctcgtcgtcaatccgatcatcggcaatgttaggctctccaaggtcctcatggacggaggcagcagccttaacatcatctacgctgagaccctggaactcttaggggttgatcggtctgaagtccgggccagtgcggcacccttccacgggatcgcacccgggaagcgaatcctacccctcggacggatcgacttacctgaagctctcacctttgaggtcatcgggtttcgaggaacctaccatgcggtgttgggaagaccatgctacgccaagttcatggccgtccccaactacacctacctcaagctcaagatgtcgggcccgaatgggatcatcactgtcagatccacgtaccgccacgcgtacgaatgcgacatagagtgcgtggagtacgccgaggctctcgccgagtccgaggccctcatcgccgacctagaacgcctctccaaggaggcgccgacgcgaagctgcatgccggcaacttcgaacctgttgaggcgtccctcggacatgcccggcataccgagggatgtcgccgagcactcactggacatcagagctagagcccgacccgtgaagcaaaccctgtgccgtttcgacgaggaaaagcgcagggccataggcgaggagatccacaagctactcgcggcagggttcatcaaagaggtattccatctcgaatggttagctaaccctgttcttataaggaagaaggatgggaaatggaggatgtgtgtagactacactggtctaaacaaagcatgtccgaaaattccctaccctctacctcgcatcgatcaaatcgtggactcccctgctgggtgcgaaaccctgtcattcctcgatgcctactcaggctatcaccaaatcaagatgaaagagtccgaccagctcgcgacttctttcatcacaccttttggcatgtactgttacaccacaatgccatttgggttgaggaatgcaagtgccacttaccagaggtgcatgaaccacgtgttcggagaacacatcggcagaacgtgtctgagagcgaaaggcgtgaaactcaatctcgagaagtgtgtcttcgaagtcccccgaggcatgctccttgggttcatcgtctccgagcgaggcatcaaggccaacccggagaaaatcgcggccatcaccaacatgggaccgatcaaagatttgaaaggagtacagagggtcatgggatgccttgcggctctaagccgcttcatctcacgccttggcgagaaaggcttgcctatgtaccgcctcttaaggaaggccgagcgcttcacttggacccccgaggccgaggaagccctcggaaaccttaaggcgctccttatgaacacgcccatcctagtgccccccgccgcagaagaagccctcttgatctacgtagccgcgactactcaggtggtcagagccgcgatcgtagtcgagagacgagaagaagggcatgcactgcccgtccagaggccagtctacttcatgagtgaagtgctttccgagaccaaagctctctacccacagatccagaagctgctctacgcagtgatcctgacacggcgaaagttgcgacactacttcgagtctcatccggtaactgtggtgtcatctttccccctgggggagatcatccagtgccgcgaggcctcgggagcgggcgctggcctgatcttcgtttcacccctcggaaagcatctccgctacgtcattcgcctccattttccggcatcaaacaacgtggccgagtacgaagcactggttaacgggctacgcatcgccgtcgagctaggggtccgatgcctcaacgctcgaggcgactcacagcttgtcattgaccaagtcatgaagaactcccactgccgtggccggaggatggaagcctactgtgacaaagtccggagcctagagaacaagttctacgggctggagctcaaccacatcgcccggcggtacaacgagactgcggacgagctggcaaaaatagcctcagggcaaacaacagttcccccggacgtcttctccagagacctacgtcaaccatccgtcaagatcgacgacgcgcccgagcctgaggaagcctcggtccagcccgaggcaccctctgccgagcccgaggtaccctcggccgcacccgaggcaccctcggccatcgaggaagaggccttgcccgttgaagaggaacagaatggggattgtgcgctcctgccgggggtgtcaattctacgcaaagcagatgcatctgcccgctcaggccttgcagacgatacccatcacctggccatttgctgtgtggggtctagaccttgtcggtcccttgcagaaggcacccgggggcttcacgcacctgctggtcgctatcgacaaattctccaagtggtaaacagcatcaggtccgagcaggcggtggcattcttcaccaacatcatccatcgtttcggggttccaaactcagtcatcaccgacaatggcacacagttcaccagaaaaaagttcctggacttctgcgacgaccaccacatccgtgtggactgggccgccgtagctcatcccatgacgaatgggcaggtggagcgtgccaacggttctggcatcggcagtgggagcggcagcaccctcggcattgattccaccctcggcggaaccaggcccagcctcggacggcgacccgagcaaaaggacctccacctaagggaggatgccaacacagcgccagcagatgtcttggccaagctccagcggctgctaccacatcttcctcggcctaggaagtcgccatctcccgggccgatgaagtctctttctgagccgactccgcgtctgtccgcgctaacaccgctgcctccggctccggctcatcgcagagcagccgagggttccaaaaattga

SEQ ID NO: 46803 - DNA, 453 bp, Zea mays
  Clone ID: MRT4577_142695C.1
tttttttttttttttttttttttttttttttttggggttttttttttttttttggtcttttttaacaatttttttgttccttttgggaggtcttgtgaatcagaaacccccccaaaaaaagggttgggccccgggaggggcccacccttggacagggaaaggggaccagaaaggggggggacaaaaaaggaaaaacccttggggggaaaaaaaagaaccggtgggaagaagcttttaaaggcgggagggaaacccgcctcacaaagaaaaaaggtttggaaaaaccccgggggggtttgtatggggggaatccaaagaaatggggtaaaaaaaaaatttctggggattatttacccgggaaaggaaccccccggaaaaagaggaagaaacccctggggaacgccaaagggtggggcccttagggggacaaagaaaaaccgggttttgggtagg

SEQ ID NO: 46804 - DNA, 358 bp, Zea mays
  unsure (1)..(358): unsure at all n locations
  Clone ID: MRT4577_142696C.1
gagatccatcccgttgtgtgctacaaccacttcatttctggtgctggtcatgctaagagggcagacatggccaaggcgatatatgaccgaatggaggcttcagggattgaaccatcaataacaagcaacgtgcttcttctcattagttatcttctgcaggcttttttacgttcaagagataaatcaaagcctctagaactgaaaggtgaagatatccaaggtcggaaggcaggaaggctcttgattggtgatctagttgcctcgtttgcaagtggtatcaganacatgagtgacttanagcatntgggagaggagatggaaaagtattttcctgttgatatttacacttataacatgc

SEQ ID NO: 46805 - DNA, 1881 bp, Zea mays
  Clone ID: MRT4577_142697C.1
atgcccggcataccgagggatgtcgctaagcactcactggacatcagagctggagcccgacccgtgaagcaaaccctgcgccgttttgacgaagaaaagcgcagggccataggcgaggagatccacaagctactcgcgacatggtttatcaaagaggtattccatcctgaatggttagctaaccctgttcttgtaaggaagaaggatgagaaatggaggatgtgtgtagactacactggtctaaacaaagcatgtccaaaagttccctaccctctacctcgcatcgatcaaatcgtggactccactgttgggtgcgaaaccctgtcattcctcgattcctactcaggctatcaccaaatcaagatgaaagagtccgaccagctcgcgacttcttttatcacgccttttggcatgtactgttacactacaatgccatttggtttgaggaatgcaggcgccacctaccagaggtgcatgaaccacgtgttcggagaacacatcggcggaacgcggggcatcgaggccaatccggagaaaatcgcggccatcaccaacatgggaccgatcaaagatttgaaaggagtacggagggtcatgggatgccttgcggctctgagccgcttcatctcacgccttggcgagaaaggcttgcctctgtaccgcctcttaaggaaggccgagcgcttcacttggacccccgagaccgaggaagccctcaggaaccttaaggcgctccttacaaatacacccatcctggtgccccccccccccgctgtaggagaagccctcttgatctacgtagtcgcgaccactcaggtggtcagcgccacgatcgtagtcgagagacgagaagaagggcatgcactgctcgtcgagaggccagtctacttcatcagcgaagtgctttccgagaccaaagtccgctacccacagattcagaagctgctctacgcagtgattctgacacggcaaaagttgcgacactactttgagtctcatccggtgactgtggtgtcatccttatccctgggggagatcatccagtgctgtgaggcctcgggtaggataacaaagtgggcggtggaactcatgggcgaaatgctatcattcgcctctcagaaggccataaaatcccaggtcttggcagacttcctggctgagtggactgacacccagttaccgacaactgcaatccaacccgagctctggaccatgtacttcgatgggtcactcatgaaaacaggggcaggcgctggcttgctcttcgtttcacccctcggaaagcatatccgctacgtcatacgcctccattttccggcatcaaacaacgtggccgagtatgaggctctagttaacgggctgcgcatcgccatcgagctagggcttgtcatcgaccaagtcatgaagaactcccactgtcgcgatcggaggatggaagcctactgcgacgaagtccggcgcctggaagacaagttctacgggctggagctcaaccacgttgtccgacgatacaacgagactacggatgagctagcgaaaatagcctcggggcggacgatggttcccccggacgtcttctccagagacctacatcaaccatccatcaagatcaacgacgcgcccgagcccgaggaagcctcggcacaacccgagaaggcacccgggggcttctcgcacctgctggtcgccatcgacaaattctccaagtggatcgaggtccgacccttgaccagcatcatgtccgagcaggcagtggtgttcttcaccaacatcatccatcgattcggggtcccaaactccatcatcaccgacaatggcacgcagttcaccgaaaaaaagttcctagacttctgcgacgaccaccacatctgtgtggactag

SEQ ID NO: 46806 - DNA, 1905 bp, Zea mays
  Clone ID: MRT4577_142698C.1
attcgcttccccataaacactcgcaaaatattgaatgccaggaaccttgaaactccaggcacaatttttaatcccacagcaaaaatcaaaaccaaaaaaacccagcagggcagcgacagaccgcactcccagtacagtctaccgaacgaaaaaacccgccggcgtcggcccccatcccctccgcgttgcccccgtgcccacggtcgtccgctcctcggtgaccgcggcggccgaggcgcccgcgcccacccccgtctccgccgtcgtcgcggcattgtctctctgctccgcccctcatgccgtctccagacgcctccaacctgtgccccgccgtccccccctgggcgccttggcccctcgattatagggcctttttggaaaaatttcccaccactgctacgtacaccaatatctatatttgatggagatgtttcaagtagacttattagtagggagcattcctcagtgctggtcgtgtcgtcgtcgcattttggtcggatctggtttccttggttcagggagggcttttttaaccatgtcgtggtgtcggttgtgtgagatctcctccactcagttgtttgagatgtactataggttctctcgtcgtgactcgtcagtggtgatttatgtatgggtgatatttgctactaaaaagaaactgatcttcttgaattataatcgcaacaacaaattgttgtataccctcatagtgtaccaagtgggatagaaaccacttcgatacaatgcatccatccacctctgagcttcaattatgtcaccattcttgcagaacccatgcacaattgtatcaaaagtccatcgatttggttgatacccttgcctgcatatcctttcatacaacctacaggcagagtccatccttcctgccatagagaaccctcgtaacagcatgttataagtgtaaatatcaacaggaaaatacttttccatctcctctcccaaatgctctaagtcactcatgtttctgataccacttgcaaacgaggcaactagatcaccaatcaagagccttcctgccttccgaccttggatatcttcacctttcagttctagaggctttgatttatctcttgaacgtaaaaaagcctgcagaagcttgtggcccatcaatgtgtgcaacagaagaacattagtcaagaaagctgaaacagggcgacccgtttctctgaaatcatcaacaacctttacagcattggtataatcgctaacagagcacagcaagagaagaagattctcgtagcagtacatgcttgggattataccattatcccttgcttccctaaagaacatcattgcctgctcaggcttcctaacttcacataggccagatataaatacattatataacctggcacaaggtgttttcttccgacgaacgaggttaaaaaaattaagtgcacccccgagatttttgctccttacataactaatgagaagaagcacgttgcttgttattgatggttcaatccctgaagcctccattcggtcatatatcgccttggccatgtctgccctcttagcatgaccagcaccagaaatgaagtggttgtagcacacaacgggatggatctcattccgcattaactggttgtctaacagatcaagaacctcggcatacctattcatttcacacaaagaacagacaactgacacatagaggctccggcttgggatgtgccccatttcttgcatttgcagtataagccttggcagcgcgtccaccctcttagtcaataccaatgctcgaatcaggttcttgtatgttgactcatagcgatataagcccacatggctcttgctgcttgctacatgaggcagttcgcatgccgcctccatgttcccactcttgcatagtgccgcgaggtacttggccaaaacagaaaa

SEQ ID NO: 46807 - DNA, 885 bp, Zea mays
  Clone ID: MRT4577_142699C.1
atgtacttcgatgggtcactcatgaaaacaggggcaggcgttggcttgctcttcgtttcacccctcggaaagcatctccgctacgtcattcgcctccattttccgacatcaaacaacgtggccgagtacgaggctctggttaacgggctgcgcatcgccgtcgagcttggggtccggcgcctcgacgctcgcgacgactcgcagcttgtcatcgaccaagtcatgaagaactcccactgtcgcgactggaggatggaagcctattgtgacaaagtctggcgcctggaagacaagttctacgggctggagctcaaccacatcgcccgacggtacaacgagattgcggacgagctggcgaagatagcctcggggtggacgacggttcccccagacgtcttctccagagacctacatcaaccatccgtcaagatcgacgacacgcccgagcccgaggaagcctcggcccagcccgaggtaccctcggccgagcccgaggaggcctcggccgagcccgagaatgcacccgggggcttctcgcacctgctagtcgccatcgacaaattctccaagtggatcgaggtccgacccttgaccagcatcaggtccgagcaggcagtggcgttcttcaccaacatcatccatcgattcgaggtcccaaactccatcatcaccgacaatggcacgcagttcaccggaaaaaagttcctagacttctgcgatgaccaccacatccgtgtggactgggccgccatagctcatcccatgacgaatgggcacgtggagcgtgccaacggtatgattttgcagggactcaaaccgaggatctacaacgacctcaacaagttcggcaaacggtggataaaagagctaccctcagtagtctag

SEQ ID NO: 46808 - DNA, 256 bp, Zea mays
  Clone ID: MRT4577_14269C.1
ggggaggaacaaaaaccttttttgggcatgagccctcctacataaaatgatttcgtttaacctttgggtcggcttattgcccctgcttttttagcttaaattcttcaactttgttggggccttttttaattgaaaaatggccttccggggccaattttttttttttactttaaaaagaccgggactgggcttgggttcaaattaccactggattggggtgggttttttaaaaactcccgaggggtttttcctaaaa

SEQ ID NO: 46809 - DNA, 311 bp, Zea mays
  Clone ID: MRT4577_1426C.1
tttttgtttttttttaattgttttctggtttacaaatacacggcactggaacacaaattttggccttgctcattcaatccctaaaatgcttctgggaccgcaaccaaattatttagaatccttcttaggtctccaagatgttttttgggaccatccttctttttggcaatctctttcttgcaactcttgatttttgatttgagacgagatattcgctcttttaatttaaaaagctcaaggcgcttcttggggagtacaagctttcatttgggtatgcttttctaagacaatgcgattttcttgagaaatgc

SEQ ID NO: 46810 - DNA, 1040 bp, Zea mays
  Clone ID: MRT4577_142700C.1
ggtgcgcgagtcggagctggtgcagggtcacccttcccctcggcctcaagagctctgcggttgccgcggccaagggcgtccgtggagaagcgggagcaggtggcggcgatggaagagcaaggcggccaggcggcgctcgggtgggcggccagggacgactccggcgtcctctccccctacagcttctccagaagggttcctaaagacgacgatgagcactacgtggtccgcgtccccgacggcctggcgctggaccgcaccgcgccgctgctctgcgccggcgtcaccgtgtacagccccatgatgcgccacggcctcaacgagcccggcaagcacctcggcgtcgtcggcctcggcggcctcggccacgtcgccgtcaagttcggcaaggccttcgggatgaaggtcaccgtcatcagcacgtccgccagcaagcgccaggaggccatcgagaacctcggcgcggacgagttcctcatcagccgggacgaggaccagatgaaggcggcgacggggaccatggacggcatcatcgacacggtgtcggcgtggcacccgatcacgccgctgctggcgctgctgaagccgctggggcagatggtggtcgtgggcgcgccgagcaagccgctcgagctgccggcctacgccatcgtgccgggcgggaagggcgtggctgggaacaatgtcggcagcgtcagggactgccaggccatgctcgagttcgcggggaagcacggcatcggggccgaggtcgaggtcatcaagatggactacgtcaacacggccatggagcggctcgagaagaacgacgtccgctaccgcttcgtcatcgacgtcgccggcagcctcggctctgccgcctaggcatggctgcaaaggtttcaatcagagcccagccgcaataatttgttagctaccgaatgaatgatggtctacgcttgttgatgagttggtgctttgtcgtggttttgtggatgtaataattcgatgtacaaataaaaaaaggggagacaaggtgcttgttcccttggtttggtgac

SEQ ID NO: 46811 - DNA, 236 bp, Zea mays
  unsure (1)..(236): unsure at all n locations
  Clone ID: MRT4577_142701C.1
anannnnncatatgtttgttggtaactgagattcactatcttgttccattgaacaccagttttagtcactgtctttacgacacataactcatactatatttctttgaatgacggcaccatccttgggcattggctgataccctagttttcccagatactgctctttcttctacgactgatggtttaatatccaccgcttagccggatccctaggtggggggtgctttccttttgga

SEQ ID NO: 46812 - DNA, 366 bp, Zea mays
  Clone ID: MRT4577_142702C.1
atgggggggtaatacaataccagcacaagaaacgttcaacacctcccggggcaaagggcaaacgccaccctgtgcctgacccactttatgggcacaacaccttattgggaccttacggcaccatgggcttcaacctttctcaaatacaaccttggccagggagtacctaggggggaccaatacaaataggggcccctacagtataccccagccggggtaaacccccaccttagccccggtccccttttgaggcctgctttttcttctccctgccttaaccttattttgggaaaggggatccttggcaaggggcaaaacaagtgtgagggttcaaccggatcacactttaaaggggggagggggggt

SEQ ID NO: 46813 - DNA, 997 bp, Zea mays
  Clone ID: MRT4577_142703C.1
ctgcaggttccggtgccggtcttcccgggcctaaagacgacgatgtcacgatcaaggtgctctactgcgggatctgccacaccgacctgcacgtcatcaagaacgactggcgaaacgccatgtacccagttgtcccggggtaaccgatccaatttcgctagcctagacgccccggatgctgttgcaaaactaacagcctctgtctgtctgaccccgtcggctggcgtggcgtggcgcgcaggcacgagatcgtgggcgtggtgaccggcgtcggcggcggcgtcacgcggttcaaggccggcgacacggtcggcgtgggctacttcgtggggtcctgccgctcctgcgacagctgcggcaagggggacgacaactactgcgcggggatcgtgctcacctccaacggcgtcgaccacgcgcacggcggcgcgcccaccagggggggattctccgacgtcctggtcgcgagcgagcactacgtggtccgcgtccccgacggcctggcgctggaccgcaccgcgccgctgctctgcgccggcgtcaccgtgtacagccccatgatgcgccacggcctcaacgagcccggcaagcacctcggcctacgccatcgtgccgggcgggaagggcgtggctgggaacaatgtcggcagcgtcagggactgccaggccatgctcgagttcgcggggaagcacggcatcggggccgaggtcgaggtcatcaagatggactacgtcaacacggccatggagcggctcgagaagaacgacgtccgctaccgcttcgtcatcgacgtcgccggcagcctcggctctgccgcctaggcatggctgcaaaggtttcaatcagagcccagccgcaataatttgttagctaccgaatgaatgatggtctacgcttgttgatgagttggtgctttgtcgtggttttgtggatgtaataattcgatgtacaaataaaaaaaggggagacaaggtgcttgtttcccttggtttggtg

SEQ ID NO: 46814 - DNA, 602 bp, Zea mays
  unsure (1)..(602): unsure at all n locations
  Clone ID: MRT4577_142704C.1
tgggtacctcgaggccggccggagtggagtaacgtcaacattgtaagacctggtcctcaagctgagaagttccgaacatatataaaccagattatggaagaatcaaagtcaggcaacaactcttgcaagcaatagcggttgaagcattgagcttgtctcattttgcacagaggagaggagcgagctccccatgtctcgagaacttcctggcatttggttcgggagcaagcatttttgcacctgttgtatgaacacacggccaaggtgagagatgggtctattctttccggaatttttttggtgtcatggcttcaagggcttagtgcacactagcattactggaagccaagagagcttactgtgggaatacggaagctaataggcattgtaattagtagcggtgagttgaatgaccggtgcctttgtttatagaactggtggaattgttggcgcttccatacagaattgagaaaatgaagaactggggatgttattgattggttggtcatggctgtggctgttgtggacacgtgtggttaatacaatgctttactgattttcccnnnnnaaaaaaaaaaaaaaaaaaaaaaaaaaaagcggcc

SEQ ID NO: 46815 - DNA, 262 bp, Zea mays
  Clone ID: MRT4577_142705C.1
gccgggccgcgtcggagtcggagctagtgcagggccatcccttccctcggcctcgagagcactgcggttgccgcggccaagggcgtccgtggagaagcgggagcaggtggcggcgatggaagagctgccggcctacgccatcgtgccgggcgggaagggcgtggctgggaacaatgtcggcagcgtcagggactgccaggccatgctcgagttcgcggggaagcacggcatcggcgccgaggtctaggtcatcaagatgaac

SEQ ID NO: 46816 - DNA, 1824 bp, Zea mays
  Clone ID: MRT4577_142706C.1
gccaccttgcccccgcaaccatcctccctccacagatctctccggggaggcagcaacagttatgtcatatcattgtcgcgtcctcgtccccgttccatttcattatccccccggagctggtgcgcgagtcggagctggtgcagggtcacccttcccctcggcctcaagagctctgcggttgccgcggccaagggcgtccgtggagaagcgggagcaggtggcggcgatggaagagcaaggcggccaggcggcgctcggatgggcggccagggacgactccggcgtcctctccccctacagcttctccagaagggttcctaaagacgacgatgtcacgatcaaggtgctctactgcgggatctgccacaccgacctgcacgtcatcaagaacgactggcgaaacgccatgtacccagtcgtcccggggcacgagatcgtgggcgtggtgaccggcgtcggcggcggcgtcacgcggttcaaggccggcgacacggtcggcgtgggctacttcgtggggtcctgccgctcctgcgacagctgcggcaagggggacgacaactactgcgcggggatcgtgctcacctccaacggcgtcgaccacgcgcacggcggcgcgcccaccagggggggattctccgacgtcctggtcgcgagcgagcactacgtggtccgcgtccccgacggcctggcgctggaccgcaccgcgccgctgctctgcgccggcgtcaccgtgtacagccccatgatgcgccacggcctcaacgagcccggcaagcacctcggcgtcgtcggcctcggcggcctcggccacgtcgccgtcaagttcggcaaggccttcgggatgaaggtcaccgtcatcagcacgtccgccagcaagcgccaggaggccatcgagaacctcggcgcggacgagttcctcatcagccgggacgaggaccagatgaaggcggcgacggggaccatggacggcatcatcgacacggtgtcggcgtggcacccgatcacgccgctgctggcgctgctgaagccgctggggcagatggtgatcgtgggcgcgccgagcaagccgctcgagctgccggcctacgccatcgtgccgggcgggaagggcgtggctgggaacaatgtcggcagcgtcagggactgccaggccatgctcgagttcgcggggaagcacggcatcggggccgaggtcgaggtcatcaagatggactacgtcaacacggccatggagcggctcgagaagaacgacgtccgctaccgcttcgtcatcgacgtcgccggcagcctcggctctgccgcctaggcatggctgcaaaggtttcaatcagagcccagccgcaataatttgttagctaccgaatgaatgatggtctacgcttgttgatgagttggtgctttgtcgtggttttgtggatgtaataattcgatgtacaaataaaaaaaggggagacaaggtgcttgttcccttggtttggtgacaaaaaaaaaaaaaaaaaaagcggacaaaaaaaaaaagaacgggatatctctaaaaaaaaaaaaaaaaaagcggccgggcggccgcccttttttttttttttttttttttttttttttttttttttttttttttttttttgggaacggtaatcatctggctaaaaaccgcataaaggtttttgggcgcaaaagggtgacaacttattacagttctgcattggggaaaaacaaaatctcactttattttcgcttcgggaaacaaaacatgcttgttcacacggggatcatactttttaaactcaagctttttggggatgccacgaggattcttgcgcttcacgt

SEQ ID NO: 46817 - DNA, 123 bp, Zea mays
  Clone ID: MRT4577_142707C.1
ggctttcgttcttatactcaaaacgcggggattcaaagtttattagaattgtagaatcactccggtaaggatggtccaggacccagaccagtgagagtgcatccatggtattgaatgtaacaa

SEQ ID NO: 46818 - DNA, 957 bp, Zea mays
  Clone ID: MRT4577_142708C.1
cattgggaccctcgaggccggccgggatacggcctgtttggattctcttctaccgtcgcttcagccaccaggcttcccaccgaagccacccccgcaacggtccgatagaagcgggcttccgtagaaagctgggctagctgggcatctgtccagtccttggctctcgccacgctagggtttctttggtccccgctgcctcgcatcgctcctgtctcgccttctaggcggagctgggattcttctcaatgacgacaacgagattctaagttcttcacgacgattctgatcccttcaaacttcatcgatagtacttctccaaagatccagttcaagttggtgtccctccacaaccgagttaaccaaggaagttcaagaaacgcattggtcgaacctacactagagaccaaatgaaaaataagtgggacaccctcaaaagcatgtacacacaatggaagacactgaatgagagggcaacaggcctcgggagggatcctcacacaggatcaataagtgctatgaatgactagtgggcaaagcaaaatgaggctgtctaatgttcaagaatcaaccactagaaaacgagggggatctccggatcatgtttgggccaattgtgtgcactaataaaactaccttaattctaggaggtcaaccaagggatgcagcttcattttcagatgagcttgaagaagatgatctagaattagtgggagagaacccaactatggttacgatatgttccgcatgcgttgtatcgtgtttcgttgactacatgattcgttagttaatgattacgacctcattgctagtcgaggtgtgtcaacgaaggaggtcttagcaatgttcctttgggcatgtggtgaaccgcagtcatttagacaacttaggaacaagtttgggtactctttggaaaccattagtcacaagttcagtgaagtgctcgaggcactttttagg

SEQ ID NO: 46819 - DNA, 575 bp, Zea mays
  Clone ID: MRT4577_142709C.1
ggggggggggggggggggttaaaaaaaatttttttttcttatttgtttccttttggggtttgaccgtcccagtttaggcaaaatttcaccaggtttagaaaaaaattgccccgacgggaaccaacattgcccggacccctgggcccacccgggggggggggggggggccccccctgggggccgggtttccctaaaaaaaaaaaaaaaaaaaaagggggggcttaaggaaaaaggtggcccccgggggggaaaaaaattcttccaccctgccccccaaaagaggaacccgggggtttaaatggaaagcccggggggcccaaagggggagctaacccacatgaattggggggggggaaaaagccggtttccccccgggaaaaaaaaattgcccgacgcataaaaaaaaaagcccacccccggggggagggggggggccaaaaaaggtacaagggggggggtcttttcccccgtgggacggggaacaacagcttgggcgcctcccccttaggcccgcacaacacgccggggggggggggcgctggtttttccccccggggggaaatattttttttttg

SEQ ID NO: 46820 - DNA, 265 bp, Zea mays
  Clone ID: MRT4577_14270C.1
tcatgattctgaaagcaggaaaggagatcggcactttactcaagaaggcgggctcccttgccactcctttaccttgagatgacgacgacgatgaagaagaagcatcagcagcagctcctcctcctcctttctctcatgtttctcgttgctgtcacagcaaccgctgttgctgtcgaaccacattcacagctgcatgtgcaggtgcatcatcatcatttagcacagattatgattaacaggtccaccagattccttttattcttat

SEQ ID NO: 46821 - DNA, 515 bp, Zea mays
  Clone ID: MRT4577_142710C.1
actcctaagggcgattgggttcctcgaggccggccgggacaccacacttccgtcaaaaaaccacgagactgagatgcaatacttatgccgccaatagtggactctcggccctctgtcctgctcgccatggtgatgatgcgctcgctctcacttcgccggtgttgtgcgcaccaccccccatctactgcaacaactgccagggacgcaagccagaccacctgatccccacccatcacatagtggccaacatatcagatggagagacgacacatcaaggcgcagatgacttctactatacgctacaaggaggacccgactggcagcttggaactcgatgaaaatgcccgcgcgtccaccacccactatactgcgacttggctgtgatgacagcccctacgcatctgcgacgagatcatccatgcccattaccgcgtgcggcagcacgtataagaccacactcagcatctaatagatctctggtgattacttacatttcataagacttcatctaaagg

SEQ ID NO: 46822 - DNA, 242 bp, Zea mays
  Clone ID: MRT4577_142711C.1
cggacgcgtgggtttacgagctttcaaagacgtctgatctgtccatcgcacaatagcacacaaatgattcaatctgccgtgctaaatgattgctgcgttaagtaggacggtggattgtagcgtcatcactctgattttccccatctcgatttggttggagcagctgaatctccgcacagacaattagagtagctgcattggcggggaaagcgcaagaagctcatcaaaaatggcggaacaag

SEQ ID NO: 46823 - DNA, 401 bp, Zea mays
  Clone ID: MRT4577_142712C.1
ttttcttttaccaattttgctgtcaccaatctagggggaggtgccaacattgatgaaacaccatttaacttgcgactattgtatactccatctccgaactctacttctacaagtactggccaacttgagtacgggccagctagtattaggcgtggacaaggctggtggctgaagggaacccgctcttcaaaactcatagcactattcgtgccgaatgggaggagtatactctcatgaaatgcacatattacggagctgctactatcctgataccatccacgtccaggcgagctactcttccaacactcattaccagagaagccctgtgcatttcagctgatacattggggggacgggaatgctcggcactgctaaaacaaggtctggtagctgtgcctttg

SEQ ID NO: 46824 - DNA, 286 bp, Zea mays
  Clone ID: MRT4577_142713C.1
gggacggttcttccggcggctcattgacgaggagcggcggaggctggacgacggcgtcgagagcgagaacaaaagtatgatggctgtgctgctcactctgcagaagtcagaaccggagaattacagtgatgacatgatcatgtctctgtgcttctccatgttctctgcgggaacggaaaccactgcgaccacggcggaatgggcgatgtcgctgctcctgaacaaccccgacgtcctgaagaaggcgcagggggaaatcgacgcgcatgtggggaattcccgcctg

SEQ ID NO: 46825 - DNA, 159 bp, Zea mays
  Clone ID: MRT4577_142714C.1
atggcgaaggtcgggaagacaaacgggacgttcgacgacggtgaaaacgatgccacagcgcgggtcggtgtcgagactggtgtcggacaaatgcgaggaggaggcgcctactcccacaccctctgtcgagaatggggtggcgtgaaggcggaggcatga

SEQ ID NO: 46826 - DNA, 338 bp, Zea mays
  Clone ID: MRT4577_142715C.1
attcggctcgagggagactgcattttcttaccttatgtgtgtaacctcgattcttgcgggttgctgtaggacacgacttttctgttcataatgttgtggcttgaaaaatactaatcctgggaaaacacaactgcttggcgttccacaacaacaggaaaaaggaagccaactttgaatagcattactgaataatcaaatgtaatggattggctccaaagaaaagaggcggctcccgctaggggtcactgcataccggctattgattacgggcccgtgccttaaatggtcccctttcttctgctacaaggtacttttggaagctggcattcctgttacta

SEQ ID NO: 46827 - DNA, 314 bp, Zea mays
  Clone ID: MRT4577_142716C.1
aaaaaaaaaaggccattccaagctggttgtttagaaaactacaggcgttacataaaaagaaaaatgtcccaacgttttttttcaaacagcaatgcaacaaactttgcccccaaatgggctttttaccgttgctttccaaaaactttaaagtccccctatttttggaaaccatcatttttgcaaatccccaaacagaatttaaaaggtccccatttttgcctgggtagaattttttttgttgcaacaaaaaaggaaactttccccgtttaaaaggtggtttaaatttcttttttcccagtttggggaaagaaaaa

SEQ ID NO: 46828 - DNA, 134 bp, Zea mays
  Clone ID: MRT4577_142717C.1
ccgcctacgtttctagagcagaggatacaagctagacaagcgcgcacctaggcgacctatctaattcaagcgaccatatggcgccaggtgaagaaagcatgaaggaactggaccgcaaggtccgctagggcgaa

SEQ ID NO: 46829 - DNA, 272 bp, Zea mays
  Clone ID: MRT4577_142718C.1
ctcgagccggccgggccggacacagagcacacaacacagtcgtcgtaggcagcgagcgtctctgctctcccacgcatcgcgccaaggaagagagagagaacgccgctccccttctcggcgtcactgatgcgatggacatcactactagaactctgtttgtgtggctacatatctatctgactaaaggtctgtagatctgtgcatcaaggctggctatgtcggagaaccaatgatggaccgcattgacctctagtggctacagattgaggacg

SEQ ID NO: 46830 - DNA, 2607 bp, Zea mays
  Clone ID: MRT4577_142719C.1
atgtcaggcgttgtcctcgcacctgagacaaagacgggtgtcacttccccgcaacgtgccaaccccaagcggactgatgatgccagcaccctcgcaaacgacttgctgggcgttagccttgtacctgagataacggtgcagtccgtccccgacgcgacttcgccaccgtccatcgaccaagaggtaccgtccgttttccaccctgtcccttttagatttagcttcgatccaccaagcgaccccgcttcgctaggagggacggacgacgacaacctcatcatccgcaacctcccccttttcctctccgatgctgcccgagcatggctggagcatctgcctcctgcgcagatcttcgactgggacgacctggtcaaggccttcgcgggaaacttccaaggggaatccttgcgagagtacatctggcggttttcaaagcagcgcaccgagctgcccaacatcaccgactcgaacgtcatcggggcattcttcgctgacaccacgtgccgggacctgcgtggctcaaaaaagaaggccaagaagaaggcgcaagcaaaacgcgacgccattgacgcggatctcgtcgccgctgctgagcacaggaatccccggaagcctcccggaggagtcaacacgtttgacaagatgctcaaggagtcgtgcccctatcacaggggtcccgtcaagcacgacatgctccggcgctacttcgtcaaggcgggaccctcggcagaaggtggcaaggaccaaggcaacaacaagaaggggggcgacaaggatgaggagttcccggaggtccgcgactgcttcatgatctacagtggacaggtggcgaacgcctcggctcggcaccgcaagcaggagcgtcgggaggtctgcttggtgaagcccatcaccttcgaccaaggcgaccaccccgactatgtgccgagcccaggaaggtacccgctcatcgtcgaccccatcatcgacaacgctaggctcaccaaggtcctcatggacggaggcagcagcctcaacatcatctacgccgagaccctagggctcttggggatagatctgtccatgatccgggccggtgcagcaccctttcacgggatcgtccccggtgccacctaccaaaggtgcatgaaccacgtgttcggagaacacatcggcataacggtcgaggcttacgtcgatgacatcgttgtcaagaccaggaaagcctccgacctcctctccgacctcgaagtgactttcgggtgcctgcgcgcaaaaggcgtaaaactcaatctcaagaagtgtgtctttggagtcccccgaggcatgctcctggggttcatcgtctccgaaagaggcatcgaggccaacccaaagaaaatcacagccatcaccaacatgggacccatcaaggatttgaaaggagtacaaagggtcatgggatgccttgcggctctgagccgcttcatctcgcacctcggcgagaaaggattacccttgtaccgcctcttaaggaaggccgagcgcttcacttggacccccgaggccgaggaagccctcggaaacttaaaggcgctccttacaaatgcgcccatcttggtgccccccgctgcgggagaagccctctttatctatgtagccgcaaccactcaggtggttagcgtcgcgatcgtagtcgagagacgagaagaggggcatgcactgctcgtccagaggtcggtctactttatcagtgaggtgctatccgagaccaagattcgctacccacaaatccagaagctactgtacacagtaattctgacgcgacgaaagttgcgacactacttcgagtctcatccggtgattgtggtgtcatccttccccctgggagagatcatccagtgccgagaggcctcgggtaggatagcaaaatgggcggtggaactcatgggcgaaacaatttcatttgcccctcggaaggccataaaatcccaagtcttggcggacttcgtggctgaatgggtcgacccccaattgccgacagctccaatccaggccgaactttggaccatgtacttcgatgggtcgctgataaaaacaggagcaggcgctggctttctcttcatctcacccctcgggaaacatgtgcgctacgtgctgcgcctccattttctggcatcaaacaacgtggccgggtacgaggctttggttaacgggttgcgcatcaccgtcgagctatgggttcggcgcctcgacgctcggggtgactcgcagcttgtcattgaccaagtcatgaagaactcccactgtcgcgatcaaaaaatggaggcctactgcgacaaagttcggcgcttggaggataaattccacgggctggaactcaaccatgttgctcggcggtacaacgagactgcggatgagctggctaaaatagcctcggggcgaacgacagttcccccggacgtcttctccagggacatatatcaaccatccatgaaactcgacgacgtgcacgaacccgacgagtcctcggcccagctcgaggtaccctcggtcgccgagggtgaggccttgcgcattgagggagagcggaatggggttgagccaaaccaaaactggcagaccccgtacctacaatatctcctctga

SEQ ID NO: 46831 - DNA, 1638 bp, Zea mays
  unsure (1)..(1638): unsure at all n locations
  Clone ID: MRT4577_14271C.1
tgttggcctgggcgttgtcgatggtgtcagaagactccacctcgagggtgatagtctttccagtgagggtcttgacgaagatctgcatgcctcccctgaggcggagaacaaggtggagggtgctctccttctggatgttgtagtcggcaagtgtgcgcccgtcctcgagctgcttgccagcgaagatgagccgctgctggtccgggggaatgccttccttgtcctggatcttggccttgacgttgtcaatggtgtcagaggactccacctcgagggtgatagtctttccagtgagagtcttgacgaagatctgcatcttggatcgacgaggggatcggagatcggggaccgggctgtgtgtgcgttccgagcaaaaggagagaagatgaggttgacaacggtccacgccccgagccgatcggcggaccagcaggagccgttccgcatacggccggtgcgcgtcgccagcccccatccgcttccctcccggcaatttcaagcactctttgactctcttttcaaagtccttttcatctttccctcgcggtacttgttcgctatcggtctctcgcctgtatttagccttggacggagtttaccgcccgatttgggctgcattcccaaacaacccgactcgttgacggcgcctcgtggtgcgacagggtccgggccggacggggctctcaccctcccaggcgtccctttccagagaacttgggcccggtccgtcgctgaggacgcctctccagactacaattcgggcggcgaggccgcccgattctcaagctgggctgctcccggttcgctcgccgttactaggggaatcctcgtaagtttcttctcctccgcttatttatatgcttaaactcagcgggtagtcccgactgacctggggtcgcggtccgagggcaagctcggtcgctcgatgggtccttagggccggatggccggccgcgcgccgggacgctgcaccgagaacaacaacttgatgtcgcccaccacgtgctgcgcccggcgcggttcgccggcagcccctgcttcgtcccacctcgccctgcggcgcggggggccagacgccacgtccctcgccccgcgggggggtgttgggagtgtcttttggcgtgacgcccaggcagacgtgccctccgccagaaggcttcgggcgcaacttgcgttcaaaaactcgatggttcgcgggattctgcaattcacaccaggtatcgcattttgctacgttcttcatcgatgcgagagccgagatatccgttgccgagagtcgtgtcgattaaggtgtaaccgctgccctgggagcggaaggcgggccgaccgctccgcggggcaggaggtagtactggtgttccttggcgcccggggcgccgtgggttctttttcgcggcaccccccttccccgcgggaggttcgggggggcagcgtgccgggccggagcccggcggcacgggtgactcgttcgcggtctgttttgtttaagggtcacggcaatgatccttccgcaggttcacctacggaaaccttgttacgacttctccttcctctaaatgataaggttcaatggacgttctcgcggacgtcagngcggcgaaccgcncncgtcacngcgatccgancacttcancggac

SEQ ID NO: 46832 - DNA, 355 bp, Zea mays
  Clone ID: MRT4577_142720C.1
tatatacacaaaaaagagaggagattaaatatttttttttatcatcaacaaacatacatatcaacataaataattacacattcttgtaatgaccacccccaaaacgaaaacaaagaaaaccccacactacaaatgtacacgcacctcatccatacgacgactgtacaaaaaataacaaattaatatccatgcatgccaactattcgtctgcttttacttaataacttttcactccttgcgggtacacttaaatatcacacaaacttaatccaatttaccagcagcaagcaaccaagcaagcaacggagccaggaggcaaatctttgcatgctcgatccgtcaacaaaatcactta

SEQ ID NO: 46833 - DNA, 972 bp, Zea mays
  Clone ID: MRT4577_142721C.1
atggcggccgacaacccgcccgccggcggcgaaatcgacgacatcttccccgcatggtgggagaacaacattcgagctcgccccgtcctctcccccgccaacagaggaggaggcggggcaaccaaggccaagcgggaggccacgcttcatcggctgtcgagcgaatcgacgtccctagcgccccaacggagggcacgccgggcgtcgacctcgcgttcgagacgaaggcgagcgccgtccccccgcgacacgccaatcctgagcaagtggacgacgccagcgcactcgcggagagcttgcaggacgtcgccctcgtacctgagacgacggtgcaaccagtccccgacgcgactatgtcgctcctcgtcgaccaaaagtgccatgcgggactttatgaccgcatgtgactactgcctctccgactgttccgacggtagccgcagccttgacgacgaggactgcggcccaagccgcgaatgtttccacgtcgagctaggggatccctccgaaggcaaccatcttggcatgccggaggacggtgatcctcctaggccggtgcctcgcgccgacatcccgcgggagctagctgtggtccccgttccggcggggggtcacgacccacagctcgagcaagtccgcggggcgcaggctaggctcgacgagggagcaggagcgcttgagacgatccgccgggacgtcgggcaggcatgggcgggccaacccccggccggagaaatgcgccacctgccccaaggtttccagcaccgcgtcgccaacgacgtcagggtcaggccgctgcccgcatccagcggggtcggtcagaacctggcagccgcagcgatgctcctccgcgcgatgccggagccatcaaccaccgagggtcggcgaatccagggagagctcaagaatctcctggaaggcgctgcggcccgacgggccgagagctctgcctcccgaaggcaggggtactga

SEQ ID NO: 46834 - DNA, 876 bp, Zea mays
  Clone ID: MRT4577_142722C.1
atgcagcacctagagccctcatgggaaacgctttccgacaaggtttctactggccaaccgcagtggccgacgccactaggattgtacgctcctgccgggggtgtcaattctacgcgcgacagacacacctgcccgctcagcatcatgtccgagcaggcggtggcgttcttcacaaatatcatccatcgctttggagtcccaaattccatcatccccgacaatggcacgcagttcaccaggaaaaagttcctagacttctgcgaggaccaccacatccgtgtggactgggccgccgtagcccacccgatgacaaatgggcaggtggagcgcgccaacggtatgatcttgcagggactaaaaccgaggatctacaacgacctcaacaagtttggcaagcggtggatgaaagagctacccttggtggtctggagcctgaggacgacactgagccgggccacgggcttcacgccgtttttcctagtctatggggccgaagccatcttacccacggacttggaatacggttccccgaggacaaaggcgtacaacgaccgaggcaaccagaccagccaagaagattccttggacctgctggaagaggctcgggacatggccttactacactcagcgcggtatcaacagtctgtgcgacgctaccacacccgaagggttcggccccgggacttccaagtgggggacttggtacttcggctgcgacaagacgcccgaggacgccacaagcttactcctccctgggaggggccgttcattatcgccaaagttctgaagcccgggacatacaagctggccaacaatcaaggcgaggtctacaacaacgcttggaacatcgaacaactacgtcgcttttacccttaa

SEQ ID NO: 46835 - DNA, 3531 bp, Zea mays
  Clone ID: MRT4577_142723C.1
atgggcagtcttcagcaacctttccagcccgggacggtactccgttttgggagtcttgagttcatgtccctcgacggcagctacgacatgatactccttcccccgccgtgcgacagcgacaatggcggccgacagctcgcccgccggcggcagaatcgacgacgtcttccccgcgtggtggaagaacaacattcgagctcgcctcgtcccctcccccgccgacggaggaggaggcggggcaaccaaggccaagcaggaggcggcacctcgtcggctgtcgagcgagtcgacggcgccggcgccccaacggggggcacgtcgggcatcgacctcgcgtctgagacgaagacaagcgtcgtctccccgcaacacgccaatcccaagcaaacggacgacgccagcacgctcgcgaaggacttgctgggcatcacccttgtacctgagacgacggtgcagtcagcccctgacgtgacttcgtcaccgcccgtcgaccaagagcgcaccgagctgcccaacatcaccgattcggatgtcatcggcgcgttcctcgccggcaccacctgccgcgacctggtgagcaagctgggtcgcaagacccccaccagggcgagcgagctgatggacatcgccaccaagttcgcctctggccaggaggcgtcaactcagcgcggcgccaagaagaaaggcaagaagaagtcgcaagcgaagcacgacgccgccgacgcggaccttgtcgccgtcgccgagtacaagaaccctcggaaacctcccggaggtgccaacctcttcgataagatgctcaaggagccgtgcccctatcatcaggggcccgtcaagcacacccttgaggagtgcgccatgcttcggcgccactttcacaaggccgggccacccacggagggtggcagggctcgcgacgacgataagaaggaagatcaccaggcaggagagttccccgaggtccgcgactgcttcatgatctatggtgggcaagtggcgaacgccttggctcggcgccgcaagcaagagcgtcgggaggtctgttcggtaaaggtggcggcgccagtctacctagactggttcgacaagcccatcaccttcgaccaagacgaccaccccgaccgcgtgccgagcctggggaaatacccgctcgttgtcgaccccgtcatcggcgacgtcaggctcaccaaggtcttcatggacggaggcagcagcctcaacatcatctacgccgagaccctcgggctcctgcggatcgatctgacctccgtccgggcaggcgctgcgcctttccacggtatcatccccgggaagcacgtccagcccctcgaacgactcgatctacccgtctgctttgggacaccctccaacttccgaagggagaccctcacgttcgatgtggtcgggttccgaggaacctaccacgcagtactggggaggccatgctacgctaagttcatggccgtccccaactacacctacctcaaactcaagatgccgggccccaacagggtcatcaccgtcggccccacgtaccgacacgcgtatgaatgcgacgtggagtgcgtggagtacgccaaggccctcgccgaatctgaggccctcatcaccgacctggagagcctctctaaggaggcgccagacgtgaagcgccacgccggcaacttcgagccagcggagacggaagcagtgctcgtcgactttctccgtgcaaacgccgacgttttcgtgtggagttcctcggacatgcccggcataccgagggatgtcgccgagcactcgctggatatgcgagctggagcccgacccgtgaagcagcctctgcgccgattcgacgaagaaaagcgcagagccataggcgaggagatccacaagctaatggcggcagggttcatcaaagaggtattccatcccaaatggcttgccaaccctgtgcttgtgagaaagaaaggagggaaatggcggatgtgtgtagactacactggtctaaacaaagcatgtccgaaagttccctaccctctgcctcgaatcgatcaaatcgtggattccactgctaggtgcgaaaccctgtctttcctcgatgcctactcagggtatcaccagatcaggatgaaagagtccgaccagctcgcgacctctttcatcacacccttcggcatgtactgctatgttaccatgtcgtttggtttgaggaaatgcgggtgcaacgcctacgtcgatgacatcgtagtcaagacgagggaagcctccaacctcctttccgaccttgaagtgacattccgatgtctcaaggcgaaaggcgtgaagctcaatcccaaaaagtgtgtcttcggggttccccgaggcatgctcttggggttcatcgtctccgagcggggcatcgaggccaacccggagatgatcgcggccatcaccagcacggggcccatcaaggacttgaaaggcgtacagagagtcacgggatgtcttgcggctctgagccgttttgtctcgcgcctcggcgaaagaggcctgcctctgtaccgcctcttaaggaaggccgagtgcttcacttggacccctgaggccgaggaagccctcgggaacctgaaggcgctcctcacgaacgcgcccatcttggtgccccccgctgccggagaagccctcttaatctacgtcgccgtgaccactcaggtggttagcgccgcaatcgtagttgagagacaagaagaggggcatgcattgcccgtccagaggccagtctacttcatcagcgaggtactgtccgagaccaagatccgctatccacaaattcagaagctgctgtacgcggtgatcctaacgcggcggaagttgcgacactacttcgagtctcatccgataactgtggtgtcatccttccccctggggaagatcatccagtgccgagaggcctcgggtagaattgcaaagtgggcggtggaaatcatgggcgagacgatctcgttcgcccctcgaaaggccatcaagtcccaggtcttggcggactttgtggctgaatgggtcgacacccagctcccaacagctccgatccaaccggaactctggaccatgttcttcgacgggtcgctgatgaagacaggagcaggcgcaggcctgctcttcatctcgcccctcgggaagcacctacgctacgtgctacgcctccacttcccggcatccaacaatgtggctaagtacgaggctctggtcaacgggttgcgcatcgccatcgagctgggggttcgatgcctcgagcgcggcggacgggcgcaggctgtgcgaggtccgcgtcgcgtcgcagtcgcagagaggtggagaaggcgtcggcggctgggaggcggcgcaggggagctccggcgattgggcagggagggagggggaggggccggtggggggaggaaggccgacggctgggggccggcggcggctgcagggctaggagaagcccctggcggctgtagctgctgttggacaagacctaaacctaaacctaatttgataccatgttggaatacgaatccatacccctaa

SEQ ID NO: 46836 - DNA, 1317 bp, Zea mays
  Clone ID: MRT4577_142724C.1
atgctcctagggttcatcgtctccgagcggggcatcgaggccaacccggagaaaatcacggccatcaccaacatgggccccatcaaggacttgaaaggagtacagagggtcatgggatgccttgcggccctgagtcgtttcatctcgcgcctcggcgaaagaggcctacctctgtaccgcctcttgaggaagaccgagcgcttcacttggaccctcgaggccgaggaagccctcgagaacctaaaggcgctccttaccagtgcgcccatcttggtgccccccgctgccggagaagccctcttgatcaacgtcgccgctaccactcaggtgttgcgacactacttcgagtctcatccggtgactgtggtgtcatccttccccctaggggagatcatccagtgccgagaggcctcgggtaggattgcaaagtgggcggtggagatcatgggcgagacaatctcgttcgcccctcggaaggccatcaagtcccaaatcttggcggactttgtggctgaatgggtcgacacccagcttccagcagctccgatccaaccggaactctggaccatgttttttgacgggtcgttgatgaaaacaggagcgggcgcgggcctgctcttcgtctcacccctcgggaagcacctccgctacgtgttgcgcctccatttctcggtgtccaacaatgtggccgagtacgaggctctggttaacgggttgcgcatcgccatcgagctaggggtccgacgcctcgacgctcgtggcgactcgcagcttgtcatcgaacaagtcatgaagaactcccattgccgcgacccgaagatggaagcctactgcgatgaggagagctacccctcgacagagccgaagctcggcgactggcgcggcgcgccaagtcattcgtcttgctgggtgatgggaaggagctctaccatcgcagcccctcaggcatcctccagcgatgcatatccatcgccgaagggtttttactggccaaccgcggtggccgacgccactaggattgtacgcacctgccaagggtgtcaattctacgcaaagcagacccacctgcccgctcaggctctgcaaacaatacccatcacctggccgtttgctatgtggggtctagacctcgtcggtcccttgcagaaggcacccaggggctacacgcacctgctggtcaccatcgacaaattctccaagtggatcgaggtccgacccctaaacagcatcaggtccgaacaggcggtggcgttcttcaccaacatcatccatcgctttggggtcccgaactccatcatcaccgacaacggcacctag

SEQ ID NO: 46837 - DNA, 309 bp, Zea mays
  Clone ID: MRT4577_142725C.1
acaatggcgaccaagatattgtgcctaggatatgctccctgctctgcccgcatgtgctgctaacgcgacaatactacctcaatgctcacaagctcctatagctttcctccttccgccatacctcccatcaatgatagcccaagtatgtgaaaacccagctcttccaccctataggctgcatcaagcaatcgcagaacgctacatacctgcatcaccctagatccaacaatcgactgccatatccttggtgcagccattgttacaaaccattatgtcacagcacatgaagaaactcgtgctatctgtgat

SEQ ID NO: 46838 - DNA, 375 bp, Zea mays
  Clone ID: MRT4577_142726C.1
gaaccgactccaccaaccgatactacataacctccactttacataactcgacaccatgaaattactcctgcttgccctatatcacctgtcgctcacctcaacaaatgcctccattacaccacaatgctcactctctcatacaccaattatacctcaactgcttccaccatatactctcaactaccttctatcacctagctcagcaaccctacaaaccataacaagcgcttactgaacaacttcatacaacaaccaactcaccaattccaacaccaatccttggcacatctaaccataccaacactatcaccacaccagcaacaactgatgctaccatcaactgaccaactaaatgtctacaaccctgtacactac

SEQ ID NO: 46839 - DNA, 2538 bp, Zea mays
  Clone ID: MRT4577_142727C.1
atgtcgggcgttgtcctcgcacctgagacagcgacggatgtcgtttccccgcaacgtgctaaccccaagcggactgatgacgccagcacgctcgcgaaggacttgttgggcgtcagcctcgtacctgagataacggtgcagtccgtccccgacgcgacttccccaccgacatcgaccaagagattcagcttcgatccaccaagcgaccccgcttcggtgagcgctttcgtaaaggcatatcctaaccttctggggtaccatatgtggtcatcttgggaccgactgacgatcgtctcaacctacgggcccccgggttccgaggaagaagacgaccccgactctggttgggatttctccaggctccgtgatcccagtgtcatgcgagacttcatgaccgcatgtgactactgcctctctggttgctctgacgatggccacagccttgacgacgaaggttgtggcccatgtcgcgaatgtttccacgtcaatctgggggatcacgacgaaggcaaccacctcggtatgccaaaggataacgattcccctgggcctgcttctcgcgttgacatcccgcgagagctagctatggtcccagtccccgcgggggacgggacgcctgcagccccggatcgcctcggcaacgagcaacaccatcgcgaccgtcgagcccgcctcgatgagagggtgcaccgaggctaccaccccaggcgtggaggacgctacgacagtgaggaggatcagagtccctcgcccgaaccaccagacaaccacaagaaggagggcgacaaggaagaggagttcccggaggtccacggctgcttcatgatctacggtgggcaagtggcgaatgcctcggctcggcaccgcaagcaggagcgccgtgaggtctactcggtaaaggtggcggcgccagtctacctagactggtccgacaagcccatcaccttcgaccaaggcgaccaccccgactgcgtaccgagcccaggaaggtacccgctcgttgtcgaccttgtcatcggcaacgctaggctcaccaaggtcctcatggatggaggcagcagcctcaacatcatctacgccgagaccctcgggctcttggagatcgaactgtccatgatctgggccggtgcggcacccttccacaggatcgtccccggtaagcgtgtcttgtcccttgggcaacttgatttgcctgtctgcttcggaaccccctccagcttccgtagggaaaccctcacgttcgaggtggtcgggttccgagggacctaccacgtggtgctaggaaggtcgtgctacgccaagttcatggtcgtcccgaactacacatacctcaagctcaagatgccaggccccaacggggtcatcaccgtcggatctacgtaccgacacgcgtacgaatgcgacatggaatgcgtggagtacgctgaggccctcgccaagtccgaggccctcatcaccgacctagagtgcctctccaaggaggtgcctgatgtgaagcaccacgccggcaacttcgaaccggctgaggcggttaagtccgtccctcttgaccccagcaatgatgccgacaagaaacagcacctgcgctgttttgatgaagaaaagcgcagggccataggcaaggagatccacaagctaatggctgcagggttcatcaaagaggtattccatcccgaatggttagctaaccctgtgcttgtaaagaaaaaaggtgggaaatggaggatgtgcgtcgactacaccgggttgaataaagcatgtccgaaggttccctaccctctgcctcgcatcgatcaaattgtggactccactgctgggtgcgaaaccctgtcattcctcgacgcttattcaggttatcaccaaatcaagatgaaagagtccgaccagctcgcgacttctttcatcacaccttttggcatgtattgttatactactatgccatttggcttcaggaatgcaggtgcgacataccaaaggtgcatgaaccatgtgttcggagagcacatcggccgaacggtcgaggcttacgttgatgacattgttgtcaagacgaggaaagcctccgacctcctctccgaccttgagacaacattcaagtgtctgagagcgaagggcgtgaagctcaatcctgagaagtgtgtcttcggagtcccccgaggcatgctcctggggttcatcgtctccgagcggggcatagaggccaacccggagaaaatcacggccatcaccatcatggggcctatcaaagatttgaaaggagtacaaagggtcatgggatgccttgcggttctgagccgcttcatctcgcgcctcggcgagaaaggattacccttttaccacctcttaaggaaggtcgagcgcttcacttggacccccgaggccgaggaagccctcggaaacttaaaggcactccttacaaatgcgcccatcttggtgccccccgctgcgggagaagccctcttgatctacgtagccgcaaccactcaggtggtcagcgccgcgattgtaggatctaggacaccggctagaggggggtga

SEQ ID NO: 46840 - DNA, 830 bp, Zea mays
  unsure (1)..(830): unsure at all n locations
  Clone ID: MRT4577_142728C.1
aagattatatgtatatgtttatttantaataggtttattatatataaaatatggatatattatatgtatgtagtattattcatgnctaaagaacattancaccgnancaccgctagctanaaccagtgacaaagggctaaataaattaaacaccaaatctccataaatagatattgatttgwtagtaaagcaaatagtagatgaaatagattcaattgttcaatgtaggtaggtaattaaattaaaaggtagtagaatataagttatatatatagttagttagaggtagggtaggtgtaaggtgcaattattgtttgtatggagttaggggaaatgaggaaccatggatgtatgaagatgaggaggtattatagtaatagtagcattattttattactaggcttgttggtgtttagggtttgttggcgtgttcggggacggagccggcggtgggcgacccgggcatgccgccgaagccgctgaagcccggggagccgccgccgaagaggggcatgctgccgctgcngggcaagctgaacccgggtaggctgctgcmgctgccgggcatgctgaacctgggaatgctgctgcwaggaatgctgcmgccggggaggccgccgaacgchggggacgcgccgcygchgaggcggtcgaaggggcgggaaggtytgcggctgcaccaccgcgttgtctttyttttccgtygtcgtggttttgatgttctttgctttggcggtcgawaaggccagggccaaggccagcagagctgctgccaccattattttggaagactttgccatcgcgtgctagcttttggttgattggttttt

SEQ ID NO: 46841 - DNA, 3201 bp, Zea mays
  Clone ID: MRT4577_142729C.1
atggggcccatcaaggacttgaaaggcgtacagagggtcatgggatgtctcgcggctctgagccgcttcatctcacgcctcggcgaaagaggtctacctctgtaccgcctcttaaggaaggccgagtgcttcacttggacctctgaggccgaggaagcccacgggaacctgaagacgctcctcacgaaggcgcctatcttggtgcccccagctgccggagaagccctcttggtctacgtcgccgcaaccactcaggtggttagcgccgcgattgtggtcgagaggcaagaagaggggcatgcattgcccgttcagaggccagtctacttcgtcagcgaggtactgtccgaaaccaagatccgctacccacaagttcagaagctgctgtacgcgatgatcctaacgtggtggaagctgcgacactacttcgagtctcatccggtaactgtggtgtcatccttccccctgggggagatcatccagtgccgggaggcctcggggaggattgcaaagtgggcggtggaaatcatgggcgagacaatctcgttcgcccctcggaaggccatcaagtcccaggtcttggcggacttcgtagatgaatgggttgaaacccagctcccaacagctccgatccagccggagctctggaccatgttcttcgacgggtcgctgatgaagacaggagccggcgcaggcctactcttcatctcgcccctcgggaagcacatacgttatgtgctacgcctccatttcccggcgtccaacaatgtggccgagtatgaggctctggtcaacgggttgcggatcgccatcgagctaggggtccgacgcctcgacgctcgcggtgactcgcagctcgtcatcgaccaagtcatgaagaactcccactgccgcgacccgaagatggaggcctactacgatgaggttcggcgcctggaagacatgttctacgggctcgagctcaaccacatctcccggcgctacaacgagacggcggacgagctggctaaaatagcctcggggcggacaacggttcccccggacgtcttctcccgagacctgcacccaccctccgtcaagatcgatgacacgcccgagcccgaggcaccctcggtccagcccgaggtaccctcggctcagtccgaggcaccctcggctcggcccgaggcaccctcggctcggctcgaggcgccctcggttcagcccgaggtaccctcggcccccgaaggcgagacgcttcacgttgaggggaagcaaagcggggtcgcgcctgatcaaaactggcaggccccgtacctgcaatatctccaccgaggagagctaccctccgaccgagccaaagctcggcgggtggcgcggcgcgccaagtcgttcgtcttgctgggagataagaaggagctctaccaccgcagcccctcaggcatcctccagcgatgcatctccatcaccgaaggtcaggaactccttcgagagatacactcggaggcttgcggccatcacgcggcgcctcgagcccttgtcaggaatgctttccgacaaggcttctactggccgacggcggtggccgacgccactagaattgttcgcacctgcgaagggtgtcagttctacgcaaggcagacccacctgcccgctcaggctctacagacgatacccatcacctggccttttgctgtgtggggtctggatctcgtcggccctttgcagaaggcacccgggggctacacgcacctattggtcgccatcgacaaattctacaagtggatcgaggtccgacccctaaacagcatcaggtccgagcaggcggtggcgttcttcaccaacatcatccatcgcttcggggtcccgaactccatcatcaccgacaacggcacccagttcaccagcagaaagttcctggacttttgcgaggatcaccacatccgggtggactgggccgccgtggctcatcccatgtcaaatgggcaagtagagcgtgccaacggcatgattctacaaggactcaagcctcggatctacaatgacctcaacaagttcggcaagcgatggataaaagaactcccctcggtggctcggatcttgacgcttggagggagcagcagcaccctcggcgtcgacaacaccttcggcgaggtccgacctagcctcggacggcgacgcggtccgaagatctccactctgaaggatgacgtcatcgccacgcccgggccatcgccgccagggtcttctccgagagtccggctcgggcaggcggctcggctggtcaccccgaggccttggccggctgtcccccgcggacatcagctcgacccgaggcctcggcaggcctcgacaaccacaatgaacaaaaacactggcattcaaagtgccattacaaacggaactccggttccacctccgcaggagaggccgacccacggacccacgcgggaggtagagctccggctcaacccggcctccaccccagcgaggatgatgaacatccttgaagctgagggtgggaccaagatcgcagcccggcttgcttcttcccacccaggggctggtggtcaccgtctcccacagagttgcgttcccccgatgacaaggcggaaagacggcgggtatcccccatccgggggcttggaaggtggaaaggcacgatgcataagggagcgcgaagacatggtcgccttccaagggggtcaccctccttttaaaggcgactctccctacttgcgtccccagccgtcgcgggctgagtcttctccaacacgctccaaggtcctcccctgcggcgcgggggctgggtcccacacgtcatgcaagccggctcagagcagaagaagccaaactgccgtgcgcggcggtgcctctggcaggagaagcgggcgacgcttcaccttcgccataatgaccgcgtcagaaaagggatcgggaaagggggataccccggaaaggatccttccccgtgaaggaaccaggctccgagcctccctactgatcagaggttcgaaggctggcccctcggaagggttcaacagccgcctcagatcgcgtgggctccacacccactactggtcagaggttcgaaggctggcccctcggaagggttcaacggccgcctcaggctactcgggctccgcgcccactactgatcaggggttcgaaggctggcccccgaagggttcacagccgcctcagacacagagcgagggatga

SEQ ID NO: 46842 - DNA, 598 bp, Zea mays
  Clone ID: MRT4577_14272C.1
gccggccgggctggatacccatccacgcaaatccctcgatctactactactactagcgtgggactgatactagacacacctggcaggcagcttcgcatgtggttactaacagggaaggggactaccggctcgaacgaagcggaagtcccgtggccccggcccgattccgccgccaccgtcgccgtcgcccgcagcaccaccacaaggataagttcacaggaggaacacacggaagtgatccggcgcatgccaagcgtgaccaacctactggaacacaaagttggaaacgctttcggacgtgccacaactggggacaaaaggacagctaaacctggagcagtaactgctacgaaacgaatgaaaaccttgtctccagggctaaatgatccggcccgtggaccgcaataactccccctcccggttgtactacgagcttaagtattgcagcaggtgaaaggtggccaagggccattgcacctaggtaacgcaagtggacaaagtcctgttctgggccaattacgagtataaggtcgtgatccgaagaaaaattcttttcaataacaaaaaaaaagaaaaaaagcgtcccctaggtcgccta

SEQ ID NO: 46843 - DNA, 812 bp, Zea mays
  unsure (1)..(812): unsure at all n locations
  Clone ID: MRT4577_142730C.1
gtaaaacttaagaaaagcgaagcattcactagagaatgtgagataggaattcggcacgaggtggcttgaaggttgttgaatcagtcaacgaacttgcacagatcatgaaggatctttcagttcttgtgattgatcagggaaccatcatcgatcggatagactacaacatacagaacgttgcagcttcagttgaggaaggttacaaacaattgcaaaaggctgagaggacccagaagaaagggggcatggtgatgtgtgccactgtccttgtcattctgatcttcatcatgatagtccttctgattttgaagaccattttctgacatacttagctatctcattttaatggttgatgaatggtggccaagcacacaccacgctcatctattcatgtgagtgaggattgcaccatgcctgcatatcaagaacgccacaaattcatttgaatagcggcgatacgactcactgatctgaagatggaaccatcttgagtcttggccacaannnnngcatcgttgcagatgtagacatgccctattcatacaggactcttaattttagagagagagaaatctgaagaggattgtttgacacgtttcaccttccagtttgccttggagcaaccgggttaggctggctgtgtatgcctccgtatagagtgagttgtatcatacatcagggtatcggaaatcagaaggtaggttcagttcttgtgtcatctcttttctgctatatgttgtctgcccttctattctgagctagctttgaagtggcatgtcattgtaccatatattcctaacaattgttctgac

SEQ ID NO: 46844 - DNA, 598 bp, Zea mays
  unsure (1)..(598): unsure at all n locations
  Clone ID: MRT4577_142731C.1
acgcgtgcggattattagaataaattttaattccaaatatccaaacatggcctaaataaatactgaattggacattgtatttaaatagacaacagggaacatgagcatatcaccagacacacactagaactcataaaacagggatactatgctattagtctctcttaaatgcagtacatggaagcaaggtttatgatcagatttttgtataccagagaacactcaagtctcccaactgcccgcctgccgaggtgagctccgaatgcctgccctccacctctgatccgtgttgcggcttcgctcctgtgtggagcaagttaattttttttaacatgcatcaacatagatgtcgtccaattacgactgaagcaaaaaaatattgcaaggctaaacactcgggtcaattgctatgtctaggtaattagttttttgtttaagtttcatttagtctatatgtttggattttccccttgcctacagaccagcctaggtattcatcacttgtgaaaaacagaatatcagtggtgatggtaaaaaaagtatggatggctaaaagtctggctcatttcttgtanggtggatgtggcttcaccagcac

SEQ ID NO: 46845 - DNA, 1590 bp, Zea mays
  Clone ID: MRT4577_142732C.1
atgggcagtctccagcaacctttccagcccaggacggtgctccgtttcaggagtcttgagttcatgtccctcgacggtagatacgacatgatactccttcccccgccgtgcgacaacgacaatggcggccgacagcccgcccgccggcggcggaatcgacgacgtcttccccgcgtggtggaagaacaacattcgagctcaccccgtcccctcccccgccgacggaggaggaggcggggcaaccaaggccaagtaggaggcggcacctcgtcggctgtcgagcgagtcgacggcgccggcgccccaacggggggcacgtcgagcatcgacctcgcgtctgagatgaagacgagcgccgtctccccgcaacgcgccaatgccaagcaaacggacgacgccagcacgctcgcgaaaggcttgctgggcgtcacccttgtaccagagacgaaggtgcagtcagtccctgacgtgacttcgtcaccgcccgtcgaccaagaggggggtccctccgaaggcaaccatcttggtatgccggagaatggtgatctccctaggcctgtgcctcgcgttgacatcctacgggagctagctgtggtccccgttccggcggggggtcatgacccacagctcgagcaaatccgcggggtgcagaccaggctcgacgagggagcaggaacacttgagccaatccgccgggacgtcgggcaggaatgggcgggccaacctccggccggagaagtgcgtcatctaccccagggtatccagcaccgcatcgccgacgatgtcagggtaaggccaccaccgacttccagtggagtcggccagaacctggctgtggcggcaatgctcctccgcgtgatgtcagagccatcaaccaccgaggggaggcgaatccagggagagctcaagaatctcctggagggcgccgcggtccgacgggccgaaagctccgcctcccgaaggcaggggtacccctcggaacatcgcgccgcgacttcccgattcatgcgggaagcctcggtccacaccgggcgcacgcgcaacacagcgcctacggccccgggtcgcctcggcaacgagcaccatcaccgcaaccgtcgggcccacctcgacgagagggtgcgccgaggctaccaccccaggcgtgggggacgctacgacagcggggaggatcagagtccctcgcccgaaccacccggtccgcaggctttcagccgcgccatacgacgagcgccgttcccgacccggttccgaaccccgactactatcacaaagtactcgggggagacgagaccggaactgtggctcgcggactaccggctggcctgccaactgggtggaacggacgatgacaacctcatcatccgcaacctccccctgttcctctccgacaccgctcgcgcctggttggagtacctgcctccggggcagatctccaactgggacgacctggtccaagccttcgctgatgtcatcggcgcgttcctcgccggcaccacctgccgcgacctggtgagcaagctgggtcgaaagacccccaccagggcgagcgagctgatggacatcgccaccaagttcgcctctggctag

SEQ ID NO: 46846 - DNA, 481 bp, Zea mays
  Clone ID: MRT4577_142733C.1
ttttaaaaagggccacaagacctgaccctaccttttgatttccgataacctgatgtatgatacaactcactctatacagaggcatacacagccagtctaacccggttgctccaaggcaaactggaaggtgaaacgtgtcaaacaatcctcttcagatttttttctctctctctaaaattaagagtcgtgtatgaatagggcatctctacatctgcaacgatgcaaaaattgtggccaagactcaagacggttgctggcctagccattatgaatctgggcaggagaaccatcttcagatcagtgagtcgtatcgccgctattcaaatgaattgcggcgttcttgatatgcaggcatggtgcaatcctcactcacatgaatagatgagcgtggtgtgtgcttggccaccattcatcaaccattaaaatgagatagctaagtatgtcagaaaatggtcttcaaattagacggctatcatgatga

SEQ ID NO: 46847 - DNA, 1653 bp, Zea mays
  Clone ID: MRT4577_142734C.1
atggacgagtctggtatgaaaaaggagatcggcctcctgggactagtaattgtatcacatttgagtcccagaggattggggcgcttcatccggtcccgagacctccaggtgggcgacctggtgcttcggctgcgacaagacgcccgagggcggcacaagctcacgccccccctgggaggggccgttcgtcatcgccaaagttctgaagcccggaacatacaagctggccaacagtcaaggcgaggtctacagcaacgcttggaacatccaacagctacgtcgcttctacccttaagatgttttcaagttgttcatatacctcgctcccacgcaaagtttagtcatcaaggaagggtcggcctcacctcggcaaagcctgaccctccctcgggggctaaaaggggggaaccccctctgcgtcgaattttttcctcgaaaaaagatcctttctgccagaatgtctttcgtgcttttcgactacttcgaaagtggatcctgaaaacgacggagtacacaaccctatggatgggtaagagtgcgcgtaagcggcaaggccgaccgagccgagggactcctacgcctccgggatacggatacctcactcatcaccttccacgagaagcaactctcgctcacacagacaattctgttatcaatgaaaaagtccagatactcgaaacaagaggaaaagagacgcagctttacaacacgacgagggtgtgtttgggcctcggcggccgcagaaaacacacactacaagataatccgatcctgcaggctcggatctggacagttgaagggagccacagcaccctcggcgtcaacaacgccttcggcgaggcctcgacagccacaatgaacaaaaacactggcattcaaagtgccatacaaacggaactccggttccacctccacaggcacgaacaaccccactcgatggggggcctgcggagcgacagaagaccgacgaacggcacgtcgtcacccgctccagcagcggcgacaacgacgacccccgctccgggtggccgaactgcagcagcgatggcctcagggcggacgctgctgcaaccttgccctcgcctacgccgacgctcgaggggcgaggacaagtacgaagagccggaggcccgaagcgcggatggtggcggtgatcccgtcggcaacggggacttctcgagccgcctccacctcggcaccgacgataggggtcgtcagccctccggcagatccccactcagatcctcccggacgagtggggcaccgacctccgcgtggaggcgtcgtaccggtgcaaaggcaggaccgccccagaacacgaacaccgccctggcaacgcgcgatatcttgggcggtcctcccggaccgggaaagggggataccccgaaaaggacccttctccgtgaaggaaccaggctccgagcctccctactgatcagaggttcgaaggctggcccctcggaagggctcaacagccgcctcagagcgcgtgggctccacacccactactggtcagaggttcgaaggccggcccctcggaagggttcaacgaccgcctcaggctactcgggctccgcgcccactactgatcaggggttcgaaggctggcccctgaagggttcacagccgcctcagacacagagcgagggatga

SEQ ID NO: 46848 - DNA, 338 bp, Zea mays
  Clone ID: MRT4577_142735C.1
cattgggtacctcgaggccggccgggagacaattctttctacgccacttcttcagctccttgtcctcacgagtggaaatcctagagaccgagcatggagatgatcccgagcgcagggcggttggacctcctttccaccctgaagttagaataagatgacggtgttggtcgatggctgcccaacgtctcctctccaaacgggagctgcctgcccaccgccgaggacgaagacgtcccaattccagcgctctaaaggggaccatctgatgaactgggcacgtacaggcttccatctgagccatgagcttagaggtcgcttggtgcccggtgcaaatgatg

SEQ ID NO: 46849 - DNA, 1380 bp, Zea mays
  Clone ID: MRT4577_142736C.1
atgtccggtgcacaccggacagtccggtgcccccttccgaccgttggctcagccacgtgtctcgcgcagatcgtgcggccgacctttggcctggccgaccgttggctcaccggacagtccgctggaggaggctcgggacagggccttactacactcggcgcgataccagcagtccctgcgacgctaccacgcccgaggggtccgaccccgagacttccaggtgggcgacctggtgcttcggctacggcaagacgcccggggaaggcacaaactcacgcccccctgggaggggccattcgtcatcgccaaagttctgaagcccggaacatacaagctggccaacaaccaaggcgagatctacggcaacgcttggaacatcaaacagctacgtcgcttctacccttaaaatgtttccaagttgttcatatacctcgcacccacgcaaagtttagtcgtcaaggaagggtcggcctagcctcggcaaagcccgaccctccctcgggggctaaaaggggggagaccccctctgcgtcgaatttttcctcgaaaaaggatctcttttcagcagaatttctttcgtgctttttgactgcttcgaaaagcggatcctggaaacgacggagtacatgtaagcagccaaggccgaccgagccgagggactcctacgcctccgggatacggatacctcactcatcaccttctgtgataagtaactcgcgttcggataaagtgattccgcggaccgaacaagtcttaacgtccggaagctcttctgccaagactgtccttcaagccttctcgactgaatcggtgacagggcctcatggacgggcgaaagtacgcgtaagcggcaaggccgaccgagccgagggactcccacgcctctgggatacggatacctcactcgtcaccttccgcgagaagcgactctcgcccacgcaaacatccctgttaccgacggaaggtccagatgctcgaaataagaggaaaaggagacgcggctttacaacgaagcgagggtgtgttttctggcctcggcagccgcagaaggcacacgctacaagacaaactgatcctgcaggctcgggtcttcacaccgaagggggccgtaccaccctcggcatcgacgacgccttcagcaaggtccgacccagcctcggatggcgacgcggtcctgggacttctccgggaatccggcccgagcaggcggctcggccggttacccctggggcctcggccaagcatcttccaagggcgccagcccgacccgaagcctcgggtcatcaactccgacgtcgagccccgctgatgggcaacccggctaagctccggccaaccaggttcccattttcgagccaactccgcctctgttcgtactga

SEQ ID NO: 46850 - DNA, 448 bp, Zea mays
  Clone ID: MRT4577_142737C.1
aattcggcacgagggtgcgtcgcaccatggggctagagctacacactgccacggcacgctcttcttccacggtcctgtatcctactgcattgcccaggccatggcgcgatggcttcctagatcgcacttcacgcccgcgcgggcttctttgcagtgtgcgtgcaaaccaacgttgctgcgttctgaggcgcaaccgtcgagtccgtctcatctgagtacccctactaggatactgaccaggactagaaggacgaggcagaattctatgaggacgattaagatgacggggatgccttcgagagcgatgatgacttgccaggttttgggtaggccggccttctttattgagaacagacctgttgcctagatctagacaccaggactgtgactctccctgctcaatgaaaacgggctatgaactacatacctgatcccttgacagatgccc

SEQ ID NO: 46851 - DNA, 293 bp, Zea mays
  unsure (1)..(293): unsure at all n locations
  Clone ID: MRT4577_142738C.1
tttgttttttggaaaataaatagtaccaacgatgtgatttagacagnaatgcaacagacattggacccaaatgtgcgttataccgtaggatttcagacattgaagttctgntatatatggaaacgattattttagcaaatnttataaaggggggggggggggtagttagatatgcctgggtagcattttttatgaagaaaaaaaaaggatattttttttgtttgcgaggttgattgagttttttatttgtgagatgggtgagagtgaaattagagattatttggatgctttaa

SEQ ID NO: 46852 - DNA, 548 bp, Zea mays
  Clone ID: MRT4577_142739C.1
ctgtacagcgataggggctagcccgtagcctgaagcatgaccggccggagctgtggtcagcgtgcgcacgtggggatagcctaactcgctctgctagacgctaccatgggtgatcaccaccgccgcgcgacgggagggggaggggggctacgagcgacctgcaccgcggtggcggcctgcacagagaggcgcagcagcagcaaaaacagggcgccatgatgacagcactcaaggccgcgacggtcgggaccttcggagggaccatgctggagctgacggtgctgatcctggacggcaccgtgatcgcgctcacggtggccaccctggtacaggagatgcttcagcccggtgctggacgccaggcggcatcttgctgtcgcttatggggtcctgattagtgaccaggagccatcgagctgtctatgctatgtgagtactacggtcgtggaacagctgcctgtgacattcacaccacccgctgggatctctattggcacgagaagaatcacagcggaagggcaatgctcatctattatgggttgcattat

SEQ ID NO: 46853 - DNA, 232 bp, Zea mays
  Clone ID: MRT4577_14273C.1
cttagtatgaattagattcagctgcataatgcctgtcacttgcgtacttccatgtaagggaattctcaaaaggaagcaaaatcttgcccaaaaaaaaaaaaaaaaaaaaaaaacaaaaaaaaaaaaaaaaaaaaaaaaaatacaaaaaaataaaatccaaaaaaaatctcatgaacatacaaaattcattagctaacattataagaaacccatatcataccaaccacacata

SEQ ID NO: 46854 - DNA, 804 bp, Zea mays
  unsure (1)..(804): unsure at all n locations
  Clone ID: MRT4577_142740C.1
ggtacccccgggtctggccgggtacgtcacctaaaggcatcttggatgggataccgacccaagacaaaccctgacggggtccctcccgaggagtcagatctaggtgccgctggcgaacaccgtcgcctttcatgcgcggaccgtccgactcaacaaagagaagaacccgctcctgccaagttgcggaccgtctggtctcagaccgcagtccgtctgcgcctccacagagagcaccgtcgtcggtacacctcgcagtgattgcgcctagatcaacgccaacacactttttaacgaccccgttagggaaaaggcgtgaggatctatcaaatcggccctcaatggtcggttcaatagatcactctgatgtctctcccagcaatatcatcaagccgactttggaggttctgtcggctgaagatcagcaagatttcaaggaacacaaagaacaactgatcaaagaggcacatgcgaagttcttggccaacttcaaggtggatcgaaatcaaaaggtcaccccgtagtaggcgactgatctgtcctcgctcctacctactacaactacccccaatgtaagtgaaacaaacatccaatctcttagatcttgcatagatgaccaacgagtacaaatgcaacaaaattatggggtatgcaagaagaatagaaaatgctagcgcgtgcatttgataaatgtgctattacggattttccatcacgcaatgttaaaactaaagaaatacacatgatccatcagctacaaatggacatgangcaatcccaccactttacgagatgtcgatgaacaca

SEQ ID NO: 46855 - DNA, 652 bp, Zea mays
  Clone ID: MRT4577_142741C.1
cgatccgcttcccctttcccgaatcgccaaatccgctcgccgccgtcgccgtaaaaaccctctccccgcctccgctaaccccaccgccgcggagagatggtgctgtgggagatcacggccatcaccgcctacttcctcggcctccgccgcacctaccgcctcgcgctccgcggccagcgccgcctcatcgggcccaaccaccccaggctccgcgacttcgtctacaggcggacacgttctatattcgacgtcgcagtctcagtgcacaagaacattcaggagagggacttggaagttggtcggaacgtcggaaacgcggtccttcgctggctcgaccgcatgaagccatcagcacagatccgcccccaccctccaggcccgccaggctcccccccggagcaactcaggcacctttcgaccatgaataaggccgtaggagctcagaagcctgcctcaaagacctcgacgcacgactcgagcggcaagatgctgttctcgcccctgaacatccggcccaagtccttccctatcctccccacgatgatgcagtccaccaggatcagcgcgagcaaccagtgcaggcgcctctccagctcgccgttcccgtccgtcaccgccaggaggaaggacatgatggagggtgtcttccgga

SEQ ID NO: 46856 - DNA, 383 bp, Zea mays
  Clone ID: MRT4577_142742C.1
ataaggggacggatgcactgtgggttggtccctgaatagcagcgattacacttggccctcaggctgaccaagccaggttaaatgaacccttaacgaggcgccgaattccataccttgatgagagcatttaaatcgttgtacaacaacacatgtgtcacctaactatggttaggttaggtaggggcactaactgatggtgggcccgccgaactaaacctgtgaacaaaagtagaagattactaagcacacaaggggggaatgagcctgggcagtgaccagggtgcactaggctttcattttgttgaaatcctcgataaagcacatagctgatgattatggcaccctgatgatgtaataggcacacgacttttacatcataacaa

SEQ ID NO: 46857 - DNA, 561 bp, Zea mays
  unsure (1)..(561): unsure at all n locations
  Clone ID: MRT4577_142743C.1
cctgcctatctatctagcgagacagacgagatgaaggctatttagctacaatgaagtgtggcagaaagaatgaagcaggtgtagggccggcgctgatgcttctccaggtggtgtgatgtccgacaacacggacaggccgcctcctgcacctgcatacctacaccgggctggtgctggacctcatcactgagtggtttgaccatccaatgggacgaaacctctgtgtggaaatctgtgacttccataccatgctatactctacacatgggacggccatgaaaagatcaaagctgtctgatgcgatatctggaatatcgttattagtgatgtgagctgggacaatgacgacgtcatcaccgagatgatccagtaattgcatgtgtagggtgatctaacaaaaaaagtataagaactgaggacacgcaggacgggccacaaaaacctactgcaatgcccccaaagtgatccagatacttcttatgttcccatcaccgactgtgaatagaacgcttgcggtattactgtgcaaaactgagtcctgtgagaaatggngatccgctc

SEQ ID NO: 46858 - DNA, 636 bp, Zea mays
  Clone ID: MRT4577_142745C.1
atgattcgcgattgcgatcactaccactgagatggtgaatgtcagagctgcacctccatgaagatctcaaactcgaacacgttcgataaagacgcggcgaacatctgggactcgtgctcgcacgacccgcactaggaccgcgtgttgtatacgctacatcgtctactatcacacttcctcttccatggacacgtacatggcgtctgtttcctggcacccctcatcggctttcaggtcctccgtgaactactaatacactaccctcaagggcaacgtccatatgattgacatctgctggatcgctgtcgactctctccgggtgcgcgcgcagagatgcccgagataggtgctgcttggcgacgttgctgtctggtactctaacttcgccgagcgcgagcacgccagcgaaatattggcgtgccatgccctctagctgttctcacgatgctgtatagagtttagccacgatatcataccggcgggcaacgtttcgcggtaccacgagcgcctcacgtgctcggtggtatcggtcactgaattggcgaaatgatgcttgttacacacttgacaatgattgaggaaactactgtcagattctcgcctgtacctcactgatacatactcatattcgagatg

SEQ ID NO: 46859 - DNA, 771 bp, Zea mays
  Clone ID: MRT4577_142746C.1
ctctcccattttcctctccaccccgcaacccacgcagacgcagctcgaccgaccacaactgtgcgcagcagcggcggccggcggagaccgtatcgtaccatggcgatggagggctacgaccgcgagttctggcagttcggcgaccagctccgcctccagacggccaccttctccggcctctccctcggcgactccatctggtcccccgccgacgccgccccccgcgcccgcaacgccgaccccggcctcttctccccctcccaggcggcccacaacaacgccggaaccggattcgccgccgccaagatgaacggcagcctcaacgggcccggcctcatcggctccggcaagctcgccttcggcgccaccaccaccagcaaggccgaccgctacaacaacgtcagcctccccgccgccgccgacgccaagccctacgccaacgccaacggcctgtacggtgccaagcccaacaacaccaataacaacggcttcgggctcaacaagatggctgccggcggcgggggctacagcaacttcaacggcggcaacgagggggtgaagagctacttcaacaagtccatcgggaggccggccagcaacaacaacagcagcagcaacaacttcagcggctacggcggcaagaagggcgccgcggacggcaagaagaagcacgccaagaacgagcgaggggacaacaaccacggcgccgcgtcgggagaagcggtcaagacgctgccggcggccgaggcgctgccccgaaacgagcccatc

SEQ ID NO: 46860 - DNA, 793 bp, Zea mays
  Clone ID: MRT4577_142747C.1
cattttcctttccatcccgcaacccacgcagctcgactcgcagcagcagcagccggcggagatcgtatcatggcgatggagggctacgaccgcgagttctggcagttcggcgaccagctgcggctccagacggccagcttctccggcctctccctcggcgactccatctggtcccccgccgacgccgccccccgcgcccgcaacgccgacctcttctccccctccccggcgcccgacaacaacaacgccgccaagatgaacggcaacggcctcaacgggcccggcctcatcgggtccggcaagctcgccttcggcgccaccaccaccagcaaggccgaccgctacaacaacgtcagcctccccgccgccgccgacgccaacgccaagccctacggcaacgccaacggcctatacggtgccaagcccaacaacgccaccaacaacggcttcgggctcaacaagatggctgccggcggcgggggctacggcaacttcaacggcggcaacgacggggtgaagagctacttcaacaagtccatcggcaggccggccagcaacaacagcagcaacaacaacttcagcggctacggcggcaagaagggcgctgccgacggcaagaagaagcacgccaagaacgagcgaggggacaacaaccatggcgcggcctcggagaagcggttcaagacgctgccggcgtccgaggcgctgccccggaacgagcccatcggcggctacatcttcgtctgcaacacgacaccatggaggagaaactcaagaggcagctcttcggggt

SEQ ID NO: 46861 - DNA, 497 bp, Zea mays
  unsure (1)..(497): unsure at all n locations
  Clone ID: MRT4577_142748C.1
cgtgcaatcacaacggggtgaggggggcnaatcacccacacccaggaagaggagagcaatggggtgctagcaggggagtggtgatctcgtgccacagcgaagggtnagttctacgcgcacatgaccaaggggcaggaaggcggcaaggtggtggtcatctacttcacgggggggtgggncnngccatncctcnccatcnccccactgttcntcnaacactccaannaattcactcaggtgngcttccttaagggggacgtggactaagtgaaggaaggcaccggngcctacgagggctaggcgatgcctaccttccacttcgtcaagaacggcgagaggggctctaccatcgggggtggcatgaaggacnagctcctggcccanatcgagaagcatggcgcgcctgcgcctgcgtctgcgtctggctaaaggagatcagtcgtcggcgtcaataagggccagcacgtatgggtggaaatggtggcggtatcagttct

SEQ ID NO: 46862 - DNA, 991 bp, Zea mays
  Clone ID: MRT4577_142749C.1
acttttactagtagagcaagcggaggaggaagaaacctctcaaatcaaaaccctaagcaagtcggcggcggcggcggcggcggcggcgcaagcatcccctactcaccccaggcccagcctctcccctcccatccttccccaacatgctcccccagatgcgccccctcccttcccgcccagccatccacgccgtccaccggcgcacctcccccgcgccgccctctatcggcggacttgggcagcatggccgagtggccctcgtgaggacgacgacgcccgtggtatgccgctccgtcgccagcccggcagcgaatcagggggcgccagcggtggagaggccttggaagcttagcgacgctcgcctcgttctcgaggacggctccgtgtggaatgccaaatccttcggtgcttccgggactcaagtcggcgaggtggttttcaatacctcattgacagggtaccaggagattttgactgatcctagctacgctggtcagtttgttttgatgaccaaccctcatattggaaacaccggcgttaactctggtgacgaagaatccataaaatgcttccttggtggcttaatcatacggaacctaagtatatgtacttccaactggaggtgcacagaaacacttgatgaatatttgagaaagaggaacattatgggcatatatgatgtggacacacgtgcaataacacgcaggttaagagaagatggcagtctcattggtgttctaagtaccgaccagtctctcaaagacgaggaattgttggaaatggccaaaaattggaaaattgttggtgttgatttgataagtgatgttacatgtgatgctccatatgaatgggtagacaagaccggttcaggatgggagttcaacgacaatcagtcaagtgaaacttttcatgtcgttgtgtatgattttggagtgaagcataacattttgagacgcctggaatcatatggatgcaaaataactgttgttcc

SEQ ID NO: 46863 - DNA, 173 bp, Zea mays
  unsure (1)..(173): unsure at all n locations
  Clone ID: MRT4577_14274C.1
ctaagggaaaaccttcaaggcagtaatcacaaataggtatccagtaaatagttcaaagttcaaacatacttttttggtatcctaacgaaaaaaataccattcttctgggggggggggggncatcanntttctaaatcntnacctcattacaccccgggggagaaacccccctt

SEQ ID NO: 46864 - DNA, 413 bp, Zea mays
  Clone ID: MRT4577_142750C.1
gggggcgggattcgggggggggggggggggccatggaacgaagggagaaaaaaaaaacccccgggggaacgggggggggaaaaaaaaaaaaaattcgggggggggggaaaaggaatcccctttaaaaaaaacctagcccccgggagccaaaaaaaggggaaaaaggggcccgggccaaaatttaagggggggcccaccctggcgcccccacaaaaaaaaagggaaaaaaagggggggccttccccttcccaaaaaagtaggctttaccgaggggacccccgggggacccttaaaagtaaggggccttgccccccgggtggacccaaaacccgggggagcccctcccaacggaaaaaattgggcggggtgtaggggggttttttcacaacccttgcccggggtttttaaaggaa

SEQ ID NO: 46865 - DNA, 207 bp, Zea mays
  Clone ID: MRT4577_142751C.1
aggacgagtgggcggacgcgtgggatctattcctggtttgattatagactcgaaactgtgtggtcatctttaagtgatgcagtgttactgttttagcagtaaccttacgactaatggggagctattattgtttcattcccatcgtcgtcttcagaattcacatcgcgtgtgcttgcctgtctggttgcgtgccgcgtggttccctgg

SEQ ID NO: 46866 - DNA, 227 bp, Zea mays
  Clone ID: MRT4577_142752C.1
ttatttttttatatcaatgaaaacatccttgtcagggggttttatatatgttggtctttcataaaatcaaaaattaaacttctgattatgaaatactatatgcccctgactggacttattaaaaataactattaatcctaaaagccaatacaatatgaccttaatttttatgatataatcttatgctaatgtattcaaaagtgatatgattgcttcaagtactttaa

SEQ ID NO: 46867 - DNA, 426 bp, Zea mays
  unsure (1)..(426): unsure at all n locations
  Clone ID: MRT4577_142753C.1
tcgtatcagcagagcagccggaaatttggggggggtctctagaggtggactacctcccactagattaggttccttctgcggttcgagagagcaattctagagcctgatggctaagagagagagtcctgcgatcgggatcgacctcggcaccagatactcatgcatctgcgtgtggccccacgaccggtcgtgaatgatcttcctcaactaagttgacttgaacacactagacgatgtccggttngacagacttgtagcgccagatcggttaatcaaccgacaaccacgtggtcatagacggcatcaacactcgcttcgatgccaagcgcttcatcggcaggtggaactctgaaccagctgtgcggactgtcatggatgtatatcctaaaaaggtaataacaggtcctcgagacgctgccaaaattg

SEQ ID NO: 46868 - DNA, 2301 bp, Zea mays
  Clone ID: MRT4577_142754C.1
atggcggccgacagcccgcccgtcggcggtggaatcgacgacgtcttccccgcgtggtggaagaacaactttcgagctcaccccgtcccctcccccgccgacggaggaggaggcggggcgactaaggccaagcaggaggcagcacctcgtcgactgtcgagcgagtcgacggcgccggcgccccaacggggggcacaggtacccaccgattcccatctcacgccttttggattcagcctcgacccgccaagcggcttcgctttggcgagcgctctcgtagaggcgagtccaaaccctctgaggtatcgtatgcggtcaccctgggaccggctgacggacgtctcgacctacgggccctcggagttcgaggaagatgacgagcccgacttctgttgggacttctccggacttggtaaccccagtgccatgcgggacttcatgaccgcatgcgactactgcctttccgactgttctgacggtagccgcagcctcagagacgaggattgcggcctaagtcgtgaatgtttccacgtcgatctagggggtccctccgaaggcaaccatcttggtatgccggagaacggtgatctccctaggcctgtgcctcgcgttgacatcctacaggagctagctgtggtccccgttccggcggggggtcatgacccacagctcgagcaaatccgcggggtgcaggccaggctcgacgagggagcaagagcacttgagccgatccgccgggacgtcgggcaggaatgggtgggccaacctccgaccggagaaatgcgtcatctaccccagggtacccagcaccgcatcgccgacgatgtcagggtaaggccgtcacccacttccagtggagtcggccagaacctggctgcagcggcaattcttctccgcgtgatgccggagccatcaaccaccgaggggcggcgaatccagggagagctcaagaatctcctggaggacgccgcgcgcaccgagctacccaacatcaccgattcagatgtcatcggcgcgttcctcgtcggcaccacctgccgcgacctggtgagcaagctgggtcgcaagacccccaccagggcgagcgagccgatggacatcgccaccaagttcgcctctggccaggaggcggttgaggctatcttccggaaggacaagcagccccagggctgcccaccggaagatgcccccgaggcgtcaactcagcgcggcgccaagaagaaaggcaagaagaagtcgcaagcgaaacgcgacgccgccgacgcggaccttgtcgccgccgccgagtacaagaaccctcggaaaccctccagaggtgccaacctcttcgacaagatgctcaaggagccgtgcccctatcatcaggggcccgtcaagcacacccttgaggagtgtgctatgcttcggcgccacttccacagggccgggccacccgcggagggtggcagggctcgcgacgatgacaagaaggaagatcaccaggcaggagagttccccgaggttcgcgactgcttcatgatctacggtgggcaagcggcaaacgcctcggctcggcaccgcaagcaagagcgtcgggaggtctgttcggtgaaggtggcggcgccagtctacctagactggtccgacaagcccatcaccttcgaccaagccgaccaccccgaccacgtgccgagcccggggaaatacccgctcgttgtcgaccccgtcatcggcgacgtcaggctcaccaaggtcctcatggacggaggcagcagcctcaacatcatctacgtcgagaccctcgggctcctgcgtgttgacctatcctcggtccgggcaggcgctgcgcctttccacgggatcatccccgggaagcgcgtccagcccctcggacaactcgatcttcccgtctgctttgggacgccctccaacttccgaagggagaccctcacgttcgaggtggtcgggttccgaggaacctaccacgcagtactggggaggccatgctacgcgaagttcatggtcgtccccaactacacctaccacaagctcaagatgtcgggccccaacgaagtcatcaccgtcggccccacgtaccgacacgcgttcgaatgcgacgtggagtgcgtggagtacgacgaggccctcgccgaatccgaggacctcatcgccgacctggagagcctctctaaggaggtgccagacgtgaagcaccacaccgacaacttcgagccagcggagacggttaaatccgtccccctcgaccctagcagcgacgcctccaagcagatccggatcggctccgagcttgattccaaatag

SEQ ID NO: 46869 - DNA, 605 bp, Zea mays
  Clone ID: MRT4577_142755C.1
gtttttcaccatactggaactggcagcagatacctcaattatatgtcccacagtatcttctctttagactcaaggtagtggatgtatggtatatcagcccttagatccatgtcttcacagcatgacatcaggaatggagaatatgtcaaatttgaggggtctgaatacatcacctagtattatttgcttggcagccaaaaacagttgtttttattgacagacttaattctgtaacttctgcgttttttcatctgcttgatcaaggcattttggatgtactgctaatggaatatggcactgttttacggtttatgtggcttctgttcttgccacagttgttgcacagtggtaattgatgttttctctggtgccacactttttaataatctattggaagctcattcctcctcccccatcataaccatattcagcacccatttttaaatctacttttcttccttatttgtgctacagaggttgatggcgtaaattttcctacttggaagaaattactttatcagttaatttcagggtactgtattgatcttgtttgtcctatttgtagattaaacttgaactagtcttaataaaggggatattgtttt

SEQ ID NO: 46870 - DNA, 734 bp, Zea mays
  Clone ID: MRT4577_142756C.1
aattcggcacgagggaaatatacaatttgtatatcatatttgaacaaacattagaaggaacacagatttgcttaaaaaaagatacctagacatataattgcttagattttagtcatcgagctatttaatactcttctgttttaacacctgcagacatgattacacaacaactgattctcatattattttttcctcggtacatatgatctgtacaattcttgaaacaatgttttctactgcaaaaaattagctgttccattgaggaatgaatttattaacaagacaccaatcaaattagtcatcaagctgtttcaatactcttctgttttaacacctgcagacatgattacacaacaactgattctcatattattttttcctcggtacatatgatctgtacaattcttgaaacaatgtttttgtactacaaaaagttagctgttccattgaggaatgaatttattaacaagacaccaatcaaatatttttttaaagatataacccatttctaactctttcaaaaaaaagtatgctccaccgttacagtaacataaaacagccaccattactctccaaaacacctttttagattcaaaaggttagtattacaacctccttccttaaacacctctaacagcccggagaaattaccaattaacaggtagtatttggtaattgttgcgctcatattttagtgcctaatagatgcctgacgaaatgcctagatgctatga

SEQ ID NO: 46871 - DNA, 523 bp, Zea mays
  Clone ID: MRT4577_142757C.1
aacagggaaaggttccccacatgacattttttttttatgggttttaattagctgtttgccaagaaaattagaagagaaaaaaattaacgccggcttgagggacccccttgggcgggggcattcgtttcatatagatccagatgtcctacgtagttttatttatgaaaacaaaaacccgtgcccacaggctccagttataaaaaatcaaggccccggtaaatgaccacaaaccagggcaggatggccctggggttggccacaaaaagctcctcggggttcccgtacacgctgttggtgggggggtcctcacccgccagggagtcaaacgggccttcctgatcctccccggcagggggggacgtgtccccctccccgtcgggggggacccaaccggggatgacccggcacaccagcatggggcggcaggcggcagcgtttttaacttccttcaccgccaactgggtttgggggggcggtggcggcaacggattattattatccgaggcgcattcgtgcccgcggc

SEQ ID NO: 46872 - DNA, 1659 bp, Zea mays
  Clone ID: MRT4577_142758C.1
atggcggccgacaacccgcccgccggcggcggaatcgacgacatcttctccgcgtggtggaagaacgacattcgagctcgccccgtcctctcccccgccaacggaggaggaggcggggcaaccaaggccaggcgggaggccgcgcttcgtcgggcatcgacctcgcgtttgagacgaaggcgagcgtcgtccccccgtgacacgccaatcccgagcaagtggacgacgccagcacgctcgcggaaagcttgcaggacatcgccctctgccatgcgggactttatggccgcatgtgactactgcctctccgactgttccgacggtagccgcagccttgacgacaaggactgcggcccaagccgcgaatgtttccacgtcgagctaggagatccctctgaaggcaaccgtctcggcatgccagaggatggtgatctccctaggccggtgcctcgcgccgacatcccgcgggagctagctgtggtccccgttccggcggggggtcacgacccacagctcgagcaagtccgcggggcgcaggccaggctcgacgagggagcaggagcgcttgagccgatccgccgggaggtcgggcaggtatgggcgggccaacccccggccggaaaaatacgtcacctgccccagggtctccagcaccgcgtcgccgatgtcgtcagggtcaggccaccacctgcatccagtggggtcggtcaaaacctggccgcagcggcgatgctcctccgcacgatgccggagccatccaccaccgagggtcggcgaatccagggagagcttaaaaatctcctggaagacgccgcggtccgacgggccgagagcactgcctcccgaaggcaagcgtacccctcggaacctcatgccgcgacttcccgattcacgcgggaagcctcggtctacaccgggcgcacgcgcaacaccgcacctgcggccccgggccacctcggcaacgagcaccatcgtcgcgaccgtcgggctcacctcgacgaaagggtgcgccgaggctaccaccccaggcgtgggggacgctacgacagcggggaggatcggagtccctcgcccgaaccacccggtccgcaggtcttcagtcgggccatccgacgggcgccgttcccgacccggttccgacccccgactactatcacaaagtactcgggggaaacgaggccggaattgtggctcgcggactaccgcctggcctgccaactgggtggaacagacgatgacaacctcatcatccgcaacctccccctgttcctctccgacaccgctcgcgcctggttggagcacctgcctccggggcagatctccaactgggatgacctggtccaagccttcgccggtaattaccagggcacgtatgtgcgccctgggaattcctgggacctccgaagctgccgacagcagccgggagagtctcttcaggactacatccggcgattctcgaagcagcgcaccgagctgcccaacatcaccgactcagatgtcatcagcgcgttccttgccggcaccacctgccgcgacctggtgagcaagttgggtcgcaagacccccaccagggcgagcgagctgatggacatcgccaccaagttcgcctccggccaggaggcggtcgaggccatcttccgaaaggacaagcagccctag

SEQ ID NO: 46873 - DNA, 2019 bp, Zea mays
  Clone ID: MRT4577_142759C.1
atgaggaaagcctctgacctcctctcggaccttgaaacgacattccggtgtctcaaggcgaaaggcgtaaaactcaatcccgagaagtgcgtcttcggagtcccccgaggcatgctcttggggttcatcgtctccgagcggggcatcgaggccaccccagagaaaatcgcggccatcaccagcatggggcccatcaaggacttggaaagcgtacagagggtcatgggatgccttgcggctctgagccgcttcatctcgcgcctcggcgaaagaggcctacctctgtaccgcctcttgaggaagaccgagcgcttcacttggacccccgaggccgaggaagccctccggaacctgaaggcgctccttacgaacgcacccatcctggtgcctcccgctgccggagaagccctcttgatctacgtcgccgctaccactcaggtggtcagcgccgcgatcatggttgagagacgagaagaagggcatgcattgcctgtccagaggccggtctacttcatcagtgaggtactgcccgagaccaagatccgctacccacaaattcagaaactggtgtacacggtgattctgacgcggcggaagttgcgacactacttcgagtctcatccggtgactgtggtgtcatccttccccctgggggagatcctccagtgccgagaggcctcgggagcgggcgcgggcctgctcttcatcttgcccctcgggaagcacctccgctacgtgctgcgtctccaattcccggcgtccaacaacgtggctgaatacgaggctctggtcaatgggttgcgcatcgccatcgagctaggggtccgacgcctcgatgctcgcggcgactcgcagcttgtcatcgaccaagtcatgaagaactcccactaccgcgacccggagatggaagcctactgcgatgaggttcggcgcctggaggacaagttctatgggctcgagacaaacgacacgcccgagcccgaggcaccctcggctcagcccgaggtgccctcggctcagcccgaggcaccctcggcccccgagggtgaggcactgcgcatcgaggaagagcggaatggggtcacgcttaatcgaaactggcagaccccgtacctgcaatatctccaccgaggagagctacccctcgacagagccgaagctcggcgactggcgcggcgcgccaagtcattcgtcttgctgggcgacgggaaggagctctaccaccgcaacccctccggcatcctccagcgatgcatatccatcgccgaaggccaggagctcttacaagaaatacactcgggggcttgcgatcatcacgcagcgcctcgagcccttgttggaaacgctttccgacaaggtttctactggccgaccgcggtggccgatgccactagaattgtccgcacctgccgagggtgtcaattctacgcgaggcagacgcacctacccgctcaggctctgcaaacaatacccatcacctggccgtttactgtgtggggtctggacctcgtcggtcccttggagaaggcacccgggggctacacgcacctgttggtcgccatcgacaaattctccaagtggatcgaggtccgacccctaaacagcatcaggtccgaacaggcggtggcattcttcaccaacatcatccatcgctttggggtcccgaactccatcatcaccgacaacgacacccagttcaccggcagaaagttcctggacttctgcgaggatcaccacatccgggtggactgggccgccgtggctcaccccatgacaaatgggcagtccctgcgacgctaccacacccaaggggttcggtcccgagacctccaggtgggcgacttggtgcttcgactacgacaacacgcccgagggcggcacaagctcacgcctccctgggaagggtcgttcgtcatcgccaaggttttgaagcccgggacgtacaagctggccaacagtcaaggcgaggtctacggcaacgcttggaacatccgacagctacgtcgtttctacccttaa

SEQ ID NO: 46874 - DNA, 363 bp, Zea mays
  Clone ID: MRT4577_14275C.1
gagggtgaggggctgacttctatcttgttttatttggttgcagaggggaggaccgcaccatttcccttacggccatcggggggcggccttacaaagatggacccttcctcaatgaactgaccatctagttcaaaggagcactactacaccgggtttccggggcaatggatgggggttcacattcacatagtagacgaccggggtcgatggattaacagtttgagatgtctccccgtgacattggccagaagccgtgcctgaggagccagcagtcaatgcaggcaacgtggaacaggtgacggaacccgggaagctctccggcgcggtctcccacccgtaattcctgcaggcacaccgatcaga

SEQ ID NO: 46875 - DNA, 1212 bp, Zea mays
  Clone ID: MRT4577_142760C.1
atgccggagccatccaccaccgaggggcggcgtatccagggagaactcaagaatctcctagagttcgcctctggtcaggaggcggtcgaagccatcttctggaaggaaaagcagcctcagggacggcagccgaaagacgtcccggaggcgtccgcccagcggggcacaaagaagaatgccaagaagaaggcgcaagcaaagcgtgacgccgctgacgaggatcttgtcgcagctgccgagcacaggcaccctcggaagcctcctggaggggccaacctgttcgacaagatgctcaaggagtcgtgcccctatcaccagggtcccgtcaagcacacccttgaggaatgcgtcatgcttcggcgctacttccataaggctgggcccccggcgaaaggtggcaaggaccaagacaacaacaagaaggagggcgataaggaagaggagttccccgaggtccacagctgcttcatgatctacggtgggcaagtggcgaacgcctcggctcggcaccgcaagcaggagcgtcgggagtccgacaagcccatcaccttcgatcaaggcgaccaccccgactgcgtgccgagcccaggaaggtacccattcgttgtcgatcctgtcattggcaacgctaggctcaccaaggtcctcatggatgggggcagcagcctcaacatcatctacgccgagaccctcgggctcttggagatcgatctgtccacgatctgggccggtgcggcgccctttcacgggatcgtccccggaaagcgcgtcctgccccttgggcaactcgatttgcccatctgtttcgggactccctccaacttctgtagggaaaccctcatgttcgaggtggttgggttccgaggaacctaccacgcggtgctggggagaccgtgctacgccaagttcatggccgtccccaactacacgtacctcaagctcaagatgtcaggccccaacggggtcatcaccatcggatccacgtaccgccacgcatacgaaagccacgtggaatgcgtggagtacgctaaggccctcaccgagtccgaggcccacatcgccgacctagagtgcctctccaaggaggtgcctgatgcgaagcgccacaccggcaacttcgaaccagctgaggcggttaagtccatccctctcgaccccagcaacgacgccgacaagagggtccggatcggcttcgagctcgaccccaaatag

SEQ ID NO: 46876 - DNA, 4197 bp, Zea mays
  Clone ID: MRT4577_142761C.1
atgtcgggtgttgtcctcgcacctgagacaacgacggacgtcgcttccccgcaacgtgccaaccccaagcggactaatgacgccagcaccctcgcgaaggacttgctgggcgttagcctcgtacctgagataacggtgcattctgtccccgacgcgacttcaccaccgtccatcgaccaaaaggtaccgtccgttttccaccctattccctttaggttcagttttgatccaccaagcgaccccgcttcggtagacgctttcgtaagggcgtatcctgaccttccggggtaccatatgtggtctacttgggaccaactgacggctgtctcaacctacggacccgcgggttccgaggaagaagacgaccccaacttcggttgggatttctccagactctgggatcccagtgccatgcgagacttcatgtccgcatgtgactactgcctctccggctgctctgacgatggccacagcctcagcgacgagggttacgacccaagtcgcgagtgtttccacatcgatccgggggaggggcggcgtatccagggcgaactcaaggatctcctggaaggtgccgcagtccgacgagccgagaactctgcctcccaaaggcaagggtgcccatcggagcatcgcgcaacaccctcccaacgcatacgggaggcctcggtccgcaccgagcgcacacgggacgggacgcccgcggccccgggtcgcctcggcgatgagcaacaccgccgcgactatcgtgcctgcctcaaggagagggtacgacgaggctaccaccccaggcgcggaggacgctacgacagtgaggaggatcggagcccctcgcccgaaccaccaggtccgcgagtcttcagccgggccatacgacgggcgccgttcccggcccggttccaagccccgactaccatcaccaagtactcaggggagacaaggccggagttgtggctttcgaattaccggccggcatgccagttgggagggacggatgacgacaacctcatcatccgcaacctcccccttttcctctccgacgttgcccgagcctggcttgagcatctgcctcctgcgcagatctccgactgggatgacctgccaggggaatccctgcgagagtacatccgacggttttccaagcaacgtaccgagttgcccaacatcaccgactcagacgtcatcgacgcattcctcgccggcaccacttgccgagacctggtgagcaagctgggacgcaagactcccaccaaggcgagcgacttgatggacatcaccaccaagttcgcctctggccggaccctcggcagaaggtggcaaggaccaaggatacaacaagaagggggcaacaaggaagaggagttctcggaggtccgtgactgcttcatgatctacggtgggcaagtggcaaacgccttagctcggcaccgcaagcaggagcgccgggaggtctgctcggtgaaggtagcggcgccggtctacctagaatggtccgacaagcccatcaccttcgaccaaggcgaccaccccgactgcgtaccgagcccaggaaggtacccgctcgtcgtcgaccccgtcatcggcaacgctaggctcaccaaggtcctcatggacggaggcagcagcctcaacatcatctacgccgagaccctagggctcttcgggatagagctgtccatgatccgggccggtgcagcaccctttcacgggatcgtccccaggacctaccacgcggtgctgggaaggccgtgctacgccaagttcatggccgcccccaactacacgtacctcaagctcaagatgccgggtcccaagggaatcatcaccgtcagatccatgtaccgccatgcttacgagtgcgacgtggagtgcgtggagtacgttgaggccatcaccgagtccgaggccctcatcgccgacctggattgcctctccaaagaggcgtctggtgcgaagcgccacgccggcaacttcgaaccgaccgaggcgtggagtccctcggacatgccaggcataccgagggatgtcgccgagcactcactagacatccgagccggtgcccgacccgtgaagcagcacctgcgctgctttgatgaagaaaagcgcagggccataggcgaggaggtccacaagctgatggctgcagggttcatcaaagaggttccctaccctctggctcgcatcgatcaaattgtggactccactgttgggtgcgaaaccctgtcattcctcgacgcctattcaggctatcaccaaatcaagatgaaagaatccgaccagttcgcgacttctttcatcacaccctttggcatgtattgttatactaccatgccatttggcttgaggaatgcaggtgcaacctaccaaaggtgcatgaaccacgtgttcgaagaacacatcggcagaacggtcgaggcttacgtcgatgacatcgttgtcaagacaaggaaagccttcgacctcctctccgacctcgaagtaactttcgggtgcctgcgtgcgaagggcgtaaaactcaatcccgagaagtgtgtcttcggagtcccccgaggcatgctcctggggttcatcgtctccgaaacaggcatcgaggccaacccggagaaaatcgcagccatcaccaacatgggacccatcaaagatttaaaaggagtacaaagggtcatgggatgccttgtggctctaagccgcttcatctcgcgccttggcgagaaaggattgcccctgtaccgccttttaaggaaggccgagcgcttcacttggacccccgaggccgaagaagccctcagaaacttaaaggcactccttactaatgcgtccatcttggtgccccccgctgcgggagaagccctcttgatttacgtagccgcaaccactgaggtgaggtcggtctacttcatcagcgaggtgctatccgagaccaagatccgctacccacaaatccagaagctactgtatgcagtaattctgacacggcgaaagttgcgacactacttcgagtctcatccagtgactgtggtgtcatccttccccccgggagagatcatccagtgccgagaggcttcgggtaggatagcaaaatgggcagtggaactcatgggcgagacaatttcgattgcccctcggaaggccataaaatctcaagtcttggcagacttcctggctgaatgggccgacacccaattgccgacggctccaatccaggccgaactttggaccatgtacttcaatgggtcgctgatgaaaaccggagcagtcatgaagaactcccactgccgcgatcgaaaaatggaggcctattgcgacgaagttcgacgcctggaagataagttccacgggctggaactcaaccatgttgctcgacggtacaacgaggccgtggatgagctggctaaaatagcctcggggcgaacgacggttcccccggacgtcttcttcagggacatatatcaaccatccgtgaaactcgacgacgcgcccgaacccgaggagacctcggcccagcccgaggtaccctcggccgccgagggtgaggccttgcgcatcgagggagagcggaatggggctgcgccaaatcaagattggcagaccccatacctgcaatatctcctccgaggagagctgcccctcgacaaggccgaagctcggcgactggctcggcgcgccaagtcgttcattttactgggcgatgaaaaagagttataccaccgcagcccctcgggcatcctccaacgatgcatatccgtcgcccaaggacaagagctgttacaagaaatacactcgggggcttgcggtcaccatgcagcacctcggaccctcgtgggaaacgctttccgacaaggtttctactggccgaccgtggtggccgacgccactaggattgtacggtcctgccaagggtgtcaattcaacgcgagacagatgcacctacccgctcaagccctgcagataatacccatcacttggtcatttgccgtaaggggtctggacctagtcggtcccttgcagaaggcacccaggggcttcaagcacctgctggtcgccatcgacaaattctccaagtggatcgaggtccaacccttaaccagcatcgggtccgagcaggcgttcttcacaaatatcatccatcgctttggggtcctgttgggaccatgcttcgtcgccgaaggtcctgcagaaagaaacagcttcggctga

SEQ ID NO: 46877 - DNA, 427 bp, Zea mays
  unsure (1)..(427): unsure at all n locations
  Clone ID: MRT4577_142762C.1
tgaggatcctgcagttcggtgttggcggcgttgacctgtggccaccatgcagcgggacacgctagagccatgtactgcgccgatcatatcgaccttctggccgtgttattactgatgctgctgctgatgagcccaaccacacgcagcgacccatttagcctccgttggacctaggctgcatccactgactgagccatgccttgtagtgtgggaaggatgacgactgcattctaaacagtatgaatgaaaatcacgangacatatttactgtgctggtgtgaggcatgtatgttactgtcactcctggaccctatactgttactacacaattggtgtgcagatcttgcatacacagcctggactttcacacctacaccattttgcttatggaaaagatttttgatctgcaacattcaaattttaaccc

SEQ ID NO: 46878 - DNA, 2094 bp, Zea mays
  Clone ID: MRT4577_142763C.1
atgggcagtctccagcaacctttccagcccgggacggtgctccgtttcgggagtcttgagttcatgtccctcgacggcggctacgacatgatactccttcccccgccgtgcgacagcaacaatggcggccgacagcccgcccgtcggcggcggaatcgacgacgtcttccccgcgtggtggaagaacgacatttgagctcaccccgccctctcccccgccgacggaggaggaggcggggcaaccaaggccaagcaggaggcgacacctcgtcggctgtcgagcaagtcgacggcgccggcgccccagcaggaggcgcgtcgggcatcgacctcgcgtttgagacgaagacaagcgtcatctccccgcaacacgccaattccgagcaaacagatgacgtcagcacgctcgcgaaaggcttgctgggcgtcaccctcgtacctgagacgacggtgcagtcagtccctgacgtgacttcgtcaccgcccatcgaccaagaggtacccaccggttcccatctcacgccctttggattcagcctcgacccgccaagcgacttcgctttggcggacgctctcgtagaggcgagtccaaaccctctggggtttcgtatgcggtcaccctgggaccggctcgcggacgtctcgacctacgggccctcggggtccgaggaacatgacgagcccgacttctgttgggatttctctagacttggcaaccccagtgccatgcgggacttcatgaccgcatgcgactactgcctttccgactgttccgacggtagccgcagcctcgacgacgaggactgtggcccaagtcgtgaatgtttccacgtcgatctagggggtccctccgaaggcaaccatctcgactaccggctggcctgccaactgggtggaacggatgatgacaacctcatcatccgcaacctccccctgtttctctccgacaccgctcgcgcctggttggagcacctgcctccggggcagatctccaactgggacgacctggtccaagccttcgccggcaatttccagggcacgtacgtgcgccccggaaactcctgggacctccgaagctgccggcagcagccgggagagtctctccgggactacatccggcgattctcgaagcagcgcaccgagctgcccaacatcaccgattctgatgtcatcggcgcgttcctcaccggcaccacttgtcgcgacctgtacaagaaccctcggaaaccccccggaggtgccaacctcttcgacaagatgctcaaggagccgtgcccctatcatcaggggcccgtcaagcacacccttgaggagtgcgccatgcttcggcgccacttccacagggccgggccacccgcggagggtggcagggctcgcgacgacgacaagaaggaggatcaccaggcaggagagttccccaaggtccgcgactgcttcatgatctacggtgggcaagcggcgaacgcctcagcttggcaccgcaagcaagagcgtcgggaggtctgttcggtaaaggtggcggcgccagtctacctagactggtccgacaagcccatcaccttcgaccaagccgaccaccccgaccacgtgccgagcccggggaaatacccgctcgttgtcgaccccgtcatcggcgacgtcaggctcaccaaggtcctcatggacagaggcagcagcctcaacatcatctacgccgagaccctcgggctcctgcgtgttgatctatcctcggtggttgggttccgaggaacctaccacgcagtattggggaggccatgctacgcgaagttcatggtcgtccccaattacacctacctcaagctcaagatgccgggccccaatggggtcatcaccgtcggccccacgtacaaccacgcgttcgaatgcgacgtggagtgcatggagtacgccgaggccctcgctgaatccgaggccctcatcgccgacctggaaagcctctctaaggaggtgccagacgtgaagcgtcacgccggcaacttcgagccagcagagacggttaagtctgtccccctcgaccccagcagcgacgcctccaagcagatccagatcggctccgagctcgatcccaaatag

SEQ ID NO: 46879 - DNA, 2880 bp, Zea mays
  Clone ID: MRT4577_142764C.1
atggcggccgacagcccgcccgccggcggcggaatcgacgacgtcttccccgcgtggcaacacgccgattccaagcaaacagacgatgccagcacgctcgcgaaaggcttgctgggcgtcactctcgtacctgagacgacggtgcagtcagtccctgacgtgacttcatcaccgcccgtcgaccaagaggtaccgaccgattctcatctcacgcctcttggattcaacctcgacccgccaagtggcttcgctttggtggacgctctcgtagaggcgagtccaaaccctctggggtatcgtatgcggtcaccctgggaccggctgacggacgtctcaacctacgggccctcggggtccgaggaagatgacgagcccgacttctgttgggatttctccggacttggtaaccctagtgccatgcgggacttcatgaccgcatgcgactactgcctttccgactgttccgacggtagccgcagcctcggcgacgagggctgcggcccaagtcgtgaatgtttccacgtcgatctagggggtccctccgaaggcaaccatctcggtatgccggagaacggtgatctccctaggcctgtgcctcgcgttgacatcctacgggagctagcagtggtccccgttcaggcggggggtcatgacccacagctcgagcaaatccgcggggtgcaggccaggctcgacgagggagcaggagcacttgagccggtccgccgggacatcgggcaggaatgggcgggccaacctccggccggagaagtgcgccatctaccccagggtatccagcaccgcatcgccgacgatgtcagggtgaggccaccacccgcttccagtggggtcggccagaacctggctgcagcagcaatgcttctccgtgcgatgccagagccatcaaccaccgagggtcggcgaatccagggagagctcaagaatctcctggaaggcgccacggtccgacgggccgaaagctccgcctcccgaaggcaggggtaccccacggaacatcgcgccgcgacttcccgattcatgcgggaagcctcggtccacaccgagcgcacgcgcaacacagcgcctgcggccccaggtcgcctcggcaacgagcaccatcaccgcgaccgtcgggcccacctcgacgagagggtgcgccgaggctaccaccccaggcgtggaggacgctacgacaacggggaggatcggagtccctcgcccgaaccacccggtccgcaggctttcagacgcgccatacgacgggcgccgttcccgacccggttccgacccccgactactatcacaaagtactcgggggagacgagaccgaaactgtggctcgcggactaccggctggcctgccaattgggtggaacggacgatgacaacctcatcatccgcaacctccccctgttcctctccgacaccgctcgcgcctggttggagcacctgcctccggggcaaatctccaactgggacgacctggtccaagccttcgtcggcaatttccagggcacgtacgtacgccctggaaactcctgggacctccgaagctgccggcagcagccgggggagtctctccgggactacatccggcgattctcgaagcagcgcaccgagctgcccaacatcaccgattcggatgtcatcggcgcgttcctcgccggcaccacctgccgcgacctggtgggcaagctgggtcacaagacccccaccagggcgagcgagctgatggacatcgccaccaagttcgcctctggccaggaggcggttgaggctatcttccagaaggacaagcagccccagggctacccaccggaagatgcccccgaggcgtcaactcagcgtggcgccaagaataagggcaagaagaagtcgcaagcgaaacgcgacgccgccgacgcggaccttgtcgccgccgccgagtacaagaaccctcggaaaccccccggaggtgccaacctcttcgacaagatgctcaaggagccgtgcccctacatcaggggcccggtcgggccacccgctgagggtggcagggctcgcaacgacgacaagaaggaagatcaccaggcaggagagttctccgaggtccgcgactgcttcatgatctacggtgggcaagcggcgaacacctcggctcggcaccgcaagcaagagcgtcgggaggtatgtttggtgaaggtggcggcgccagtctacctagactggtctgacaagcccatcaccttcgaccaagccgaccacgtgccgagcccggagaaatacccgctcgttgtcgaccccgtcatcggcgacgtcaggctcaccaaggtcctcatggacggaggcagcagcctcaacatcatctacgccgagaccctcgggctcctgcgtgtcgatctgtcctcggtccaggcaggcgctgcgcctttccacgggatcatccccgggaagcgcgtccagcccctcggacaactcgaccttcccgtctgcttcggagcaccctccaacttccgaagggagaccctcacgttcgaggtggtcgggttccgaggaacctaccacgcagtcttggggaggccatgctacgcaaagttcatggtcgtccccaactacacctacctcaagctcaagatgtcgggccccaacggggtcatcaccgtcggccccacgtaccgacacgcgttcgaatgcgacgtcgagtgcgtggagtacgccgaggccctcgccgagtccgaggccctcatcgccgacctgaagagcctctctaaggaggtgccagacgtgaagcgccacgccggcaacttcgagccaacggagacggttaagtccgtccccctcgaccccagcagcgacgcctccaagcagatccggatcggctccgagctcgatcccaaatag

SEQ ID NO: 46880 - DNA, 2106 bp, Zea mays
  Clone ID: MRT4577_142765C.1
atggcggccgacaacccgcccgccggcggcggaatcgacgacatcttccccgcgtggtggaagaacaacattcgagctcgctccgtcctctcccccgccaacggaggagaaggcggggcaaccaaggccaagcgggaggccgcgcttcgtcggccgtcgagcgaatcgacgcccccgacgccccgacggaaggcacgccgggcgtcgacctcgccctcggtctacaccgggcgcacgcgcaacaccgcgcctgcggccccgggccacctcggcaacgagcaccatcgacgcgaccgtcgggcccacctcgacgaaagggtgcgccgaggctaccaccccaggcgtggggggcgctacgacagcggggaggatcggagtccctcgcccgaaccacccggtccgcaggccttcagtcgggccatccgacgggcgccgttcccgacccggttccgacccccgactactatcacgaagtactcgggggaaacgagactggaactgtggctcgcggactaccgcctggcctgccaactgggtggaacagacgacgacaacctcatcatccgaaacctccctctgttcctctccgacaccgctcgcgcctggttggagcacctgcctccggggcagatctccagctgggacgacttggtccaagccttcgccggcaatttccagggcacatacgtgcgcctcgggaattcctgggaccttcgaagctgccggcaacagccgggagagtcgctccgggactacatccggcgattctcgaagcagcgcaccgagctgcccaacatcaccgactcggatgtcatcggcgcgttccttgccggcactacttgtcgtgacctggtgagcaagttgggtcgcaaaacccccaccagggcgagcgagctgatggacatcgccaccaagttcgcctctggccaggaggcggtcgaggctatcttccgaaaggacaagcagccccagggccgcccatcggaagaggctcccgaggcgtctactccgcacggcgccaagaagaagggcaagaagaagtcgcaatcgaaacgcgacgccgccgacgcggaccttgtcgccaccgccgagtacaagaaccctcggaagccccccggaggtgctaaccttttcgacaagatgctcaaggagccgtgcccctatcatcaggggcccgtcaagcacactcttgaggagtgcgccatgcttcggcgccacttccacagggtcgggccacccgcggagggtggcagggcccacgacgacgacaagaaagaagatcaccaagcaggagaataccccgaggtccgcgactgcttcatgatctacggtgggcatgcggcgaatgcctcggctcggcatcgcaagcaagagcgccggaaggtctgctcggtgaaggtggcggcgccagtctacctagactggtccgacaagcccatcaccttcgaccaggctgaccaccccgaccacgtgccgagcctggggaaatacccactcatcgtcgaccccgtcatcggcgacgtcaggctcaccaaggtcctgatggatgggggcagctgcctcaacatcatctacgccgagaccctcaagctcttgcgcgtcggtctgtcctccgtccgagcaggcgctgcgcccttccatgggatcatccctgggaagcgcgtccagcccctcggacgactcgacctccccgtctgcttcggaacgccctccaacttccgaagggagaccttgacgttcgaggtggtcgggttccgaggaacctaccacgcggtactgggaaggccatgctacgcgaagttcatggccgtccccaactacacctacctgaagctgaagatgccgggccccaacggggtcatcaccgtcggccccacgtacaaacacgcattcgaatgcgacgtggagtgcgtggagtacgccgaggccctcgccgagtccgaggccctcatcgccgacctggagaacctctccaaagaggtgccagatgtgaagcgtcaggccggcaacttcgagccagcggagacggttaaggccatcccactcgaccccagtggcgacgcctccaagcagatccggatcggttccgggctcgaccccaaatag

SEQ ID NO: 46881 - DNA, 2448 bp, Zea mays
  Clone ID: MRT4577_142766C.1
atgtggcttgcggactaccggctggcctgccagttgggtggaacggacaatgacaacctcatcatccataacctccccctgttcctctccgacgccgcccggacctggttggagcatctgcctcctgcgcagatctccagctgggacgacctggtcaaagccttcggtggaaacttccagggcacatacgtgagccctgggaactcttgggatctccgaagttgccgccagcagccaggagaatccctgcgggactacatccgacgattttcgaagcagcgcaccgagctgcccaacatcaccgactcagatgtcatcggcgcgttcctcgccggcaccacttgccgcgacctggtgagcaagctgggtcgcaagactcccaccagggcgagcgagttgatggacatcgccaccaagttcgcctctggtcaggaggcggtcgaggccatcttccggaaggacaagcagcctcagggacaccagcaggaagacgtccccgaggcgtccgcccagcgtggcacgaagaagaaggccaagaagaagtcgcaagcgaaacgcgatgctgccgacgtagatcttgtcgccgccactgagcacaggaaccctcggaggcctcccggaggggccaacctgttcgacaagatgctcaaggagtcgtgcccctatcatcagggtcccgtcaagcacacccttgaggaatgcgtcatgcttcggcgctacttccataaggctgggcccccagcagaaggtggcagaggccacgacaacgacaagaaggagggcaacaaggcagaggagttccccgaggtccacgactatttcatgatttatggtgggcatgtggtgaacgcctcggctcggcaccgcaagcaggagcgccgggaggtctgctcggtgaaggtggcggcgccagtctacctagactggtccgacaagcccatcaccttcgaccaaggcgaccaccccgaccgcgtgccgagcccagaaaagtacccgctcgttgtcgaccccgtcatcggcaacgtcaggctcaccaaggtcctcatggatggaggcagcagcctcaacatcatctacaccgagaccctcgggctcttgcaaatcgatctgtccacgatccgggccggtgcggcgccctttcacgggatcatccccgggaagcgtgtccagccccttggacaactcgatctgcccgtctgcttcgggactccctccaacttccgaaaggaaaccctcacattcgtggtggtcgggttccgaggaacctaccacgcagtccttgggagaccatgttacgccaagttcatggtcgtccccaactacacctacctcaagctcaagatgtcgggccccaacggggtcatcaccgtcggatccacgtaccgacacgcgtacgaatgtgacgtggagtgcgtggagtacgctgaggccctcgccgaatctgaggccctcatcgccgacctggagtgcctctccaaggaggtgccagatgcgaagcgccacgccggcaacttcgaattagcagaggcggttaagtccgtccctctcgaccccagcaacgacgcctccaagcaagtccggatcggctccgagctcggcccccaaataggaagcagtgctcgtcgactttctccgcgcgaacgccgaggagcaggtgcgggcctgctcttcatctcacccctcggaaagcacctccgctacgtgctacgcctccattttccagcgtcaaacaacatggtcgagtacgaggctctggttaacgggctgcgcatcgccatcgagctaggggttcggcgcctcgatgctcatggcgactcgcaacttgtcatcgaccaagtcatgaagaactcccactgccgcgacccgaagatggaggcctactgcgacaaggttcggcgcctggaagacaagttctacaggctcgagctcaaccacatcgctcgacggtacaacgagactgcggatgagctggctaaaatagcctcagggcggacaacggttcccccggacgtcttctcccgagacctacatcaaccctccatcaagatcgacgacacgcctgagcctaaggaggcctcggcccagcccgaggcaccctcggccgccgaggaaggcacccgggggcttcaccacctgctggtcgctatcgacaaattctccaagtggatcgaggtccgacccctaaacagcatcaggtctgagcaggcggtggcgttcttcaccaacatcatccatcgctttggggtcccgaactccatcatcaccgacaacggcactcagttcactggcaggaagttcctggacttttgcgaggaccaccacatccgtgtggactgggccgccgtagctcaccccatgacgaatgggcaggtagagcgtgccaacgatatgctcctgcaaggactaaagccgaggatctacaacgacctaaacaagttcggcaagtga

SEQ ID NO: 46882 - DNA, 233 bp, Zea mays
  Clone ID: MRT4577_142767C.1
caagattctgagcatctctgacgctggcggcgcagatggggcatgttctactagaatgagagcgttcatcaaccgagaaggcattgacttcaatgatgctcaaaacacgcaccctgcgcaggaatgggagctggcagagaatttgcagggcgttcttgagtaccaaacaaggtaactcaaggccccagggtggggctaacctaactctacatttccccgcgaactctggaggt

SEQ ID NO: 46883 - DNA, 1812 bp, Zea mays
  Clone ID: MRT4577_142768C.1
atgccgtttggtttgaggaatgcgggggcaacgtaccagcgatgcatgaaccatgtgtttggtgaacacatcggccgaacggtcgaggcctacgtcgatgacatcgtagtcaagacgaggaaggcctccgacctcctttccgaccttgaagcgacattccgatgtctcaaggcgaaaggcgtgaagcttaatcccgaaaagtgtgtcttcggggtcccccgaggcatgctcttggggttcatcatctccgagcggggcatcgaagccaacctggagaagattgcagcgatcaccagcatggggccaatgaaggacttgaaaggcgtacagaggatcatgggatgtctcgcggctctgagccgcttcatctcccgcctcggcgaaagaggtctgcctctgtaccgcctcttaaggaaagctgagtgcttcgcttggactcccaaggccgaggaagccctcgggaacttgaaggcgctcctcacgaacgcgcccatcttggtgccccccgctgccggagaagccctcttgatctacatcgccgcaaccacccaggtggttagcgccgcgatcatggttgagagacgagaagaagggcatgcattgcccgtccagaggccagtctacttcatcagtgaggtactgtccgagaccaagatccgctacccacaaatccagaagctgctgtacgcggtgatcctgacacggcggaagttgcggcactacttcgagtctcatccggtgactgtggtgccatccttccccctgggagagatcatccagtcccgagaggcctcaggtagaattgcgaagtgggcggtggagatcatgggcgagacgatctcgttcgcccctcggaaggccatcaagtcccaggtcttggcggacttcgtggctgaatgggccgacacccagctcccgacggctccgatccaaccggagctctggaccatgtttttcgatgggtcgctgatgaagacgggggctggtgcaggcctcctcttcgtctcgcccctcagaaagcacctacgctacgtgctacgcctccacttcccggcgtccaacaatgtggcagagtacgaggctctgaaggcacccgggggctacacgcacctgttggtcgccatcgacaaattctccaagtggatcgaggtccgacccctaaacagcattaggtccgaacaggcggtggcgttcttcaccaacatcatccatcgctttggggtcccgaactccatcatcaccgacaatggtacccagttcaccggtagaaagttcctggacttctgcgaggatcaccacatccgggtggactgggctgccgtggcacaccccatgatgaatgggcaagtggagcgggccaacggcatgatcctgcaaggactcaagcctcggatctacaacgacctcaacaagttcggcaagcggtggatgaaggaagtcccctcggtggtctggagtctgaggacaacgccgagccgagccacgggcttcacaccgttctttctagtctatgtggccgaggccatcttgcccacagacctagaatacggttccccgagggcgagggcctacaccgaccaaagcaaccgagccaaccgagaagaatcactggaccagctggaggaggctcgggacatggccttactacactcgcgcggtaccagcagtctctgcgacgctaccacgcccgaggggttcggtcctgagacctccaggtgggcgacctggtgcttcggctgcgacaagacacccgagggcggcacaaactcacgcctccctgggaagggccgttcgtcatcgccaaggttctga

SEQ ID NO: 46884 - DNA, 292 bp, Zea mays
  Clone ID: MRT4577_142769C.1
ccgatgcaagcagccgctcgatacccggtctggtctcaggtttccatgtaagtcgaacaaactagggacgatacagacgcaacacacaacacattcagcagttatagcagagaagctttgcctggccatggcgggagaaagaacttttttttacgggtgggaggagatgatgatacaggcagaccaggatcagcttgatatgccattgccgttatgttacattacaccaccaggcaccatgtacggttgcacccccagcccaggcctggagacgggggaagacaccttatct

SEQ ID NO: 46885 - DNA, 843 bp, Zea mays
  Clone ID: MRT4577_14276C.1
cattgggtacctcgaggccggccgggaagtttcgcccgtcgcggctcctctccactctctcatctttcatcttgttgctcacgctgagctgtttgcttcccggacaacttcaaaggctttatcgataagctctacgtaatcctagcatcgtcaccacagctgaactcaaaatacaaggttcaatatgtccgtctcagcagcattgaagagtcgagttcggaggccgagttatctcaagaagcttgccaaagcggaagatttactacaccactttcccaatggagcatacattggttggagtggcttcacaggtgtgggatacccaaagaaaatccccacggcgctggcggaccatgttgagaagaacaatcttcagggccagatgaagtacaacctcttcgtcggtgcttcgtcaggcgccgaaacagaaaatcgatgggcgcgactcaacatgattgagcgccgatctccgcatcaagtgggcaaggaaatcgccaaaggaattaacaatggtaacatcaagttcttcgacaaacatttgagtatgtttcccgtcgatctgatgtacggcttctacacattgaacaagcctcagaacaagctggatgtgactattgtcgaagcgtctgcaattactgaggacggtggcattattcctggcgccagtgtaggcgcttcgcccgagcttgtccaaatggccgacaaattttatcattgaagtcaacactgcccgctccttcgtttgagggcctacatgacattaccatgactgacctcccaccacgccgcaagccttacctgatcatgtctcctgaaagacgcatcggcacacctcacatccct

SEQ ID NO: 46886 - DNA, 430 bp, Zea mays
  Clone ID: MRT4577_142770C.1
ccccccaaaaaaagcacaaaaaaagggggaagggccgccaaaaacggtttaattgggcatggctgttttccaatctaaataaaggaatcgggggggaggatgccttgtcacaacctcacaagcgagggagcggggccaaaacccaccttttggaacccgtcccctccccggaaaagaaacttgcccgggggttggaagcgcgtaaacgggcaaaccgtcgtcgttgccttaacatgaccgcgtaaacgggactaaaaggctcccccaccattgttccacaatcctttcttgtttggccaaataattgttatacaatgggaaggggtcgaaaacattaacaaaaaaaaaaaagggttggtcaatcgataaaacaatcacggaagggggaccagttcgaacaacggcgtaacccccgcagggacaactttaa

SEQ ID NO: 46887 - DNA, 435 bp, Zea mays
  Clone ID: MRT4577_142771C.1
ggaaagctggcgcgcccgcaggcaccgatcctgtatagcgggcgcgacccacgcttacgtacccaactcgctttcgagagctgctacgagccgtattcgataatcgacagcgccataggcacggagctgctcgcactaggcattctcgtgcttgataacgagggctccatggtccccactcgggctgctagctgggctctagagtgacagcgacagccgctgccatcttcccaatgtcacataagaaactctgcctcatactaccttgtgtaagcacggcgtccactagtatcactctactgcgctccgttcgtcacctgatcgtgtgcgagcaggcgcggcgggcgcagttcttcgggtacaacctcaccgtctggagccacctccgcttctgtctgccgtcaaccatcatcgtcaccgccatcggcctgctca

SEQ ID NO: 46888 - DNA, 846 bp, Zea mays
  Clone ID: MRT4577_142772C.1
gccggccgggttgggatatcctcaccatgtcaaaacgcaccacattcaccagcatcacaccacttcccaaaaccaccacacgctcggccgccgtcagctggctacacaaccatgttcagatgatccgtctgaaccctttggtgatccgactacaagaaacgacaccgccgccaaatgccgcagccgacgagtacaactgcgcatggtacgaaatcaccgatgaaatcagctatcttcccggcggtctgtacaaaggcgaggtcacgtacaaagcctgcttcaacgacctcccaaatggcatacaaacacatactttcgcgccggccggtctggacctgagagggaagtggacagtgggcgggaatgagccaggagaaccaagagagacgcttgagctgggcatggacgcgcccagggaagggctgtacgtcagagaagatgtggatatgcgatgcaacatcttcttgacaggcttcgtaaaaaagaacttgacaaaggcgcacaagagtgtagtggacaagctggccgacttgggtggtgggaacgactcaggcaacgacgtgcacacttcgcaaggtttcgacggaaccagtgggaatgctgtgcccaggccttggcagaacaacgagcaggcgctcacgccaaccgacagcaacacgatgttcagtcccgactcgtacctcaaggattcggcacatcagccatctcagtccacacttcctgagcacgaggatccatcgtctgacaatctatactccaactcacacgaaatatcccacaggaagccctgcaagatcagcaccaaagttatcctaccgtgagcacgagcgcgtacgtgacatgcct

SEQ ID NO: 46889 - DNA, 244 bp, Zea mays
  Clone ID: MRT4577_142773C.1
accacgagtccgcagcaatggcggccaaggtgttcctcctcctccgactaagcaatggtcgccgtcgtccgggctgcaaccgcaacagtaccgctcgcggaggaagccgatccgcgggcactgccggaacattggaccaccgcaaaaaattacaaggccacaatggacgccaaaacccggaaggctttcaacggcttggtggccgccgctacggaaaaaaaccggtccaaggcgttgaaggcct

SEQ ID NO: 46890 - DNA, 206 bp, Zea mays
  Clone ID: MRT4577_142774C.1
atatagtctggttgaccagctttctttactgtcgccggcctccgatagatctggaaggcttaattcgaccgacttttcgttcataagccaagactagggcagttcagaaagagccgatcgcgggagtcacccaggcaatgccgaagggggccgagacacaaacataggatattcgacagcacatcctgcatcgacagccaaacaga

SEQ ID NO: 46891 - DNA, 490 bp, Zea mays
  Clone ID: MRT4577_142775C.1
ggcgaaacgaaggggggagcccccgggacatacatatatatttacccaatggggaaggagaccatgatgggggggcaaggggccatcttcaaaaaaaataccactacccaccaccttttttctttcctttttttttaaaaaaaaacaacagggaggccctatctacccgcctggggggcaagccccaatcaaagaacaaaaggggacacttccctaaacaaggctgctaacagggggggcgactctaaaccccggcatcatatttggccccaaggaaaaagctgatgggtgacaaacaaatctcgggcacctcgatggggccccccttgcttgcaaagggctttgaaaggaataaagcttttggaaccaggtttggggtgcaagggcaaccatcggggggcttgggtttacaagggaagcccaccttgggatggcaggaccaaaacgcccctccttgattgagccactgcacgaaatcctttgaaaaccc

SEQ ID NO: 46892 - DNA, 709 bp, Zea mays
  Clone ID: MRT4577_142776C.1
cttcccggaaccgcagctgcctctctgccccggtgctgctgctgctgctcccctcccacccgccgcgcgccgccgacgcctccgccgatggaccgggaacaagtgacggagttcctgggccaggtgccgctcctgcagtgcctccccggctcctccatccgcaggatcgccgaggccgtccaggtcaagcactacgaacctggtgattatgtcgcccgtgaaggtgaacccgtggatggcctttgcatcatattggatgggcaggctgaagtttctgctcctgcaaacacagaagaagcaaaccgtccagactatgtgttaaataagtatgactactttggttacgggaccaatagttctgtacatcaagtaaatgctattgcggtgacaaagctgtcctgctttgtattgccaagtcaatatggacatctgctgcaaaccaagacaatttggaatgcagaagaaacacctgaaagccattcattgatggaacaaattttacatttagagaaattagaggttgatatctttcgtggatttactttgccagaagcttcaacttttaatcaagtttttggaggacaattgattgggcaggcactagcagcagcatccaagactgtcgattgcctgaaacttgtgcatagtctgcatgcaatttttctaatagcaggagacaataacatgccaataatatatcaagtgcatc

SEQ ID NO: 46893 - DNA, 1077 bp, Zea mays
  Clone ID: MRT4577_142777C.1
aaggccctttccatgggggaaagggacggtggattgatttcccagactgatgctgctggtgtgaagaggaggtgtgcgtgggtgacagcaaatactgatccttgttattctgcatttcacgatgaagagtggggagttcctgttcacgatgacaggaagttatttgagctgctagtactgtcaggggcattagctgaactgacatggccagcaattctgaataagagagacatattcagggaagttttcatggattttgacccagtatcagtctcaaaattaagtgagaagaagattatcgcacctggaagccctagcagttccttgttatccgaacagaaactgcgcggtgttattgaaaacgcacgccaaatactcaagatcatagaggaatttggatcatttgataaatactgttggagcttcgtgaatcacaaacctatattgagccgattcaggtactcccgtcaagtgcctgtcaaaacatcgaaagcagatgccataagcaaagacttggttcgaaggggtttccgcagtgtcggcccaacagtcgtatatacccccacgcgtccgcccaggagtccgaacgaccaccttatctcctgctaccgttttgctgaatgcgcggcctcctctgctggcgctgctaaactttctgatggaagcctagcaaattcaagtgatagcagccatggcacggcagagcagaagatgaacgggacgaatgggctggattcaggtcttgaactctccaggactatcgatgagctcagcatttcatagcggggtaggagcggtgctgaagcgatatggtgttagtttgtgtattttatgtgctgtagtataggtgtgattcggcgacctttttctgtagtttttccactcgtcaatgtaggctagaaaaatttttagtcttcggtgtgtcaggacccttgaacgacagcagggtaccgatgtactaccttcgtccggagataattgtctatctcgtattttgaggtgcttccttcgtcccgagataattgtttatctcgtattctgagaagttaaatattttaaatttcgactattttattt

SEQ ID NO: 46894 - DNA, 287 bp, Zea mays
  unsure (1)..(287): unsure at all n locations
  Clone ID: MRT4577_142778C.1
cccctcccctccggctggagggcaacatcctcctccccctcaaatctctcctctttatctcccccagtccccctcctcctcntgcgattcnccccntgctcccctctcaaaaccctanccctaccacagcctcccctccatnnctncnnatttccgggcggggaggcgcctccttcccnccacnnctnannancctacaaccccncannnccnccctccctatcctntncttancanccccnccntccccnacnctacccacnatnacctccncttctnncantaca

SEQ ID NO: 46895 - DNA, 2486 bp, Zea mays
  Clone ID: MRT4577_142779C.1
gaaagcaggaaaacaggtgcactcgcatcacaaagaatatacatcattacactgctgtcgctcaatggtcctggcaagccaaagactaaagattgttctaccctacatcgacgaggggtaaaaactataaaaaaagacaccaaatcacaccctccactacagcacacaaaatacacaagctaacaccgtctcgcttcagcaccccctcctaaccgctatgaaatgctgagctcgtctatagccctggacagttcaatgtcattcgtcccgttcaccttctgctccgccgtggcatggttgctatcacttgcatctgctaggcttccatcggtaagtttagcggcaccagcagaggaggccacgcattcagcaaaacggtagcaggagataaggtggtcgttagtcatgccagagacttgcatgaaggtataaacgaccgttgggccgacgctgcggaaaccccttcggaccaggtctttgcttatggcgtctgctttcgatgttttgacaggcacttgacgggagtacctgaaccggctcaatataggtttgtgattcacgaagctccaacagtatttgtcaaacgatccaaattcctctatgatctgcaacggcatgcacttaattcagacaagaggccgtatttttttttttttttttggggtaaaggttatggtgcttgctttaagaagggcaaggtacatacacttgtgatttaattcaaacaaaccttgagtatttgacgtgcattttcaataacaccacgcaatttctgttcagataacaaggagcagctaggacttccaggcgcaataatcttcttctcacttaactttgaaaccaatactgggtcaaaatccatgaaaacttccctgaatatgtctctcttattcagaattgctggccatgtcagttcagctaatgctcctgacagcactagcagctcaaataacttcttgtcgtcatgaacaggaactccccactcttcatcatgaaatgcagcataacagggatcggtatttgctgtcacccacgcacacctcctcttcacaccagcagcatcagtctgggaaatcaatccaccgtccctttccagcatggaaagggccttgtaatcagtctgagagagagccttcttcttcctagccccaaacgccggcctcccaatccggcccgtggatgcccggctgcagaacgagtccgtggacgcgtccgaggagcaggacgcgtcaagagacagccccgagcggcagcagcagctcctgccgacgcatccctgcgggcgcgctgagcgagggctgcaatgtgagcacggctgcgggtttcttctcctctgtcgcgcccgctgccgcggccacatccctccccgggcctcggtgagggcttcctgccgcgagcagcggacaccgagcgcgtcctgccccccgtggaccgcggttcagagtctccgccgccgctggacgccggcgacagccgccccctcgcgctagccccggacattggaccgaaccagcaacgccttgcaagctcaaaccgcccaacagccccttcgcccttcagaaccccagggcgagctaaaatcggagaggcattgctgcggaaacaccaaactcgggccaaggcaagcggcggattgcagacagctcccgcactcgaagcaacgcctcagctcttccgccgaaatccgaccagaaaaccctagcaatcgccgccaggccagcccggcattgcggagacacggcttagagccctcgatccaaacccccacgggcggcaaaatctttcccacccgacgccccagagtccgagccacaagacccagcaggaatcagcacgaacaactcccgcgaggatcggttcgggtgcccccgagcggcggaacccgcggcaagggcgaggcgaggcgatgcggcacgccggcgagccgagaggaaaccctaggaggagcagacgggtggggggagcgaggagagagcctcgagcctcggcagcggctgctcggaattccctgccgtggcgaagcccggccctggcctcgcgggtggcaccggagagacggtcggtgatgctaccgtcgccgacgttgcccctggcctgctccttgttggcctccttggaagcctcggcgcccttgccctggatggtctcggagacgtagttggcggcgttggtgaccgagttggtgacctgaccgacgatgccctcgttaggcttgtcaacgttgggagcagacatgttgatggttggttggttggttggaagggtttggaaaagaggagttggtttggattggattggaagtgaggttgattgttgtgttgtcagcaggcagttcaaaaggttgacctatttgggaatctccggatctatgcttattttcaactccccgaagcatttcgtcgcttgctacgcccttcctcgtctctgggtgcctaggtatccaccgcaagcctttcctctttgacccggccggcctcgaggtaccc

SEQ ID NO: 46896 - DNA, 589 bp, Zea mays
  Clone ID: MRT4577_14277C.1
gccccccctcctcgagttttttttttttctttttttttttttttttttttttttttttttttttttttttttttttgggaaaaaacctgttgcaagttgcaactttgattcaaaattgggggaatacctcacacaactcgcaatatggaaaggcgttttttataggggtatcggaccccgttcgggcggggggcacgggaaaacaaactccgttacataattcgaacggggccccgaaaaaaaatttcgggacacaccgggaggggcgagtaaagccatcgcccatagccggagggagaagaagttttccgaactcctggcctgctcctcgaatggaatcagcagttcagcacaccaagggggcgaaaaggcacacccgttttcccttggtccgaagcctaccaaaccaaaccgggtaatcacccaccgtccggaggggaggggtcctcggcctggaggtcctccgggctcaaaaaatgatcaaaaagccgttcgggtcctacggccagcaccgaaacgcgccgggggggtaaaaccctggggctaaaccaccccacgagggcgtccatcaccctgtccttttggggct

SEQ ID NO: 46897 - DNA, 435 bp, Zea mays
  Clone ID: MRT4577_142780C.1
cgtcctttttttttgaccataatgattttttttttttctcattagctgaatggaaaacacgagggtgaggaacagattgggacaaaggatcagggctgacacattgaacaaagaaacaacaacaactgcccaaggcggtggacgtacgcgtggacaaccaaaggcgcgtgcattacaggcggatcacagaatgacacggacacacgcccaggctctttaacatcgggctttcaatactatgcatacattcaacaccgacaagaggaatgcatcacaacacggccaaaaaacaccagcatacagcgtaaagctcccacagactaaaacccagctgctgacacacccggcaaacgacacacgatgacacccaaaccaaatcaccacaatgcgacagcagggccatttgcgggcagaaccggcgcagaataaccccca

SEQ ID NO: 46898 - DNA, 179 bp, Zea mays
  Clone ID: MRT4577_142781C.1
aaaaaaaaggcgacgcacgcgcacgacggacgcccgaacccggaatccgacggagctcgcgacgcgcgattctcaccgcgacccggactcgttcgtgtcaggctgcgtctaccagtgatacctgctacccacgcgtaccccatcacgaggatcggtaatcgatggtcgacacccgaacg

SEQ ID NO: 46899 - DNA, 573 bp, Zea mays
  Clone ID: MRT4577_142782C.1
gttcaaagtcccacaaggctgaaatcaggtctcagttctgctccttgtgtttgactagaaatgccaagctcttcagaaagtgagacagaatattatccaaggaaatgtggaggaaaagaagtttgggattcagacaaataattctattgagtaactaaactagcactcaaatccaccatctttttccatcgcatacctggtcttctcaagccttacatatatcatgaaattggcatgtccacaagacacttcagacagctttctctcagggtttcatctgggactgtgtcatcttgagatcctgctgattatttactcataagcatgtcaagctttgtgtacctcttgcttttcaacatagctgccaactatcagccacagaatctcccttggaaccatatgctctccacagtgaaaactccttctggatttaagactcaacatactcactcacacacacactcgcccacttttcctccattccactgaagtcactgcataatctttatagacttttcttggctgggtgttatagaactgcacattttgggacaaatcatgtactctctttga

SEQ ID NO: 46900 - DNA, 367 bp, Zea mays
  unsure (1)..(367): unsure at all n locations
  Clone ID: MRT4577_142783C.1
gccgcagtgtgatggtatctgcagattcgcctggagcaggggtaacaacgcagagtacttttttttttttttttttttttttttcattagcttctgtgctgctgaagacgctgttgctacctcgcccaaatctgttttccactgctttgacggcgagaacgtggagagtgctcctcctcctatgtagaaggactacaaactgtctaggggggggtgccgnnaggtttatgcttatgccatggaggagaaggcgggagngctngaggagggggacgggctnctggggncgannngctcctgagntgtttattttatatcgtcacaatttcgtggttgtcgttttgttattttgtgaagcagcccagcc

SEQ ID NO: 46901 - DNA, 418 bp, Zea mays
  unsure (1)..(418): unsure at all n locations
  Clone ID: MRT4577_142784C.1
aaagcccggaacctctaaagcggccgaccttnccnccccccccccctttttcctttttccccaccccccaacaccccangggccccagggggaaaaatcaaacggggacacccccaaacccccaaaaaaaaaaaacaaaccatgccggggacccataacaaccactcccgaacaaaaataccgcgccacccaaataaaaacaacataaaaaaagcaaccccacaaaccccccccacccggaaaaacaccccaagggcccgagccatgcccacaaacaaaaaaacacttccggcccacgaatattaacccccgggaaaaaagccaccacaaccacaccaccccacgggcggggcggaagcaattacgcccacaaaacccccctgcgcacccaaaaaaacacagaaccacgggcggcccc

SEQ ID NO: 46902 - DNA, 326 bp, Zea mays
  Clone ID: MRT4577_142785C.1
aaaaaaaacatgttctgaaaaaaaaacaagccctcgttgttcgggggggccctgtagtacaggggtcgccccggcggtaacaagcatccccccgggggggggcctttttgtttaatagggggaacccccagggggggtactaggcctgtttggagtacacagccagatagatttgcccccccccaaattttttttttaaaaagcgggccccgcatgcagggttggtttgttttggacccgggggttgctaaaaaaccaagaattttggggggcccctttttaaaaatgccggccgggacgaggaaatttaagacgtttttcctttg

SEQ ID NO: 46903 - DNA, 344 bp, Zea mays
  Clone ID: MRT4577_142786C.1
gcatattgcagtacgccaacgacgacacaacgggagccgcggccagcgggtgcagagacggccgcccgcctcccatgccggagatgcccgaccagcacgacacgaccacgacgttccacttccacggcaacctgtccggcctgccgacgcacccgctgctgccgcagctccggggccgcgtcgacgaccgcctcttcatctcgctcggcaagggcaccatctgccaaggggacaggccgtcctgcatgcggggaggcagcgacgaggccatcgaggtggcatacatgaacaacgtctccttccgcctccccgagaggatagtcatgctggaggcgcggcagtac

SEQ ID NO: 46904 - DNA, 1248 bp, Zea mays
  Clone ID: MRT4577_142787C.1
atggccaggcaggaggtagcacctcgtcggctgtcggaccaaagcgagccgacgacgccgacacccctgcgggggacatgtcgggtgttatcctcgcacctgggacaacaatgggcgtcgcttcccagcaacgtgccaaccccaggcattagtctcgcacctgagataatgacacattccatctccgatgcaacttcaccgccgtccaccaaccaggagttgggagggacggacgatgacaacctcatcatccgcaacctcccccttttcctctccgacgctgcccgggcctggctggagcatctgcctcctgcgcagatcttcggctgggacgacctagtcaaggccttcgctggaaatttccaaggtacgtacgtgtgccctaggaactcgtgggatctccggagttgccgccaacagccaggggaatccctgcgagagtacatccaacggttttcaaagcagtgcaccgagttgcctaacatcactgacttggacgtcatcggagcattcctcaccggcaccacttgccgggacctggttgcgacgccagtctacctagactggtccgacaaacccattaccttcgaccaaggcgaccaccccgacagcgtaccgagcccaggaaggtacccgcttgtcgtcgaccctgtcattggcaacactaggctctccaaggtcctcttggatggaggcagcagcctcaacatcatctacgccgagaccctagagctcttgggggttgatcggtacatgatccgggccggtgcaacaccctttcacgggattgtccccggcaagcgtgtcctgccaattgggcaacttgatttgcccgtctgcttcggaactctctccaacttccgaaaggaaaccctcactttcgaggtagtcgggttccgagggacctatcacgcggtgttggaaagaccgtgctacgccaagtttatggccgtccccaactacacatgcctcaagctcaagatgctaggccccaagggaaccatcaccgttggatccacataccgccatgcttacgagtgcgacgtggaatgcatggagtacgccgaagccctcgccgagtccgaagccctcatcgccgacctggattgcctctccaaagaggcgcccgacgcgaagcggcacgccagcaacttcaaaccaggcgaggcggttaagtccgtctctctcgaccccagcaacgacgccgacaagaaagtcaggatcggctccgagctcgaccccaaatag

SEQ ID NO: 46905 - DNA, 778 bp, Zea mays
  unsure (1)..(778): unsure at all n locations
  Clone ID: MRT4577_142788C.1
tggtacgcctgcaggtaccggtccggaattcccgggtcgaccccgcgtccggccaagatggaggaatacgcgagagagccgtgcccctggcgaattgtagatgactgtggtggtgcgtttaccatgggcaccataggtggcggcattttccaggccttcaaaggttttcgaaattctccagtgggaataaaccacagactccgaggaagtttaacagctattaaaaccagggctccacagttgggaggtagctttgcagtttggggaggactgttttccacgattgactgcagtatggttcaaatacgaggcaaagaagacccctggaactccatcactagcggtgccttaacaggagccatcctggcagcaagaaatggaccggtagccatggttgggtccgctgcgatgggcggcattctcctagctttaattgaaggagctggtatcttgctgacaagatttgcctctgcacagtttcccaatggccctcagttcactgaagatcactcccagttgccttccagccagttgccatcctcgccgtttggagactaccgacagtatcagtaggacttggttcccaggattcctggaaccgggtggactgtagttcggtaggatttcagaagatcaagttacagtctgtttaaagccttangtgggacatcggcggccaagcgggccataaagagacatttagcacatttttctatttaaaagagactcagagggtgaaaatatactgagtttatttattcttgcttggattgcatct

SEQ ID NO: 46906 - DNA, 1296 bp, Zea mays
  Clone ID: MRT4577_142789C.1
atgtacttcgatgggtcgctcatgaaaaccggagcaggcgctggcctgctcttcgtttcacccctcggaaggcatcttcgctacgtgatacgcctccattttccagcgtcaaacaacgtggccaagtacaaggctttggttaacgggctgcgcatcgccatcgagctaggggttcggtgcctcgatgctcgtggcgactcgcagcttgtcattgaccaagtcatgaagaactcccactgccacgaccagaggatggaggcctactgcgacgaagttcggcgcctggaagacaagttctacgggctggaactcaaccatatcgctcgacgcctcgggacggacaacggttccccggacgtcttctccagagacatgcatcaaccctccgtcaagatcgatgacacgcccgagcccgaggaggcctcggcccagcccgaggtatcctcgaccgtcgagggtaaggccctgcgcgtcgagggagagcggaatggggtcaagcctaacccgaactggcaggccctgtacctggaatatctccttcaaggagagctacccctcgacaaggccaaagctcgacgactagcgcggcgcgccaagtcttttgtcttactgggtgatgaaaaggagctctaccaccgcagcccctcaggcattctccaacgatgcatatccgtcgccgaaggacaggagctgttgcaagagatacactcgggggcttgcggtcaccatgtagcacctcgagccctcgtggggaacaccttccgacaaggcttctactggccgaccacggtggccaacgccaataggattaaggcacccggaggcttctcgcacctgctggtcgccatcgacaaattctccaagtggatcgaggtccgacccctaaccagcatcaggtccgagcaggcggtggcattcttcacaaacatcatccatcgctttgggctcccgaactccatcatcaccgacaatggcacgcagttcactgggaagaagttcctggacttttgcgaggaccaccacatccatgtggactgggccgccatagctcaccccatgacgaatgggcaggtggagcgtgccaacgatatgattttgcagggacttaaaccgaggatctacaatgacctcaacaagtttggcaagcgcagtctctgcgacgctaccaagcccgaatggttcggccccgaggcttccaggtgggagacttggtacttcggctgcggcaagacgcccgaggacgccacaagctcactcctccctaggaagggccgttcatcatcaccaagattttga

SEQ ID NO: 46907 - DNA, 411 bp, Zea mays
  Clone ID: MRT4577_14278C.1
atggcacaggggctggcgccgaggaggggcgaccaagacgtcgcaagggccctagccgagccgccggccagccgccgcaccgagggaacgagggggggagatagggggcacagggagacgggagagaagggagaggggctgcgagaacacgacgaaaaacgaagaagaaaaacgaagaacaatgggggttgctcaccggagaaggaaacctcgccggagctgagaagaaaaccgtcgattgacgtcaaatcagagatcggatcgacgaatcgaaatcaccaagatgaagccctcaacgagacgaacgcagtggtactcttggatttcgccaatgacgcacggattgaaagtaattgctcgctggagttgtcgtcggagttggaactgctcagaacttcggtaaggaggtga

SEQ ID NO: 46908 - DNA, 365 bp, Zea mays
  Clone ID: MRT4577_142790C.1
ttgacaaacaatttgctgacgaggtaattgctacttgctttcatctgttatccattcccgctattggtatactacatgatgtgcactggttacagtgttcatttcgtgcactgagttcaagtattgtgtgctctccagtctgtgcttatttttaaaagtatatcatctacatttgcccttttgaattgcttttaccgataagaaaatgtttgctgtttcatttcaattctagaatttcttttacattgtgtgtatgtgttccatgtgcttcatgatgtgttttaacaactaggtgtatactgaaagatcaatatataatggatcgaggtaaactacctatataggacaatgtcttgagtatacat

SEQ ID NO: 46909 - DNA, 1767 bp, Zea mays
  Clone ID: MRT4577_142791C.1
atggcggccgtcagcccgcccgccggcggcagaatcaacgacgtcttccccacgtggcagaagaacaacatccgagtttgtcccatcacctcccccgccgacggaggaggaggcggggcaaccgtggccaagcaggaggcggcacctcgtcggctgtcgagcgagtcgacggcgccggcgccccgacgggggacacgtcgagcgtcgacctcgcgtctgagacgaagacgagcgccatttcctcgcaacacggggtccgacgaaggcaaccatcttggtataccggaaaactgtgatccccctaggcctgcacatcgcgttgacatcctccgggagctagctgtggtcccagtccctgcggggggtcaggacacacagctcgagcaaatccgcgagatgcatgccaggctcgacgagggagcaggaacacttgagccgctccgccagaacatcgggcaggaatgggcagaccgagctccggccggagaaacgcgtcatctacaacagggcatccagccccgcattgccgacgacgtcagggcaaggctgccaccggcttccagtggggtcggcgagaacctggctgcaacagcaatacttcttcgtgcaatgccagaaccatcaaccaccgaagggcggcgaatccagggagagctcaagaatctcctagaggatgccgcggtccgacgggccgaaagctctgcctcccgaaggctgggatacccctcggagcatcgcgccgcgacttcccgattcatgcgggaagccccggtccacaccgggcgcacgcgcaacacagcgcctgcggcccagggttgcatcggcaacaagcaccaccaccgcaaccatcgagcccacctcgatgagaggggccgccagccggaagaggttcccgaggcgtccactcagcgcggcaccaagaagaagggcaagaagaagtcgcaagcgaaacgcggcaccgccgacgcggaccttgtcgccgccgctgagtacaagaaccctcggaaacctcccggaggcgccaatctcttcgacaaaatgctcaaggagccgtgcccctatcatcagggacccgtcaagcacacccttgaggagtgcgccatgcttcggcgccactttcacaaggccgggccgcctgcggagggtggcagggcccgcaacgacgacaaggaggaggatcacaaggcagaggagttccccgaggtccacgactgcttcatgatctatggtgggctagtggcgaacgccttgggtcggcaccgcaagcaagagcgtcgggagggcgatcaccccgaccgcgtgccgagcccggggaaatatccgctcgttgtcgaccccatcatcggcaacgtcaggctcaccaaggtcctcatggacggaggcagcagcctcaacatcatctacgccgagaccctcgggctcctgcagatcgatctatcctcggtctgggccgtgctggggaggccatgctacgccaagttcatggctgtccccaactacacctacctcaagctcaagatgccgggccccaacggggtcatcaccgtcggccccacgtaccgacacgcatacgaatgcaacgtggagtgcgtggagtacgccgaggccctcatcgccgacctggagagcctctccaaggaggcgccagacgtgaagcgccatgccggcaacttcgagccagcggagacggttaagtccgtccctctcgaccccagcaacgacgcctccaagcagatccggatcggctccgagctcgaccccaaatag

SEQ ID NO: 46910 - DNA, 2673 bp, Zea mays
  Clone ID: MRT4577_142792C.1
atgcttgtaacccctactacgagcaccccggtgcaagataatataagcctcattcccccgcttgtgttccatcttgcatcaacccatctgggcaggggcacgcagcaacaaattcactggtcagttgacgaacctcgcgggtcagaaacgtcgacagttggcgtgccaggtaggggctcgctgcgtgttaacgaatactttcccgtcgagttccagatgggtagccttcagcagcctcttcagcccgggacggtgctccgctttgggagtctcgagttcatgtcccacgacggcagctacgacatggtacttctcccctcgcagcgtgacagcaacgacggtcgtcgactcgcccggcggcggcgaactcgccgacgacttcccaccgtgacagaagaggaacacccaggtttgccccgccaccctcctcgccgaaggaggagacggggcaatcgtggccatgcaggaggcgacaccttgtcggttgtcaggccagagcgagtcgacgacgccagcacctctgtgggggccatgtcgggtgttgtccttgcacttgagacaacgacgggtgtcacttccccgcaacgcgccaaccccgagcggactgatgatgccagcacccttgcaaaggacttgttgggcgttagcctcgtacctgagataacggtgcagtccgtccccgacgcgacttcgccaccgtccatcgaccaagaggtaccatccgttttccaccctgtccctttagattcagcttcgatccaccaagcgaccccgcttcgtgccatgcgagacttcatgtccgcatgtgactactgcctctccggctgctctgacgatgatcacggctttgacgacgagggttatgacccaagtcgcgagtgtttccacgtcgatcagggggatcatggcgaaggcaaccacctcggcatgccagaagatgacaacgcccctgtgcctgcgtctcgcgttgacatcccgcgggagctagctgtggtcccagtccctgcagggggtcaggacacacagctcgagcaattccgcgagatgcaggccaagctcgacgaagaagcagggcggcttgtgcagctccgacaaaacatcgagcaggagtgggcaggccgagcacttgccggagaagcgcatcatcgggcccgagacgtccagcgccgtatcgttggcgatgccagggcggggctgcccccggccttcagcggggtcggccagaatctagctgcagcggtgatgctactccgaacaatgtcagagccatccaccaccgaggggcggtgtatccagggcgaactcaaggatctcctggaagatgccgcagtccggcgagccgagagctttgcctcccgaaggcagggttgcccctcgaagcatcgcgcaacgccctcccgacgcatacgagaggcctcggtccgcaccgagcgcacacgggacgggacgcccgcggccccggatcgcctcggcgacgagcaacaccgtcgcgaccatcgagcccgcctcgaggaaagggtgcgccgaggctaccaccccaggcgcggagggcgctacgacagtgaggaggatcggagcccctcgcccgaaccgccaggtccgcgagcctttagccgggccatacgatgggcgccgttcccggcccggttccgagccccgactaccatcaccaagtactcaggggagacaaggccggagttgtggctcgcggactaccggctggcatgccagctaggagggacagacgatgacaacctcatcatccacaacctccctctcttcctctccgacgctgcccgggcatggctggagcatctgcctcctacgcagatctccaactgggacgacctagtcaaggccttcgcgggaaacttccaaggtacgtacgtgcgccctgggaactcatgggatctccgaagctgccgccagcagccaggggaatccctgcgagagtacatccggtggttttcaaagcagcgcaccgagctgcccaacatcaccgactcggacgtcatcggagcgttcctcgccggcaccacgtgtcgggacctggtgagcaaactggggcgcaagactcccaccaaggcgagcgaattaatggacatcgccaccaagtttgcctctggcgggaccctcggcagaaggtggcaagggccaaggcaacaacaagaagggggcgacaaggaagaggagttcccggaggtccgcgactgcttcatgatctatggcggacaggtggcgaacacctcggctcggcaccgcaagcaagagcgccgggaggtctgctcggtgaaggtagcggcgccggtctacctagactggtccgacaagcccatcaccttcgaccaaggcgaccaccccgactgcataccgagcctaggaaggtacccgctcgtcgtcgaccccatcatcgacaacgctaggctcaccaaggtcctcatggacggaggcagcagcctcaacatcatctacgccgagaccctagggctcttgtggatagatctgtccatgatccgggccggtgcagcaccctttcacgggatcgtccccggtaagcgtgtcctgccccttgggcaacttgatttgcccgtctgctttggaactccctccaacttccacagggaaaccctcacgtttgaggtggtcggtgaaagtcgcctagacggggggtga

SEQ ID NO: 46911 - DNA, 3057 bp, Zea mays
  Clone ID: MRT4577_142793C.1
atggcaaccgacagcccgcccgccggcggcggaaccgacgacgtcttccccgtgtggtggaagaacaaccttcgagctcgtcccgccttcttccctgccgacggaggggaaggcagggcaaccaagaccaagcaggaggcagcgcctcatcggctgtcgagcaagtcgacagcgccggcaccccaacgggggggcgcaccgggtatcgacttcgcgcttgagacaaagacgagcgccgtctccccgcgacacgccaatcccgagcaagcggacgacgccagcgcgcttgcgaaaagcttgctggacgtcaccctcgtacctgagacgacggtgcagtcagtccacgacgtgactttatcgccgctcgttgaccaagaggtaccgaccgattcccatcccacgtcattcggattcagcctcaacccgcctagcgacctcgctttggcgggcgctctcgtagaggcgagtccaaaccctccggggtttcgcatgcggtcgccttgggaccggctgacggacgtcttgacctacgggccctctgggtccgaggaagacgacgggcccagcatctgctgggatttctctggagttggcaaccccagtgccatgcgggacttcatgaccgcatgtgactactgcctctccgactgttccgacggtagccgcagcctcgacgacgaggactgcggcccaatccgcgaatgtttccacgtcgatctagggggtccctccgaaggcaatcatctcggcatgccggaggacggtgatctccctaggtcggtgccccgtgttgacatcccatgggagctagttgtggtccccgttcaggcggggggccatgacccatggctcgagcaaatccgcggggtgcaggccaggctcgacgacggagcaggagcgcttgagccgatccgccgggacgtcgggcaggcatgggcgggccaacccccggccggagaaatacgtcatctgccccagggcttccagcaccgcgccgccgacgacgtcagggtcaggccgccacccgcatctagtggggtcggccagaacctggctgcagcagcgatgcttctccgcgcgatgccggagccatcaaccaccaagggccggcgaatccaaggggagctcaagaatctcctggaaggcaccgcggtccgacgggccgagagctctgcctcccgaaggcaggggtacccctcggaacctcatgtcgcgacttcccgattcatgcgggaagcctcggtctacatcgggcacacgcgcaacaccgcgcctgcggccccaggtcgcctcggcaacgagcaccatcaccgcgaccgtcgggcccacctcgacgagagggtgcgccgaggctaccaccccaggcgtgggggacgctacgacagcggggatgatcggagtccctcgtccgaaccgcccggtccgcaggccttcagccgggccatccgatgggcaccattcccgacccggttccgacccccgactactatcacaaagtactcgggggagacgagaccggaactgtggctcgcggactaccgtctggcctgcgaactgggtggaacggacgatgacaacctcatcatccgcaacctccccctgttcctctccgacaccgctcgcgcctggttggagcacctgcctccggggcagatctccaactgggacgacctagtccaagcttttgccggcaatttccagggcacgtacgtgcgccccgggaattcctgggacctccaaagctgccggcagcagccgggagagtctctccgggactacatccgacgattctcgaagcagcgcaccgagctgcccaacatcaccgactcggatgtcatcggcgcgttcctcgccggcaccacctgccgcaacctggtgagcaagttgggtcgcaagaccccaccagggcgacgcggcgccaagaagaaaggcaagaagaagtcgcaagcgaaacgcgacgccgccgatgcggaccttgtcgccgccgccgagtacaagaaccctcggaaaccccccggaggtgccaacctcttcgacaagatgctcaaggagtcgtgcccctatcaccaggggcccgtcaagcacacccttgaggagtgcgtcatgcttcggtgccacttccacagggccggaccacccacggagggtggcagggctcgcgacgacgacaagaaggaagatcaccaagcaggagagttccccgaggtccgcgactgcttcatgatctacggcgctgcgcccttccatgggatcattcccgggaagcgcgtccagcccctcggacaactcgacctccccgtctgcttcggaacaccctccaacttccgaagggagaccctgacatttgaggtggtcggtagggatggcaacggggccccattccccgatccccggcggggaattcatccattaggggacggggatggggagaaaatactccccgcggggaacgaaacgggtaaaaaccaatccccatcgggtatggcggggtcgggtacggataatggccacccatacccgctacccgtcggggatccgtcacagcagggttctttaccatctgttaatgactccgaagcagtaggaggaaatgcggaagtggaagagattgaagtttctgatgatgaagaccaggaaggtggtgttggttcaaagagaaagttgacttcagctgtttggaaagaattcaaaagggttagagtaggggataaaattaaagcaaagtgcaactggtgcgcaaagaaacttggaggagagacaaaaaatggaaccaaacatctacatgatcatctcaagacatgtccatatcgtaaaagcaaaatgaccggacaaagcaagacatttagtcaaagctcattgaggtttggttgtcgtgatacagggaaagtgtcagtggagaactatacttttgatcaagaaattgctagaaaggagcttgcatctatgatggttttgcatgaatacccattatgcatggttgatcatacaggatttagaagatttgttagcgcacttcaacctttgtttaaaatggtgacaaggaacactattaggtaa

SEQ ID NO: 46912 - DNA, 324 bp, Zea mays
  Clone ID: MRT4577_142794C.1
cccacgcgtccgaccacgcgtacgtggacgcgtgggcggacgcgtgggcccacacaacggcgcgattctcctcctccgtccgcgtagctctcgctttccgccatgtccgggcgcggcaagggcggcaaggggctgggcaagggcggcgccaagcgccaccgcaaggtgctgcgcgacaacattcagggcatcacgaaaccggcgatccgtatgctggccaggaggggctgcgtcaagcgcatttctgggctcatctacgaggagacccgccgcgtgctcaaaatcttgctggagaacgtcattcgcgacgtcgtcacctacacc

SEQ ID NO: 46913 - DNA, 2613 bp, Zea mays
  Clone ID: MRT4577_142795C.1
atggcggtcgacgacccgcccgccggcagggaaatcgatgacgccttccccacgtggtggaaggacgacattcgggcttgtcccgtcccctcccccgccgacggaggaggcggggcaaccaaggccaagcagaaggaggcacctcgttggctgtcgagcgagtcgacggcaccggtaccgaccgattcccatcttgcatcttttggattcggcctcgacccgccaagcgactccgcttcggtggacactctcctagaggcgagtccaaaccctccggggtatcgtgtgcggtcaccctggggccggctgacggccgtctcgtcctacgggccctcggggtccgaggaagatggcgagcccgacctctgttgggatttcttcggacttggtaaccccagtgccatgcgggacttcatgaccgcatgcgactactgcctttctgattgttccgacgggggtcccggcgaaggcaaccatcttggtatgccggagaacggtgatctccctaggcccgtgcctcgcgttgacatccttcgggagctagctgtggtccccgtcccggcggggggtcctgacccacagctcgagcaaatccgcgagagacaggccaggctcgacgagggagcaggaacgcttgtgccgatccgccgggacatcgggcaggaatgggcgggccaacctccggccggagaagcacgtcatcccccccagggcatccagcaccgcatcgccgacgacgtcagggtaaggccgccaccggattccagtggagtcggccagaacctggctgcagcggcaatacttcttcgcgcaatgccggagccatcaaccaccgaggggtggcgtatccagggggagctcaagaatctcctggaggacgccgcagtccgacgggtcgagagctccgcctcccgaaggcaggggtacccctcggaacatcgcgccgcgacttcccgattcatgcgggaagcctcggtccataccgggcgcacgcgcaacacagcgcctgcggccccgggtcgcctcggcaacgagcaccatcaccacagccgtcgggcccacctcgacgagagggctttcagccgcgccatacgacgggcgccgttcccgaccgggttccgaaccccgactactatcacgaagtactcgggggagacgagaccagaactgtggctcgcggactatcggctagcctgccaactgggtggaacggacgatgacaatctcatcatccgcaacctccccatgtttctctccgacaccgctcgagcctggctggagcacctgcccccggggcagatctccaactgggacgacctagtccaagccttcgccggcaatttccaaggcacatacgtgcgccctaagaactcctgggatctccgaagctgccgccagcagccgagagagtctctccgggactacatccggcgattctcgaagcagcgcaccgagctgcccaacatcaccgatttggatgtcattggcgtgttcctcgccggcaccacctgccgcgacctggtgagcaagctgggtcgcaagacccccaccagggcgagcgagctgatggacatcgccaccaagttcgcctctggccaggaggcggttgaggccatcttccggaaggacaagcagccccagggccgcccaccggaagatgctcccgaggcgtcaactcagcgcggcaccaagaagaaaggcaagaagaagtcgcaagtgaaacgcgacgccaccgatgcggaccttgtcaccgcagccgagtacaagaaccctcggaaacctccgggaggtgccaacctcttcgacaagatgctcaaggagtcgtgcccctatcatcaggggcccgtcaagcacacccttgaggagtgtgccatgcttcgacgccactttcacaaggtcgggccacccacggagggtggcaaggctctcgacgacgctaagaaggaagatcacaaggcaggagagttccccgaggtccgcgactgcttcatgatctacggcgggcaagtggcgaacgcctcagctcggcaccgcaagcaagagcgtcgggaggtctgctcggtaaaggtggcggcgccagtctacctagactggtccgacaagcccatcaccttcgaccaggccgaccatccagaccacgtgccgagcccggggagatacccactcgttgtcgaccccatcatcggcaacgtcaggctcaccaaggtcctcatggacggaggcagcagcctcaacatcatctacgctgagaccctcgggctcctgcggatcgatctgtcctcggtccggacgggcgctgcgcctttccacgggatcatccccgggaagcgcgtccaacccatcggacaactcgatctacccgtctgcttcgggacgccctccaactttcgaagggagaccctcacgttcgaagtgtgcgtggagtacgctgaggccctcgccgagtccgaggccctcatcgccgacctggagagcctctctagggaggcgcccgacgtgaagcgccacgccggcaacttcgagccagcggagacggtcaagtccgtccctctcgacccctgcaacgtcgcctccaagcagatccggatcggctccgagctcaaccccaaatag

SEQ ID NO: 46914 - DNA, 1578 bp, Zea mays
  Clone ID: MRT4577_142796C.1
atgctcctggggttcatcgtctccaagcggggcatcgaggccaacctggagaaaatcgcggccatcaccaacatggggcctatcaaggacttgaaaggactacatagggtcatgggttgccttgcggctctgagccgctccatctcgtgcctcggcgaaagaggcctacccctgtaccgcctcttaaggaagaccgagcgcttcacttggacccccgaggccgaggaagccctcgggaacttaaaggcgctccttacaagcgcccccatcttggtgccccccagctgccggagaagccctcttgatctacgtagccgcaaccactcaggagtgggcgcgggcctgatcttcatctcaccccttgggaagcacctccgctacatgttgcgcctccatttcccggtgttaaacaacgtggccgagtacgaggctctcgttaacggcttgcgcatcgccatcgagctaggggttcggcgcctcgatgctcgtggcgactcgcagcttgtcatcgaccaaaccgacgacacgcccgagcccgaggaggcctcggcccagcccgaggcaccctcggctcagcccgaggcaccctcgaccgccgagggtgaggcactgcgcatcgaggaagagcagaatggggacagctacccctcgacagagccgaagctcggcgactggcgcggcgcgccaagtcgttcgtcttgctgggtgacgaaaaggagctctaccgccacagcccctcaggcatcctccagcgatgcatatccatcgccgaaggtcaggagctattgcaagaaatacactcgggggcttgcggtcatcacgcagcacctcgagccctcgttggaaacgccttccgacaagaaggcacccaggggcttcacgcacctgctggtcaatatcgacaagttctccaagtggattgaggtccgacccctaaacagcatcaggaagttcctggacttctgcgaggaccaccacatccgggtggactgggccgccgtagctcaccctatgacgaatgggcaggtagagcgtgccgacgacatgattctgcagggacttaagccgaggatctacaacgacctcaacaagttcgacaggcgatggatgaaggaactcccctcggtggtctggagtctcagaacaacgccaagccgagccacgggcttcacactgttctttctagtctatggggccgaggctatcttccccacagacttagaatacggttccccgaggacaagggcgtacaacgaacaaagcaaccagaccagccgagaagactcactggaccagctggaagaggctcgggacatggccttactacactcggcacggtatcagcagtctctgcgacgctaccacgcccgaggggttcggtcccgagacctccaggtgggggacttggtgcttcggctacgacaggctgcccgagggtgccataagcttactcctccctgggaagggccattcatcatcgccaagattttgaagcccggaacatacaagttggccaacagtcaaggcgaggtctacaacaacgcttggaacatccgacagctacgcttttacccttaa

SEQ ID NO: 46915 - DNA, 414 bp, Zea mays
  Clone ID: MRT4577_142797C.1
tgggttcaaggctggatccgttggcttaacaaaccttaccggcaaccggaaaccccgtccgggcaaaaaaggattgggcctaacccgccaacctaggcaatttggtggagaaccgaccgggtccgggtacttaaatgcctaaattttgacggcactcccgcatgctcaaaataatactaactgacagcgtgagacagaactggctgctctgtcggacctgctagcccaatgatgggtgctgtggagaggaagactcatgacaatgaacgcaagcaatggccacgacaggattgtttagaaccatttctgttacaacgttcatgatatctctctcactcactgctctcatctcattaagtactagctatccaatgcaatgtttccacactgggcagtcatatcaccctgttttgg

SEQ ID NO: 46916 - DNA, 2625 bp, Zea mays
  Clone ID: MRT4577_142798C.1
gccgaccaccccgaccacgtgccgagctcggggaaatacccgctcgtcgtcgaccccatcatcggcaacgtcaggctcaccaaggtcctcatggacggaggcagcagcctcaacatcatctacgccgagaccctcgggctcctgcgtgttgatctgtcctcggtccgggcaggcgctgcgcctttccacgggatcattcccgggaagcgcgttcagcccctcggacaactcgaccttcccgtctgcttcggagcaccctccaacttccgaagggagaccctcacgttcgaggtggttgggttccgaggaacctaccacgcggtactggggaggccatgctacgcgaagttcatggccgtccccaactacacttacctcaagctcaagatgccgggccccaacggggtcatcaccgtcggccccacgtaccaacacgcgttcgaatgcgacgtggagtgcgtggagtacgccgaggccctcaccgagtccgaggccctcatcgccgacctggagagcctctctaaggaggtgctagacgtgaagcgtcatgccggcaacttcgagccagcggagacggaagcagtgctcgtcgacttcctccgcgcgaacgccgacgtcttcgcgtggagtccctcggacatgcccgacataccgagggatgtcgccgagcactcgctggatatccaagccggagcccgacccgtcaagcagcctctgcgccgattcgatgaagaaaagcgcagagccataggcgaggagatccacaagctaatggcggcagggttcatcaaagaggtattccatcccgaatggcttgccaaccctgtgcttgtgagaaagaaaggagggaaatggcggatgtgtgtagactacactggtctaaacaaagcatgtccgaaggttccctaccctctgcctcgcatcgatcaaatcgttgattccactgctgggtgcgaaaccctgtctttcctcgatgcctactcagggtatcaccaaatcaggatgaaggagtccgaccagctcgcgacttcttttatcacgcccttcggcatgtactgctatgtcaccatgccgttcggcatcgtagacaagttctacgggctcgagctcaaccacatcgcccggcgctacaacgagactgcggacgagctggctaagatagcctcggggcgaacaacggttcccccggacgtcttctcccgagacctgcatcaaccctccatcaagatcgacgacacgcccgagcccgaggcaccctcggcccagcccgaggtacccttggctcagtccgaggcatcctcggcacggctcgaggcaccctcagcttggcctgaggcaccctcggcacccgagggtgaggcactgcgcgtcgaggaggagcgaagcagggtcacgcctaatcaaaactggcagaccccgtacctgcaatacctccaccgaggagagctgcccctcgaccgagccgaagctcggcgcccctcaggcatcctccagcgatgcatttccatcgccgaaggtcaggaactcctgcaagagatacactcgggggcttgcggccatcacgcagcacctcgagcccttgtcggaaacgctttccggcaaggtttctactggccgacggcggtggccgacgccactagaattgtctgcacctgcgaagggcgtcagttctacgcaaggcagacccacctgcctgctcaggctctgcagaccatacccatcacctggccttttgccgtgtggggtctggacctcgtcgaccccttgcagaaggcacccgggggctacacgcacctgttggtcgccatcgacaaattctccaagtggatcgaggtccgacccctaaacagcattaggtccgagcaggcagtggcgttcttcaccaacatcatccatcgtttcggggtcccgaactctatcatcaccgacaacggcacccagttcaccgacagaaagttcctggacttcagcgaggatcaccacatccgagtggactgggccgccgtggctcaccccatgacgaatgggcaagtagagcgtgccaacggcatgattctacaaggactcaagcctcggatctacaacaacctcaacaagttcggcaagcgatggatgaaggaactcccctcggtggtctggagcctgaggacaacgccgagccgagccacgggcttcacgccgttctttctagtctatggggccgaggccatcttgcccacagacttagaatacggttccccgaggacgaaggcctatgccgaccaaagcaaccaagctagtcgagaagactcgttggaccagctggaagaggctcgggacaaggccttactacactcggcacagtaccagcagtccctgcgacgctaccacgcccgaggggtccggtcccgagacctccaggctcggatcttgacggttgaagggagcagcagtaccctcggcgtcggctacaccttcggcgaggtccgacctagcctcggacggcgacgcggtctgaggatctacactctgaaggacgacatcatcatctcgcccgggccatcgttgccagggtcttctccgagaatccggcccgagcaggcggctcgactggtcaccccgaggcctcggccagctatcctctga

SEQ ID NO: 46917 - DNA, 1026 bp, Zea mays
  Clone ID: MRT4577_142799C.1
gatcgctccgtgtccgaggagagcggcggcggcgcaaggagtcttcctgtccgacgccggcaacgtcgacaccgctggcaaacttctctccgattgtccctgctccagtaagagtaggcgaggatgagcctcccccatcttgggtgttggtgcctgacccattttctctagttttgctatggatatgagcaatagagatcaccttaggaggagggaggaggatgatgatgacctcttccttttcattctcccttccctacatctcttgggctatcttggacgtagtaaaaagaaattgaggcatacatcagcgctgaccggggaggaaaaggttcgagagctacttgaaggccatatcaagaactacagggtatcatttagaatggaaccttacattttcaaatccttggcgaactatcttagaatggaaggattggttaaagatacaagaatcaaagttgaggaaaaacttggcttcttcctatacatgattagccacaatgcgacatttgaagatctccaagtcttttttggtcatagcaatgatacatttcaccgtgtcatcaaacatttcttcgacattgttatccctggccttagcatgcggttcctaaagcctccttccaatcaagttcatcctaaaattcatggagacaaccgattttatccatacttcaagaattgcataggttcaatagatggaacccatgttccagtatcaatgtcacccgatcaagccgcaccattcaggaataggttgggagtagttgtacttggttccctgcagctgacaggaaatattggtcatatggagacagttctgcacagcgttctgagtgccgatatgagctatatatatgttgcatttctccatgtttgggctcagcatgtaatagaactgaaggaaggttgttgtgagacttgtatgacatgcttaaatttctggataaaatctagcatataataagtctattacatgcttaaatttctagagaaatgacatgttctatgtttaaatttctagag

SEQ ID NO: 46918 - DNA, 635 bp, Zea mays
  unsure (1)..(635): unsure at all n locations
  Clone ID: MRT4577_14279C.1
cccagacgcggtggtggcggcagatggtgaggcagatggtncggctcacgtgctcgtaccagcacgccatagacgccccgaacgcgatcggcggccacacccgccgcggagccacgcgccgcatcacgtactgcgccgccgactccgactccgactccggcaccgggaagtagggcggcgcgaggagcgtgagcgacctgacggcggcggggtacttgacggcgagggccagcgccagcacggacccgagggagtgcgccaccacgtggaacgacccgatccggtagcgccggagcacggagcgctcgatcatctccacgtgctcgcgcagcgtgtacagcgactccgccggcttggggctgcgcccgaaccccagcaggtccacggcgaacatccggtaccgggaccgcgccgaggggctgaacgccgggaacaccgtctccgtccagaacacggacgacgagatgaagccgtggatgaacaccacgtcctccgtctccaccgccgccatcgccgccggcgtcaacggcgtcggcgcctggacgtgcacgtacaggtgggacgacgacgccggggacccgctccaggcgtggcacaccttgcagtcgcagtcggaccagcacggcgcctgccgc

SEQ ID NO: 46919 - DNA, 251 bp, Zea mays
  Clone ID: MRT4577_1427C.1
ggcctacggctcgacttcgacgagtggctctgagcacgtgtcgtgcacgttcccgggctcggcctcagcctcatgtgtactctctaaagagctcgccgcgcatcgcgatcagcacaggaacgagatggaccggctgatccatgaacatgcggacaggctccggcgcgcgctggccgacactcgtcggcggcactaccgatcgctggtcggcgcggctgacgcggctgctgctcaacgggtaaaggagaagg

SEQ ID NO: 46920 - DNA, 2088 bp, Zea mays
  Clone ID: MRT4577_142800C.1
atgggcagtctccagcaacctctccggcccgggacggtgctccgtttcgggagtcttgagttcatgtccctcgacgacagctacgacatgatactccttccaccgccgtgcgacagcgacactggcggccgacagcccgcccgccggcggcggaatcggcgacgtcttccccgcgtggtggaagaacaacattcgagctcaccccgtcctctcccccgccgacggaggaggaggcgaggcaaccaaggccaagcaggaggcagcgcctcgtcggctgtcgagcgagtcgacggcgccagcgccccaacggggggcacgtcgggcatcgacctcgcgcttgagacgaagacgagcgccgtctccccgcaacacgccgatttcgagcaaacggacgacgccagcacgctcgcgaaaggcttgctggacgtcaccctcgtacctgagacgacggtgcaatccagcctcgacccgccaagcggcttcgctttggcggacgctctcgtagaggcgagtccaaaccctctggggtttcgtgtgcggtcaccctgggacaggctgacggacgtctcgacctacgggccctcggggcccgaggaagatgacgagcccgacttctgttgggatttctctggacttggtgaccccagtgccatacgggacttcatgaccgcatgcgactactgcctttccaactgttccgaccgtagccgcagcctcggcgacgaggactgcggcccaagccgcgaatgtttccacgtcgatctagggggtccctccgaaggcaaccatctcggcatgccggaggacgggcacgtacgtgcgccctgggaattcctgggacctccgaagctaccgacagcagccgggagagtttctccgggactacatccggcgattctcgaagcagcgaccgagctgcccaacatcaccgactcggatgtcatcggcgcgttcctcgccggcaccacctgccgcgacctggtgagcaagctgggtcgcaagacccccaccagggcgagcgagctgatggacatcgccaccaagttcgcctctggccaggaggcggtcgaggctatcttccggaaggacaagcagccccagggccgcccaccggaagatgcccccggggcgtcaactcagcgcggcgccaagaagaagagcaagaagaagtcgcaagcgaaacgcgacaccgccgatgcggaccttgtcgccgccgccgagtacaagaaccctcagaaaccccccggaggtgccaacctcttcgacaagatgctcaaggagccgtgcccctatcaccaggggcccgtcaagcacacccttgaggagtgtgtcatgcttcggcgccacttccacagggtcgggccacccgcggagggtggcagggcccacgacgaagacaacaaggaagatcaccaggcaggagaattccccgaggtccgcgactgcttcatgatctacggtgggcaggcggcgaacgcctcggctcagctccgcaagcaagagcgccgggaggtctgttcggtgaaggtggcggcgccagtctacctagactggtccgacaagcccatcaccttcgaccaagccgaccaccccgaccacgtgccgagcccggggaaatacccgctcgtcgtcgaccccgtcatcggcgacgtcaggctcaccaaggtcctcatggacagaggcagcagcctcaacatcatctacgccgagaccctcaggctcctgcgtgtcgatctgtcctcggtggtcgggttccgaggaacctaccacatggtactgggaaggccatgctacgcgaagtttatggccgtccccaactacacctacctcaagctcaagatgccgggccccaacggggtcatcaccgtcggccccacgtacaaacacgcgttcgaatgcgacgtggagtgcgtggagtacgccgaggccctcatcgccgacctggaaagcctctctaaggaggtgccagacgtgaagcgtcatgccggcaacttcgagccagcggagacagttaagtccgtccccctcgaccccaacggcgatacctccaagcaagtccggatcggctccgagctcgatcccaaatag

SEQ ID NO: 46921 - DNA, 1404 bp, Zea mays
  Clone ID: MRT4577_142801C.1
atggggcccatcaaggatttgaaaggcgtacagagggtcatgggatgccttgcggctctgagccgcttcatctcgcgcctcggcgaaagaggcctacctcagtaccgcctcttgagaaaggccgagtgcttcacttggacccctgaggccgaggaagccctcgggaacctgaaggcgctccttacgaatgcacccatcctggtgcctcccgctgccggagaagccctcttgatctacgtcaccgctaccactcaggtggtcagtgccgcgattgtggttgagagacgagaagaagggcatgcattgcccgtccagaggccggtctacttcatcagtgaggtactgtccgagaccaagatccgctacccacaaattcagaagctgctgtacgcagtgattctgacgcggcggaagttgcgacaatacttcgagtctcatccggtgactgttgtgtcatccttccccctgggggagatcatccagtgccgagagaactcgggtaggattgcaaagtgggcggtggaaatcatgggcaagacaatctcgttcgcccctcggaaggccatcaagtcccaagtcttggcggactttgtggctgaatgggtcgacacccagctcccggcaactccgatccaactggaactctggaccatgtttttcgacgggtcgcggatgaaaacaggggcaggcgcgggcctgctcttcatctcgcccctcgggaagcaccttcgctacgtgttgcgcctccatttcccggcgtccaacaacgtggctgagtacgaggctcttgtcaacgggttgcgcatcgccatcgagctaggggtccgatgcctcgacgctcgcggtgactcgcagcttgtcatcgaccaagtcatgaagaactcccactgccgcgacccgaagatggaagcctactgcgacgagaaggcacccgggggctacacgcacctgctggtcgccatcgacaaattctccaagtggatcgaagtccgacccctaaacagcatcaggtccgaacaggcgatggcgttcttcaccaacatcatccatcgcttcggggtctcgaactccatcatcaccgacaacggcacccagttcaccggcagaaagttcctggacttctgcaaggatcaccacatccgggtggactgggccgccgtggctcaccccatgacgaatgggcaggtagaacgtggcaacggcatgattctgcaaggactcaagccacggatctacaacgacctcaacaagttcggcaagcgatggattataaggggcgaaccccctctgcgtcaaaattttcctcggaaaaggtctttctgccagaacgtctttcgcgcttttcgactacttcgaaagtgggatcctgaaaacgacggagtacacgtaagcatccaaggctga

SEQ ID NO: 46922 - DNA, 1316 bp, Zea mays
  unsure (1)..(1316): unsure at all n locations
  Clone ID: MRT4577_142802C.1
atgttgttgctcttcaaccacagaagatccccgcgcaactgctggccacctttgccaatggcactcccgtagatagcttgtaagttgacgcccgctttccccgctccgaaactacacgccgttcagccccttatcacaggctccgacgctccgtgccgttgccccgctctttttcaacagcgacgctggtaacgcactaacgcccgtcccctcacccacccgcgcagaccgcagagagaagagagcgaggcagcctaggaggagcaaccgcgtgagtcgatgaaggcagcggtggccgcggtcgtcgtcggcggcggaggaggcgacgaatggaggtgccggaagcaccctgccgcgagatccggcggcggggtgtgcccccactgcctccgggaccgcctcctccggctctgccccaactgcgcgcacgtgcggccctgcgcctgcgccgcggcgtgcgcctcgccgtcctcctcctcctcggcctccggcgacgcggtcggccgcgtccacagcctcatcgagcgggagcaccggatcgcgcgctccaggtccgtggccacgggctcctccgccgcgctcgccgccccctcggcggcgaccgcgtccgggggcggcaggcggaaggcgcgggtctgggggtggccgccgttctggaagcccgcggcgcgggaggggggcgcggagccaggggaggaggaggacgacgacgaggggatggggctgccgcgctcgagctccgtgtccgccacagcggtggaggccaagagcgcggccgcggcggcgcgggcgcggtgggggtggcacttcccgagcccgctcaaggcgttccggcaccgcaggtcgtcggcgagcgtggcggggcgggcgtgagcgaggtgcctcacctccagatgcccggaaagtggttagtgtgggggtcatgtggccgggatcattacctattaatcactagttaactatatcaaggcggtggattagaggaggagcgttcgtgctcctttttctgcttttgcgatcgcgtcgcgtgccgctaattccatgattaagttagacgaaacctggaaagcctgtgatctgggcgtaatgtgtgcatattcgctgctagtgggtgggtgaacccctcatggtctcttggcttttgtagcgtgcttgtactccactctgtagcaacaaattggatgttttgagctctccaatttgatctaaaaaaaaaaaaaaaaaaaaaaaanaaaaaaaaaaaaaaaanaaaaaaaaaaaaaaaaaaaaaaaaaaaaaaaagggcggcaccgctcgccaatcttaaaacatagtcc

SEQ ID NO: 46923 - DNA, 691 bp, Zea mays
  Clone ID: MRT4577_142803C.1
aattcggcacgagggacctcactgcgccagagagagctggaactgtagatgttgctccatatctgctaagttacacatacggttcttgtgacatctgctcataagacaagggactcactgatccggccgcgagaaatatcatgggagatgtagggagttgtagggctctttaaccagacttccacttgtgcggaattaacttccaaccaaatttgctcgagacaccatgaacaatcttccatgcctccatggcaaaatatcgatatgaagcgaggtgattggatttgcacaagatgtagcttcatgaacttcgcaagaaacgttaggtgccttgagtgcgacgagcagatgccaaacaagatgttgactggtggagagctgataatgccctcagagtgatttctataactatgggaggaatatgtcatgcttaaaatgtgattgcaggaggccagcaacactcccaccgaatgctacatatgtagatgctgatatacgtggtgcggtacagctgcttctcatggacacgacaagtggtggagaatctgaaaatgagagataacttgctgaaactgatgaaaaggcagatagatcgttgagcacagtatctcaacttcatgattcagcagacttaagtagtctagcagaagatgaggactatactgagattatgcctatgcacagaggggtg

SEQ ID NO: 46924 - DNA, 476 bp, Zea mays
  Clone ID: MRT4577_142804C.1
aatcggcacgaggcaatggcccaatggttacccgcgatccgatactcgatgagtatttactctattagggtatatatatggtctaaatgttctacctatggatttcttgttaggtaaaaaccttcaaccaattggtaaacgggtataagaaaattctgtccctacccatacttggtaacccgtgggtataaacttagcctaaaaacatgaacttgggctttacttatatatctcttttgacttaccctaaaaacatgaacttgggctttacttatatatctcttttgactatttaacaaccttttcggcgataataccatagaaggcttaacaactatttgatgatcatgtaataaaacatgtaatgtgttatgtgttactatcctagggttgctactatatgcaattatctatggtgttcttgaataaatgatagaatgatgctacaaattttgggatggatatattgacattag

SEQ ID NO: 46925 - DNA, 503 bp, Zea mays
  Clone ID: MRT4577_142805C.1
cacctctaatcgtgggccgggactgagggacaaccttcttttttcctttttttttttttggatggacataaaaaccaactcgatgacaacaagacaataactactgcacacacagacatgacagggatccaagagtcatgaagggcaaacctcgaaactgcctaaagaagggaactagcttgaattaataagtccataagcgtcacttgaccacatgtgtcaatgcgaacagaaccggtagccactcagctacaataactgtaggtttcacatcgcaactaggacacaccagatgaactttgatgcctaatgcactacttagatgactccctttttgttgtccacattaagagcatcatagagcggagttagctactcataagccttcttattgccatcaagcctgatcaaggagtacaccttatttgactggatatcatacatccttcttgacggcaggctcgatcttattgttgtgtggcttgaggtcaacaataaacacc

SEQ ID NO: 46926 - DNA, 1319 bp, Zea mays
  Clone ID: MRT4577_142806C.1
gcgcgcacaagcagaaaagctgacacgctcccgctcatcctcgtttgcgctgccgactgccgctgcgaatgccgcctccgggaccccgcctgccgccgcttctccttctcctcctcctcctccttggggccgcctgcagctgcggcctcacagtcacaggtgcgggggaaggcggctcctgcgagttctccgtcgcgcgcggcagcgagctctacagcttcgacctcgcggcgccgacgccggcgcaccgccacggcgtgctcagcgaggacgggttttacaaggtggctgtgaatgattccatactctggttccagctttgtgatgaaatgctattcaactttgacccacctatgtgccttaattgtgaggattgtggtggtcctttgaggtgtggaactcagtgcagtgcacttgtgtcaaataatattggagggtatgatgtctgcacaaccattggaggattatctaaatcccatatatctctagttgatgagagtaatcctcggaagggtatcattgttaagatgttctcatcaaagtgttctatatctgtttccgttctttgcgattcaactgcaatccaagtaccagacaaattcgtcctatctggtctttgtgattatgctacaacacttgaacacccttctggttgtccaaggtctgtttctgcttctggaagtggctggggatggctaagcactctgttcataacaattctgtgccttcttggagggtacattttgattggagcagtttacagatattatttccttggcattcattctgtagaggccattccgaacctggacttttggattggtttgccccaacgaattaaggctgtctttgttcctgcaacaagaagtcacgtaagttatagcagagatggtctaggcacagatgcccctgtataccattgagaaggtgaacattcaagaaacttcattggcagacatacagttaagcacatgtatggactggacatcgggatgaaactttgttcttgccaagatacaggtatgcaagtgggacttaaattgtgaaagggatggagtatttgaatgccatgcaacaaaagttctggtgaaattattataattttgaacatgtaccatcatcaacataaaatgtgacctgaggttgatgtacagttccgaaatcctcatgttcatcccgtgagctaattttcccaaatgctgtagcacaaatctacactgtttaaagggttgatagcatgtttttcttgaatcacaacatgttattatgcaaatgcctggctggattagaaaccatccaacaaactagtttgacaaaaa

SEQ ID NO: 46927 - DNA, 728 bp, Zea mays
  Clone ID: MRT4577_142807C.1
aattcggcacgaggtgccactgcagtctccctagcaccaccgtgtcttcaacgcacgggagatcgaagagcgtccccaagcgatcttgggttggctacttggctgcagctgcaggttggccggcggagatcgatggagctacagctctcggccgtgctcggctcgctcgccctcggcggcgcggtgctggtgctgttcttcgttaagtggtggcagccgctggccggcaccgaccggcgcgtcaaggagcttgcagacgcggtggaggccctgctgcggcagcggtccgaggtgctgggccacgacccggcgccgtcgtcggataccgtgcgcgcgtggctgcggcgcgtgcaggaggcgcaggacgagatggcgtccatcaaggcgcggcacgacggcgggcagctatacgtggtccgcctggtgcagtacctcttcctccccacgggcccggtcgcggggctggccgagcagcagctcaaggcagtgcgcgcgctccgagagcagggcgccgcgatcctcgatgccgcgctggccacgccgcaggcgccgccgccccttctctgcgaccccgaggagctggagggcctcccggcggaggcggggcccgcgagggcctacctcaacgagacgcttcgcttcctcggcgactgcgacgccgcgcttggcgtctggggtgccggcggcgtgggcaagaccacggtgctgaagctggtgcgcgaggtgtg

SEQ ID NO: 46928 - DNA, 447 bp, Zea mays
  Clone ID: MRT4577_142808C.1
tagtcgggcggccgtccttttttttttttttttttttttttttttttttgtgtggtttttttttttgaatggggggatatacccaccatttttatttatggaaaaatttgggccggatatgggcaggtaaaattctcaggggctaaagcatcaacgggggagcctattggggggatgatgaaaatttgtgcggggacaatacacaattatgttcccctttagtttcagcttgggggacacttttccaacaccgcataagggccgcactgttttctggcgttgtaagcaaaaacacacgcccacacacagctaacatttgtattatcggggggggggctccggcttgccgcttttttgggtggttcggactaaaatatctggaagaagagattttttgaacccttcctgaacaagcggaggttttttggatttaccaatgccctgcac

SEQ ID NO: 46929 - DNA, 294 bp, Zea mays
  unsure (1)..(294): unsure at all n locations
  Clone ID: MRT4577_142809C.1
gggaaaaggtagcgaagagnagagagagagacgccaggaccgcccttcgacgtttcgaggaggganggaacccagatacggcggcggcgggccgtatcgatggcttgccgcgcacgctcactccggcggcgaccgtgcccctgtgcctcgcttcttcgccgcggccacgccctgtgcgctggcccanncggggcgccaaggggaggaggacccatctggtcatnncggtcggcggaccctgtgaccaagggtcaccggctccgagaccctnttcttggacccatcgacgaatcg

SEQ ID NO: 46930 - DNA, 229 bp, Zea mays
  Clone ID: MRT4577_14280C.1
cgtctatctcctcccttagtgccgcccgccatcatcgcccccgccgcacccgccgacgccgcgcccgttcccgggctcggccccatccaccaaggaggcccccgccgcgcccgcccccggcactagccccgtccgccatggaagcccccgccgtacccacccctagccccttccgccatggacgcccatgcccgcccccagtctcgtacgtcatggacgccccctcact

SEQ ID NO: 46931 - DNA, 241 bp, Zea mays
  Clone ID: MRT4577_142810C.1
gactagttctagatcgcgagcggtcccctttattacgctaagcattaattcaaaggaccctaatccaatctggttcgcccacaggaaacgtggagtacattttttacgacaggacaactagattttacaacgggcgtgatagagacacgagatcagcaggggcccccagttactccaagctgctagctagctaccagcctggataggaccagaaggctgatccatccacgttattttaact

SEQ ID NO: 46932 - DNA, 301 bp, Zea mays
  Clone ID: MRT4577_142811C.1
cccccctcggggggtggcttttttttttttttttttgttttttttttttgaaaaacacaggaacgctcatttccaaaccttttttggtttcattacaagcaagcttctgtactcatgggaactgtactttcggcttagaagacactatgctgactccacagaggtcccaaaggagactcaggctcattccattaagcgagggaccggaccacttccttaaggcacatggcttctttgcgggcgcgagattcttaatggaggcccttttcttcggagcaattatgcgaggggagcccctggg

SEQ ID NO: 46933 - DNA, 370 bp, Zea mays
  Clone ID: MRT4577_142812C.1
cacgctgttgaccgcggcagaacttactctgttggaggggcactgtataacctgaaaacggatctcgagcccaatccgtagctggctatagggacggcctggtgatgcacgagcagttctatggcttatagctctagagaatggaccaggggcagggggaagccacaggctgggctacctgggttgtgtgctgttggtgttgagtgaggcatgcagatgatatgcagattctcataattgtatatacatggggcctgagcatatgtgcagtacaattggtgcacacgactagctcgcaaaaccagtttattacaatttatttgtgattgagtatttcgctgatggtgtcagaggtaaatgggtatgaata

SEQ ID NO: 46934 - DNA, 249 bp, Zea mays
  unsure (1)..(249): unsure at all n locations
  Clone ID: MRT4577_142813C.1
cgagccgctgaactcaagcaaggcttgtcccagatagaggccacnctntccnannannanctnaatnacatnatccntatacctgatncacaccaanatnncaacctcaactatcacnactttctnatattcttcctccanaantnanaacttanactgctnnatacaaaccccgcctcctcanctncctnactcttacatncactcntnccttctaacnnngctctgcttttatagtnnggttaaaaa

SEQ ID NO: 46935 - DNA, 258 bp, Zea mays
  Clone ID: MRT4577_142814C.1
tttggtttttttttatttttttttgacttccatattaactgctcactatgtaaaccggccagcccactgtaccaacagtggcctataaagagttccagccacattggtgaccccactacgcatcatagggaaagccacccacgcgcttgaactcacaaattttattgcccaaacggctcatttgacagaaaacaaacagttgggctatgtttaccagactagataaccagaaggatacccaggggctcaccttggagc

SEQ ID NO: 46936 - DNA, 593 bp, Zea mays
  Clone ID: MRT4577_142815C.1
ttttttttttttttttttgaaagtagtacgcatatctgaataatgcttgatgatgtcggttcgtatggtcgcccatatcaggtagctctggcttgcatgccatcgtcgggccatgcatgtgtgcttgccataatatctttgcatgtatagaaaaaaaataagaaaacattgatgatggttcacttgtcgcactggctggcctaaccatatctacttgcagcaggagtccggccatgaacagacagaacgcagcacaaacaacgtacatgtagagcacagagcagcggccaacagctagtcaaatagccagcagtgaagctctggagctctcgctccgtccatgcatccatatcactccatcgatctcctcctccgtcgcccggccgtcgatcaccagtgccggtccgggcgggtgggcgggcgcatgccatgcaccaccacctgtatctcttctctaataatcgatatttacacacgccattaacatcgtaggtgctctcgccgtcgccgagcgagtgagctagctgtggcctgtgggccgaaccaatgaaccgaatctcgaataggcggcgccgcagcgtccgtgggggcat

SEQ ID NO: 46937 - DNA, 555 bp, Zea mays
  Clone ID: MRT4577_142816C.1
gtatggaccaccgaaaaccaagcatatcatattttataggacatgctaacctactttcaacaaagcaagtataacatgccatgccaagctaatacatctaccgctggaaccaaaccaaaacgaccagcatatgcgacttgttctgaaacaagcctatacaatgataagggacttgcctgtgaacagactgggggacgctcccagattccctgacaacctaacagatagggctaaacctctatgagagactggtgcccataacggaactcacacagcctgacccgcattgctagaaacggaaaactttgcctgaagcgggccatcatgtaggatcgttcttaacatgggtgaaggacaagccattgaacacaccaaccatgctccaaaacatctcacgcacaatgatcactgtctggctaagggggtcaactggctctgggttttcaaccacaggaacattctaaatcatcttgccctattatttgataagcgccatgggctacctcttgaaacccttctggaaccttttgctgccgatctctacataacagctga

SEQ ID NO: 46938 - DNA, 619 bp, Zea mays
  Clone ID: MRT4577_142817C.1
ggaaaagtgacgtcttggtagaactatatatgtattggattgtatgcttgcatggtgttccaaagaagatagtatctgatagaggcacctagttcacttcttatttttggcagcaactacatgaagctttgggcacgcacttgaagttcagttcagcttattacccgcagacagatggtcagactgagagaaccaaccagattcttgaggacatgttgagagcatgtgcatttcaagacaagttaggttgggacaagaggctacgatacgcagaattctcctacaacaacagctatcaagccagtatgaagatgtcaccgttccaagcactctatgggaggaattgtagaactccgctgcattgggaccaacccagcgaaaggcaggtgttcagtccagatattctgcttgaggctgaagagaacatcagaatggttcgagagaatctaaagacagcacaatccagacagtgatgctatgctgacacccgaataagagaattgagtttcgaagtgggagattatgtctacttaaaagtgtcacccatcagaggaatcaaaaggttcggagtcaaaaggcagctagtacctcgatacatcggaccgtaccagattcaagc

SEQ ID NO: 46939 - DNA, 1491 bp, Zea mays
  Clone ID: MRT4577_142818C.1
atggcggccgtcagcccgcccgccggcggcagaatcgacgacgtcttccccacgtggcgaaagagcaacatccgggtctgtcccgtcaccttccccgccgacggaggaggaggcggggcaaccatggccaaattcagcttcgacccaccgagcgatcccgcttcggtggacgctttcataaaggcatatccaaaccttccggggtaccatatatggtcaacctgggaccgactgacggccgtctcgacctacgggcccccgggttccgaggaagatgatgagcccggctctggatgggatttcttcgggctcggtgaccccagtgccatgcaggacttcatgaccgcatgtgactactgcctctccgattgctccgatgatggccacaacctcgacgacgaggactgtggcccaagtcgcgaatgtttccacgtcgatctagggggtctcgacgaaggcaaccactttggtatgccggaggacggcgatccccctaggcctgcgcctcacgttgacatccttcaggagctagcagtggtcccagtccctgcggggggtcaggacgcacaactcgagcaaatccgcgagatgcaggccaggctcgacgaggaagcaggacaacttgtgcagctccggcaaaatatcgggcaggagtgggcaggccgagcaccggccggagaagcgcgtcatctggcccaggacgtccagcaccgcatcgccaatgatgccagggcaaggctgccaccggcttctagtggggtcagccagaacctggctgcagcaggaatactactccgagcgatgccggaaccatccaccaccgaggggcggcgtatccagggagagctcaagaatctcctggaaggtgccgcggtccgacgggccgaaagctctgcctcccgaaggcaggggtaccccccggagcatcgcgccgtgacttctcgattcatgcgggaagcctcggtccacaccgggcgcacgcggaacacagcacctgcggccccgggtcgcctcggcaatgagcaccaccgccgcgaccgacgtgcccacctcgacgagaagctgggtggaacggacgatgacaacctcatcatccgcaaccttcccctgttcctcaccgacgccgctcgagccaggctggagcatctgcctcctgcgcagatctccaactgggacaacctggtcaaagccttcgccggcaacttccagggcacatacgtgcgccctgggaactcctgggatcttcaaagcttccgccagctgccgggagagtccctacgggactacatccggcgattttcgaagcagcgcaccgagctgcccaacatcaccgactcggatgtcatcgacgcgttcctcgctggcaccacttgccgcgacctggtgagtgtggcggaactgcccgaattattccaacttaagtgcctaagccccgccttagaggctagaccacacttaaatgggaataacccgtcaatccctcggatctag

SEQ ID NO: 46940 - DNA, 200 bp, Zea mays
  Clone ID: MRT4577_142819C.1
aagaaatgttgggtggggcccaaaagccaccctcatttaaaaaaagggggaactggtaccccaaggggcaacacacggtgccggcctttggaaagaaatgtcaaaacacacccaaaagaaaaagaaaatgtaacggtctgtgtccctttaaaagaacatctttcaaccgcccttttgacacccaaaatttgcccaatttt

SEQ ID NO: 46941 - DNA, 1236 bp, Zea mays
  unsure (1)..(1236): unsure at all n locations
  Clone ID: MRT4577_14281C.1
gactgactgactgacgagtgagtctcgtactctcgtataggtttagggtatacatacacatatatatatatggtccgttgaggacactcgaatttataccagaaaaaaaaaaaagagagagagagagatgatacagcggtcatcctacaattgtacgtacatgttcttggatgttttgcaggctaccatgcatgttattgcctagcttcattcgttctgtgcacactgactgccagaaccagcatcaaaagcgtttgtcgtccgagagggacgtacgcaagcaacgcaaccccaacgggtacgtactagcgctagctagtcggccctccagatggcctctagctcggcggcgaagagtcgctcctgtccgacgacgatggtgatgtggtccttgcggtcgtagacggtgacgcgcgcgcggggcaccctggcgcccgccgccagcgtgcattcgacggggagcagctcgtcgtcgcggccgtggaagaacgccaccttgcaggagagccccctgtccaccgcgtccaggtacgcgcccatccgccccgcgctgccgcagatgatgttgtgcagcgtgtgccacgccgcgttgtgcgtgtggcacatgaacgcctcgatcaggaacgtccgcaccctgttcctggtgaagatcctgaagaggcggtcccagacgcggtggtggcggcagatggtgaggcagatggtgcggctcacgtgctcgtaccagcacgccatggacgccccgaacgcgatcggcggccacacccgccgcggagccacgcgccgcatcacgtactgcgccgccgactccgactccgactccggcaccgggaagtagggctgcacacacacaacacaagcccacacaacagctagtcgcgccggtcaagtcactccaacgaacaaccaatcgtccgcccgcgcacgcgcgcgcttacaattcacgtgacacgtagttttaggtcatcacgtcagatagatgcacacgtacgtaccggcgcgaggagcgtgagcgacctgacggcggcggggtacttgacggcgagggcgagcgccagcacggacccgagggagtgcgccaccacgtggaacgacccgatccggtagcgccggagcacggagcgctcgatcatctccacgtgctcgcgcagcgtgtacagcgactccgccggcttggggctgcgcccgaaccccagcaggtccacggcgaacanccggtaccgggaccgcgccgag

SEQ ID NO: 46942 - DNA, 5655 bp, Zea mays
  Clone ID: MRT4577_142820C.1
atgccggaaccatcgaccaccgaaggacggcgtatccagggagagctcaagaatctcctggaggatgccgcggtccgacgggccgaaagctctgcctcccgaaggcaggggtacccctcggagcatcgcgccgcgacttcccgatttatgcgggaagcctcggtccacaccgggtgcatgcgcaacacggcgcctgcggccccgggtcgcctcggcaacgagcaccaccaccgcaaccgtcgagcctacctcgacgagagggtgcgccgaggctaccaccccaggcgtgagggacgctacgacagcggggaggatcggagtccctcgcccgaaccacccggtccgcaggctttcagccgggccatacgacgggcgccgttcccgacccggttccgaaccccgactaccatcacaaagtactcaggggagacgagctgccgccagcagccgagagagtctctccgggactacatccggcgattctcgaagcagcgcaccgagctgcccaacgtcaccgactcggatgtcatcggcgcgttcctcgccgacaccacatgccgcgacctggtgagcaagctgggtcgcaagacccccaccagggcgagcgagctgatggacatcgccaccaagttcgcctctggccaggaggcggttgaggccatctttcgaaaggacaagaagaagggcaagaagaagtcgcaagcgaaacacgacgccgccgacgcgaaccttgtcgccgccgctgagtacaagaaccctcggaaacctcccggaggagtcaatctcttcgacaagatgctcaaggagtcgtgcccctatcatcaggggcccgtcaagcacacccctgaggagtgcgtcatgcttcggtgccactttcataaggccgggccacctgcggaaggtggcagggcccacaacaacgacaagaaggaggatcacaaggcagaggagttccccgaggtccacgactgcttcatgatttacggtgggccagtggcgaacgcctcggctcggcaccgcaagcaagagcgtcgggaggtctgctcggtaaaggtggcagcgctagtctacctagactggtccgataagcccatcacctccgaccagggcgaccaccccgaccgcgtgccgagcccggggaagtatccgcttgttgtcaaccccgtcatcggcaacgtcaggctcaccaaggtcctcatggacggaggcagcaacctcaacatcatctacgccgagaccctcgggctcctgtggatcgatctgtccttgatccgggcaggcgcggcgccttttcacgggatcatccccggaaaacgcgtccaacccctcggacaactcgatctgcccgtctgctttgggactccctccaacttccgaagggaaaccctcacgttcgaggtggtagggttccgaggaacctaccacgcagtactggggaggccatgctacgccaagttcatggccgtccccaactacacctacctcaagctcaagatgccgggccccaacggggtcatcaccgtcggccccacgtaccgacacgcgtacgaatgcgacgtggagtgcgtggagtacgccgaggccctcgctgaatccgaggccctcatcgccgacctgaagagcctctccaaggaggcgccagacgtgaagcgccatgccgacaactttgagccagcagagatggaagcagtgctcgtcgactttctccgcgcgaacgccgaagtctttgcgtggagtccctcggacatgcctggcataccgatggatgtcgccgagcactcgctggatatccgagctggagcccgacccgtgaagcagcctctgagccgattcgacgaagaaaagcgcagagccataggcgaggagatccacaagctgatggccgtagggtttatcaaagaggtattccatcccgaatggcttgccaaccctgtgcttgtgagaaagaaaggagggaaatggcggatgtgtgtagactacactggtctaaataaagcatgttcgaaggttccctaccctttgcctcgcatcgatcaaatcatggattcaactgctgggtgcgaaaccctgtctttcctcgatgcctactcagggtatcaccaaatcaggatgaaagagtccgaccagcttgcgacttctttcatcacaccttttggcatgtactgctacgttactatgccatttggtttgaggaatgcgggtgcgacataccaaaggtgcatgaaccacgtgttcggagagcacattggtcgaacggtcaaggcttacgtcgatgacatcgtagtcaagacgaggaaagcctccgacctcctctccaaccttgaaacgacattccggtgtctcaaggcgaaaggcgtaaaactcaatcccgagaagtgcgtcttcggagtcccccgaggcatgctctttgggttcatcgtctccgagcggggcatcgaggccaactcggagaaaattgcggccatcaccaacatggggcccatcaaggacctgaaaggcgtacagagggtcatgggatgccttacggctctgagccgtttcatctcgcgcctcggcgaaagaggcctacctctgtaccgcctcttaagaaagaccgagcgcttcacttggacccccgaggccggggaagccctcggcaacctgaaggcgctccttacgaacgcacccatcctggtgccccccgctgccggagaagccctcttgatctacgtcgccgctaccactcaggtggtcagtgccgcgatcgtggttgagagacgagaagaagggcatgcattgcccgtccagaggccggtctacttcatcagtgaggtactgtccgagaccaagatccgctacccacaaattcagaagctgctgtacgcagtgattctgacgcggcggaagttgcgacactacttcgagtcgcatccggtgaccgtggtgtcatccttccccctgggggagatcatccagtacagagaagcctcgggtaggattgcaaagtgggcggtggaagtcatgggcgagacgatctcgttcgcccctcggaaggccatcaagtcccaagtcttggcggactttgtggctgaatgggtcaacacccagctcccaacggctccgacccaaccggaactcttgaccctgtttttcgacgggtcgctgatgaaaacaggggcaggcgcgggcctgctcttcatctcgcccctcgggaagcacttccgctacgtgctgcgcctccatttcccggcatccaacaacgtggctgagtacgaggctctgatcaacgggttgcgcatcgccatcgagctaggggtccgacgcctcgacgctcgctgtgactcgcagcttgtcatctaccaagtcatgaagaactcccactgccgcgacccgaagatggaagcctactgcgatgaggttcggtgcctggaagacaagttctacgggctcgaggcggtggcgttcttcaccaacatcatccaccgcttcggggtcccgaactccatcatcaccgacaacggcacccagttcactggcagaaagttcctggacttctgcgaggatcaccacatccgggtggactgggccgccgtggctcaccccatgacgaatgggcaggtagaacgtgccaacgacatgattctacaaggactcaagccgaggatctacaacgacctccacaagttcggcaggcgatggatgaaggaactcccctcggtggtctggagtctgaggacaacgccgagccgagccacgggcttcgcaccgttctttctagtctatggggccgaggccatcttgctcacagacttagaatacggttccccaaggacgagggcgtacgacgaccaaagcaatcgaacaaaccgagaagactcactggaccagctggaagaggctcgggacatggccttactacactcggcgcggtaccagcagtccctgcgacgctaccacgcccgaggggttcggtcccaagaccttcaggtgggcgacttggtgcttcggctgcgtcaagacgcccgagggcggcacaagctcacgcctccctgggaagggccgttcgtcatcgccaaggttttgaagcccgagacgtacaagctggccaacagtcaaggcgagaaaaggtctttctgccagaacgtctttcgtgcttttcgactacttcgaaagtgggatcctgaaaacgacggagtacacgcgaaccgatcctgcagactcagacgtcgatggagggggagcagcagcaccctcggcgtcgactccaccttcggcgaagtccgaccgagcctcggacagcaacacgggcgaaggatctccgctccgaaggacgacatcagcaccacgcccgggccatcgccgccagggtctcttccaggaacccagcccgagcagacggctcggccggccgcctcgaagcatcagccagctgtcccccgaggacaccagcccggctcgtggcctcggcaactcgactccggcgctggtcccgccagtggacggcccggccaggctccggccgacgaagtacgaacaaccccccacattggagggcctgcggggcgacgaaaccccaggcggctcaccaccgcccgctccggcagcagcgacaacgacttccgctccgggcggccaaacaacagcaatgatgacctcagggcagacgctgctgtgacaaggccctcgcccacgtccccgcccgaggggcgaggacatgcagaaggccgtagagttggaggtcattccgtgggtggcgccgactatctcgtcggcggagaaacctcttccggctgcctcggacggaaggagccaaaaccgccgcgcgcggggcgcacaactgcccagcggttacaagcattcctccactatcgcccggaccagcgggtgaaagggcggaccgccatgcaggcggcatgcaaccgcaccaagggggcgcaccctttcgacttcgacgcgtccagcatggaggcccaggcccacacgtcatgtaaccggcgcgccggttactacgtgcaagaaactgcaccgccactcgcgccagtaccgcgccttctcgactgtggaaccggtgccacgactcgaggtgaccctgcgcatgacccgacagtgccaaccgagcacatcggtcacgggtcagtcagccgcgggagaaggcgcgacggtcgatatggccagaaatgggccgacagtaatggcggtggcaggcgggcggaagcagcggacaggtggcacctctggcaggcgaagcaggcgacgcttcacctccgccataatgaccgcgtcaaaaaagggactgggaaaggggatactccgaaagggatccttctccgtgaaggaagcgggccccgagcccccctactgatcagaggttcgaaggctggcccctcggaagggttcaacagccgcctcagagcactcgggctccgcgcccactactggtcagaggttcgaaggctggcccctcagaagggttcaacagccgcctcaggccactcgggctccgcgcccactactgatcaggggttcgtaggctggcccccgaagggttctgacagccgcctcagagcacgcagagcgagggatgaccctgggtacgttcgatacataaccaaggctcgggctacgttcccgaggtaccctaggacgtttccgagacccacgggaacgattttgtaa

SEQ ID NO: 46943 - DNA, 443 bp, Zea mays
  Clone ID: MRT4577_142821C.1
tcgttggtcgatacaagcctctacattggttcgtcataccgacgagagttattaattaattcccgtcggccctacgtggccgacgggaattaactgggccgacgagcgttattaattaattctcgtcggttcgaccatagccgacgggaattaactgggccgacgagaattaccctatactgctacaaaaacagcactaaattaggtcactatttctgcacacataacatatatcacacataacataaatcacagataacagacacattacaaacacatgcatttagagatacaacatccacaaacacatgcatttagacataaacacatgcatttataattaaaatatccaccaacgagtacgacatagtattgaaacataacatccaccaacaagtacgacatattattgaaacataacatccaccaacgagttcgacatt

SEQ ID NO: 46944 - DNA, 1950 bp, Zea mays
  Clone ID: MRT4577_142822C.1
atgccgttcggtttgaggaatgcgggtgcaacgtaccaacggtgcatgaaccacgtgttcggcgaacacattggtcgaacggtcgaggcctacgtcgatgacatcgtagtcaagacgaggaaagcctccgacctcctttccgaccttgaaacgacattccggtgtctcaaggcgaaaggcgtaaagctcaatcccgagaagtgtgtcttcggggtcccccgaggcatgctcttggggttcatcgtatccgagcggggcatcgaggccaacccggagaaaatcgcggccatcaccgacatggggcccatcaaggacttgaaaggcgtacagagggtcacgggatgccttgcggctctgagtcgtttcatctcgcgcctcggcgaaagaggcctgcctctgtaccgcctcttaagaaaggccgagtgcttcacttggacccctgaggccgaggaagccctcgggaacctgaaggcgctcctcacgaacgcgcccgtcttgctcccgacagctccgatccaaccggaactctggaccatgtttttcaacgggtcgctgatgaagacaggggcaggcgcgggcctgctcttcatctcgcccctcgtgaagcacctacgctacgtcctacgcctccacttcccggcgtccaacaatgtggctgagtacgaggctctggtcaatgggttgtgcatcgccatcgagctaggggtccgacgcctcgatgctcgcggtgactcgcagctcgtcatcgaccaagtcatgaagaactcccactgtcgcgacccgaagatggaagcctactgcaatgaggttcggcgcctggaagacaagttctacgggctcgagctcaaccacatcgcccgacgatacaacgagactgcggacgagctggttaagatagcctcggggcggacaacggttcccccgaacgtcttctcccaagacctgcatcaaccctccatcaagatcgacgacgcgcccgagcccgagaaggcctcggctcagcccgaggcaccctcggcccagcccgaggtaccctcggctcagcccgaggcaccctcggctcggcccgaggcaccctcggcccccgagggtgaggcactgcgcatcgaggaggagcggagcggggtcacgcctaatcgaaactggcagaccccgtacctgcaaatctccaccgaggagagctacccctcgaccgagccgaagctcggcggttggtgcggcgcgccaagtcgttcgtcttgctgggggacgggaaggagctctaccaccgcagcccctcaggcatcctccagcgatgcatatccatcgccgaaggccaggagctcttacaagagatacactcgggggcttgcggtcatcacgcagcgtctcgagcccttgttggaaacgccttccgacaagaaggcacccaggggctacacgcacctgctggtcgccatcgacaaattctccaagtggatcgaggtccgacctctaaacaacatcaggtccgaacaggcggtggcgttcttcaccaacatcatccatcgttttggggtcccgaactccatcatcaccgacaacggcacccagttcaccggcagaaagttcctggacttctgcgaggatcaccacatccgggtggactgggccgccgtggctcaccccatgacgaatgggcaagtagagcgtgccaatggcatgattctgcaaggactcaagcctcggatctacaacgacctcaacaagttcgacatgcgatggatgaaggagctcccctcggtggtgggcgacttggtgcttcggctgcgacaagacgcccgagggcggcacaagctcacgcctccctgggaagggccgttcgtcatcgccaaggttctgaagcccgggacgtacaagctggccaacagtcaaggcgaggtctacagcaacacttggaacatccgacagctacgtcgcttctacccttaa

SEQ ID NO: 46945 - DNA, 285 bp, Zea mays
  Clone ID: MRT4577_142823C.1
tttgggctgattagtgctgttatgtgctggagcgcaatatgtaggtccccaacagcttcgaaatcgtcagtcgccgtaccatcggtcatatcaagcgacaaacaaaaactactcacggaaccacaatacaaaaaaaacgatcgttggcgcatgtctcataggaccaaagtccatcgtacgtagtacgtcatgctacaggctacgcaatacgatcgtaacacataggttgtcggtcgataatccatcaatcggcaatcagacacaagtcattagtatgtcttccac

SEQ ID NO: 46946 - DNA, 4302 bp, Zea mays
  Clone ID: MRT4577_142824C.1
atgtcgggcattatcctcgcacctgagacaacgacgggtgtcgcttcccagcaacgtgccaaccctaggcggactaatgacgccagcacccttgcgagggacttgttgggcattagtctcgcgcctaagataacggtgcattccatccccaatgcgacttcaccaccgtccatcaaccaggaggtaacatccatttcccatcatgttccctttagattcagcttcgatccaccaagcgaccccacttcggcgaacgctttcgcaagggcatatcctgacctcccggggtatcatatgtggtcaacttgggacttgttggcagccgcctcaacctccggacccgtgggttccgaggaagaggacgaccccgacttcagttgggatttcttcggactcagtgatcccagtgccatgcgagacttcatgtccgcatgtgaccactgcctctccggctactctgacgatggccacaaccttgacgacgagggttacggcccaagtcacgagtgtttccacattgatcagggggatcacgacgaagacaaccacctcggcatgccagaaaatgacgacgcccctgtgcctgcgtctggcgttgagatcccgcgggagctagctgtggttcgagtccctgcggggggtcagggcacacagctcgagcaactccgcgagatgcaggccaaactcgacgaagaaacggggcgacttgtgcagctccgacaaaacatcgagcaggattgggcaggccgagcactcgccggaggagcgcgtcatcgggcccgggacgtccagcgtcgtatcattgacgatgccagggcagggctgctcccagccttcagcggggccggccacaacctagctacagaggcgatgttacttcgaacaatgccggagccatccaccaccgaggggcaacgtatccagggcgaactcaaggacctcttggaaaatgtcgttgtccgacgagtcgagagctctgccccccggaggcacggaagcccctcggagcatcacgcagcgtcctcccgacgcatgtgcgaggcctcggtccacaccgagcacacaggagacatgacatcttccgcccgggatcgcctcggcgacgagcaacaccgccgcgaccgtcgagccagcctcgaggagaaggtgcaccgaggctaccaccccatgcgcgggggacgctacgacagtgaggaggatcagagcccctcgcccaaaccaccaggtccgcgggtcttcagccgggccatacgacgggcgccgttcccggcccggttccgagccccgactaccattaccaagtactcaggggagacgaggcaggagttgtggctcacggattaccagctagtgtgccagttgggagggacggacgacgacaacctcatcatctgcaacctcccccttttcctctccgatgctgcccaggcctggctggagcatctgcttcctgcgcagatctttggctgggacgacctagtcaaggccttcgctggaaatttccaaggtacgtatgtgcgccctaggaactcgtgggatctcaggagctgccgccagcagccaggggaatccctgcgagagtacatccggcggttttcaaaacagtgcactgagttacctaacatcactgactcggacgtcatcggagcattcctcgccggcaccacttaccgggacctagtaagcaaactgggacgcaagactcccaccaaggcgagcgaattgatggacatagccaccaagttcgcctctggtcaggaggcggtcgaagccatctttcgaaaggacaagcagcctcagggaagacagaaggaagacgtccctgaggcgtccgtccagcgtggcacgaagaagaagaccaggaagaaggcgcaagcaaaatgcaacgccattgacgcggatttcgtcgctgatgccgagcataggaatcctcggaaacttcccgggggggggccaacatgttcgacaagatgctcaaggagtcgtgcccctatcacaggggtcccgtcaaacacacccttgaagagtgcgacatgctccggcgttacttcaataaggtcgggcccccggcggaaggtggcaaggaccaaggcaacaacaagaagggggcaacaaggaagaggagttcctggaggtccacaactgcttcatgatctacgatgggcaagtagcgaatgcctcggctcgacaccacaagcaggagcggcgggaggtctgctcggtgaaggaaggtacccacttgtcgtcgaccctgtcatcgacaacgctaggctctccaaggtcctcatggacggaggcagcaacctcaacatcatctacgccgagaccctagggctcttgggggtcgatctgtccacgatccgggctggtgcagcacctttccacgggatcgtcccaggcaagcatgaaaccctcactttcaaagtagtcgggttccgagggacctatcacacggtgttgggaagaccgtgctacgccaagttcatggtcgtccccaactacacgtacctcaagctcaagatgccaggccccaagggaaccatcaccgtcggatccacataccgccatgcttacgagtacgacgtggaatgcgtggagtacaccgaagccctcaccgagttcgaagccctcgccgagttcgaagccctcatcgccgacctggattgcctctccaaagaggcgcccgacgcgaagcggcacgccagcaactttgaacctgccgaggcggttaagtccgtctctcttgaccccagcaacgacgccagcaagaaagaagcagtgctcgtcgactttctccgcgcaaacgccgaaatttttgcgtggagtcccttggacatgccaggcataccgagggatgtcaccgagcactcactggacatccgagccggtgcccgacccatgaaacaacacctgcaccgttttgatgaagaaaagcgcagagccataggcgaggaggtccacaagctaatggctgcagggttcatcaaagaggtattccatccagaatggttagctaaccctgtacttgtaaggaaaaaggtgggaaatggaggatgtgcaacataccaaaggtgcatgaaccatgtgttcggagaacacatcggcagaacggtcgaggcttacgtcgatgacattgttgtcaaaacaaggaaagcctccgacctcctctctgaccttgaagtgacattcaggtgcctaaaagcgaagagcgtaaaactcaatcccgagaagtgtgtctttggagtaccccgaggcatgctcctggggttcatcgtctccgaacgaggcattgaggccaacccggaaaaaatcgcggccatcaccaacatgggacccatcaaagatttaaaaggaaaaggattgcccttgtaccgcctcttaaggaaggccgagcgcttcacttggactcccgaggccgaagaagccctcagaaacttaaaggcacttcttactaatgcgcccatcttggtgccccccgcctcagaaactcaggtggtcagcgctgcggtcgtagtcgagagacaagaagaggggcatgcgctgctcatccagaggccagtctacttcatcagcgaagtgctatccgagaccaaaatccgctacccgcaaatccagaagctactgtacgcagtgattctaacacggcgaaagctgcgacactatttcgagtctcatccggtgactgtggtgtcatctttccctctaggggagatcatccagtgccgagaggcctcgggtaggatagcaaaatgggcagtggaactcatgggggaaacactttcattcgctcctcggaaggccataaaatcccaagtcttggcagacttcctggctgaatgggtcgacacccaattgccgactgctccaatccaggccgaactttggaccatgtacttcgatgggtcgcttatgaaaacaggagcaagtgctggcttgctcttcatctcatccctcggaaaacatgtgcgctacgtactacgcctccattttccggcgtcaaacaacgtggccgagtacgaggccttggttaatggattgcgcatcgccgtcgagctaggggttcggcgcctcgacgcttgtggcgactcacagctcgttattgaccaagtcatgaagaactctcactgccgtgataaaaaaatggaggcctactgtgacgaagttcggtgcttggaggataagttctatgggctagaactcaaccatgttgctcgacggtacaacgagaccgcggatgagctggctaaaatcgcctcgggacgaacgacggttccccctaatgtcttcttgaaagtcgcctag

SEQ ID NO: 46947 - DNA, 124 bp, Zea mays
  unsure (1)..(124): unsure at all n locations
  Clone ID: MRT4577_142825C.1
agacattatcacgtattgcttcactgttacatgcagcgccatacccaaccaggatctgctgtgttttactattaccaccaccacctcnaatccaanacctacacttgcacttccaatacctacc

SEQ ID NO: 46948 - DNA, 1971 bp, Zea mays
  Clone ID: MRT4577_142826C.1
atggcggccgacaacccgcccaccggcggtggaatcaacgacgtcttcccccacgtggcggaagaacaacattcagggggtcccggcgaaggcaaccatcttggtataccggaaaacggtgatccccctaggcctgcgcctcgcgttgacatcctttgggagctagctgtggtcccagtccctgcggggggtcaggactcacagctcgagcaaatccacgagatgcaggccaggctcgacgagggagcaggaacacttgagccgttccgccgggacatcgggcaggaatgggcaggccaacctccggccagagaagcgcgtcatctaccccagggcatccagccccgcatcgccgacgatgtcagggcaaggccgccaccggcttctagtggggtcggccagaacctggctgcagcagcgatacttctccgcgcgatgccggaaccatcaaccaccgaggggcggcgtatccagggagagctcaagaatctcctggaggatgccgcggtccgacgggccgaaagctctgcctcccgaagagcctggctggagcatctgcctccggggcagatctccaactgggacgacctggtccaagccttcgccggcaacttccagggcacgtatgtgcgccctgggaactcctgggatctccgaagctgccgccagcagccgggagagtctctccgggactacatccggcgattctcgaagcagcgcactgagctgcccaacgtcaccgactcggatgtcatcggcgcgttcctcgctggcaccacctgtcgcgacctggtgagcaagctgggtcgcaagacccccactagggcgagcgagctgatggacatcgccaccaagttcgcctctggccaggaggcgcgcggcaccaagaagaagggcaagaagaagtcgcaagtgaaacgcgacgccaccgacgcggaccttgtcgccgccgctgagtacaagaaccctcggaaacctcctggaggcgccaatctcttcgacaagatgctcaaggagtcgtgcccctatcatcaggggcccgttaagcacacccttgaggagtgctccatgcttcgacgccactttcacaaggccgagccacctgcgaaaggtggcagggcccacaacaacgacaagagggaggattgcaaggcagaggagttcctcgaggtccacgactgcttcatgatctacggtgggcaagtggcgaacgcctcggctcggtaccgcaagcaagagtgtcgggaggtctgctcggtaaaggtggcggtgccagtctacctagactggtccgacaagcccatcaccttcgaccagggcgaccaccccgaccgcgtgccgagcccggggaaatacccgctcgttgtcgaccccgtcatcggcaacgtcaggctcaccaaggtcctcatggacggaggcagcagcctcaacatcatctacgccgagaccctcgggctcctgcggatcgatctgtcctcggtccgggcaggcgaggcgccttttcatgggatcattcccggaaagcgcgtccagcccctcggacaactcgatctgcccgtctgcttcgggactccctccaacttccgaagggaaaccctcacgtttgaggtggtcgggttccgaggaacctaccacgcagtgctagggaggccatgctacgccaagttcatggttgtccccaactacacctacctcaagctcaagatgtcgggccccaacggggtcatcaccgtcggccccacgtaccgacacgcgtacgaatgcgacgtggagtgcgtggagtacgccgaggccctcgccgaacccgaggccctcatcgccaacctggagagcctctccaaggaggcgccagacgtgaagcgccatgccggcaacttcgagccagcggagacggtcaaatccgtccctctcgatcccagcaacgacgcctccaagcagatccggatcggctccaagctcgaccccaaatag

SEQ ID NO: 46949 - DNA, 463 bp, Zea mays
  Clone ID: MRT4577_142827C.1
gcgggggggggggttttttttttttttttggggtttttttttttttttttttgtttgttttttttttttttttttttttttttttttttttttccccccccaaaaggctgggaccaaaaacactgggcaaaccaaaacgggaacggggggggggggaaacccaaaacttggaaaccccggccaaaaaccaaaaaaagggggatgggccgggcaaaacccccggccaggggtcccaaattcccacaagggagggcccccaaaaaaggccggaaaggggcacccccgggaacccccaataataaaaagggctaaatcaggcggaagccggccccccaagggggggggccgggccccgggcggggcccccccttccgggggccggggggggggcccccccggcctttaccttcccaaggggcggggccccccaaattcaacgggtttccttttcaaggaaaccccc

SEQ ID NO: 46950 - DNA, 3945 bp, Zea mays
  Clone ID: MRT4577_142828C.1
atgcgatacttcatgaccgcatgtgactattgcctctccgattgctccgatgatggccacaaccttgacaacgagggctgtggcccaagtcgcgaatgtttccacgtcgatctagggggtctcgacgaaggcaaccaccttggtatgccagaggacgatgatccccctaggcctgcgcctcacgttgacatccttcgggagctagctgtggtcccagaccctgcggggggtcaggatacacagctcgagcaaatccgcgagatgcaggccaagctcgacgaagaagcaggacaacttgtgcagctccggcagaacatcgggcaggagtgggcaggccgagcactagccggagaagcgcgtcatcgggcccaggacgtccagcaccgcatcgctgacgatgccagggcaaggctgcccccggcttccacctcggtccacaccgggcgcacgagggacgcaacgcccgcaacctcgggtcgcctcggcaacaagcaccaccgccgcgaccatcgagcccacctcgacgagaaggtgcaccgaggctaccaacccaggcgtgggggacactacaacagtggggaggatcggagtccctcgcccgaaccacctggtccgcaagctttcagccgggccatacgacgggcgccattcccgacccggtttcgagccccgactaccatcactaagtactcgagggaaacaaggccggaactgtggctcgcggattaccggctggcctgccagctgggtggaacggacgatgacaacctcatcatccgcaacctccccatgttcctcttcgacgccgcccgggactggttggagcatctgcctcctgcgcagatctccagctgggacgacctggtcaaagccttcgctagaaacttccagggcacataccgcaccgagctgcccaacatcaccgactcagatgtcatcgacgcgttcctcgccggcaccacttgccgtgacctagtgagcaagctgggtcgcaagactcccaccagggcgagcgagctgatggacatcgccaccaagttcgcctctgatcttgtcgccgccatcgagcaaaggaacccccggaagcctcccggaggggccaacctgttcgacaagatgctcaaggagtcgtgcccctatcatcagggtcccgtcaagcacacccttgaggaatgcgtcatgcttcggcgctacttccataaggccgggccccaagcggaaggtggcagaggccacgacaacgacaagaaggagggcaacaaggcagaggagttccccgaggtccacgactgtttcatgatttatggtgggcaagtgatcgacctgtccatgatccgggccggtgcggcgccctttcacgggatcatccccgggaagcgcgtccagccccttgggcaactagatctgcccgtctgcttcgggactccctccaacttccgaaatgaaaccctcacgtttgaggtggtcgggttccgaggaacctaccacgcagtgctggggagaccatgctacgccaagttcatggccgtccccaactacacctacctcaagctcaagatgtcgggccccaacggggtcatcaccgtcggatccacgtaccgacacgcgtatgaatgcgacgtggagtgcatggagtacgctgaggccctcgccgagtccgaggccctcatcgccgacctggagtgcctctccaaggagaggcggttaagtctgtccctctcgaccccagcaacgacgcctccaagcgactccggatcggctccaagctcgaccccaaataggaagcagtgctcgtcgactttctccgcgcgaacgccgaagtttttgcgtggagtccctcggacatgcctggcataccgagggatgtcgcgcgagcactggctggatatccgagctggagcccgacccgtgaagcagcctctgcgccgattcgacgaagaaaagcgtagagccataggcgaggagatccacaagctgatggccgcggggttcatcaaagaggtattccatcccgaatggctagccaaacctgtgcttgtgaaaaagaaaggtaggaaatggaggatgtgtgtagactacactggtctaaacaaagcatgtccgaaggttccctaccctctgcctcgcatcgatcaaatcgtggattccactgctgggtgcgaaaccctgtcattcctcgatgcctactcagggtatcaccaaatcaggatgcaagagtccgaccagctcgcgacttctttcatcacaccttttggcatgtactgctatattactatgccatttggtttgaggaatgcaggcgcaacataccaaaggtgcattaaccacgtgttcggagagcacattggccgaacgatcgaggcttacgtcgatgacatcgtagtcaagacattcaagtgtctgagagcgaagggcgtaaaactcaatcccgagaagtgtgtcttcggagtcccccgaggcatgctcctggggttcatcgtctccgagcggggcatcgaggccaacccggagaaaatcgcgatcatcaccaacatggggcctatcaaggacttgaaaggagtacaaaggttgcgacactacttcgaatctcatctggtgactgtggtgtcatccttccccctgggggagatcatccagtgccgagaggcctcgggtaggattgcaaagtgggcagtggagatcatgggcgagacaatctcgttcgctcctcggatggccatcaattcccaagtcttggcggactttgtggctgaatgggtcgacacccagcttccagcagctccgatccaaccagaactctggaccatgtatttcgacgggtcgctgaagaaaccaggagcgggtgcgggccggctcttcatctcacccctcgggaagcacctccgctacgtgctgcgcctccatttcccggcgtcaaacaatgtggccgaatacgaggctctggttaacgggttgcgcgtcgccatcgagctagggattcggcgcctcgacactcgtggcgactcgcagcttgtcatcgaccaagtcatgaagaactcccactgctgcgacccaaagatggaggcctactgcgacgaagttcggcgcctagaagacaagttctacgggctcgagctcaaccacgtcgcccgacgctacaacgagactgtggacgggctggctaagatagcctcgggacggacaacggagttattgcaagaaatacactcgggggcttgtggtcatcacgcagcacctcgagccctcgttggaaacgccttccgacaaggtttctactggccaaccgcggtggccgacgccactaggattgtacgcacctgccaagggtgtcaattctacgcaaggcagacacacctgcccgctcaggccctgcaaacaatacccatcacctggtcgtttgctgtatgggatctggacctcgtcggtcccttgcagaaggcacccgggggcttcacgcacctgctggtcgctatcgacaaattctccaagtgggtcgaggtccgacccctaaacagcatcaggaagttcctagacttctgcgaggaccaccacatccgtgtggactgggccgcggtagctcaccccatgacgaatgggcaggtagagcgtgccaacggcatgattctgcagggacttaagccgaggatctacaacgacctcaacaagttcggtaagcgatggatgaaggaactaccctcggtggtctggagtctgaggacgacgccgagccgagccacgggcttcacgacgttttttctagtctatggggccgaggctatcttgcccaccgacttagaatacggttccccgaggacaagggcgtacgacgaccgaagcaaccagaccagccgagaggactcactggaccaactagtagaggctcgggacatggccttactacactcggcacggtatcagcagtctctgcgacgctaccacgcctga

SEQ ID NO: 46951 - DNA, 292 bp, Zea mays
  Clone ID: MRT4577_142829C.1
tttttttttttttttttttttttttttttttttggtttttttttttttttttttttttttttttttttttttttttttttttttggaaggggggctaagtttgaaaccataaactaacaggtggtactcccttacaccatttgatgcatgtttttacttggttactacaaaaactattacagccttgattggggtttcaattcaatccaacctcccgccctttaaacgaactaaaccccccagtaagttaatccaaaaaaaccttcaggggggttgtttaaccgggcttact

SEQ ID NO: 46952 - DNA, 651 bp, Zea mays
  unsure (1)..(651): unsure at all n locations
  Clone ID: MRT4577_14282C.1
ttgggtacctcgaggccggccgggnnaanntttcaaaaaaaaaaaaaaaaaaaaaaaaaaaaaaaaaaaaaaaaaaaaaaaaaaaaaaaaaaaaaaaaaaaaaaaaaaaaaaaaaaaaaaaaaaaaaaaaaaaaaaaaaaaaagggaggggggcaaacccataaatgagggggaaagcatttgggggaaccccttgacaagcgacaagaaacccctaaggttttgatcgcgggggcgcctttgggaacacccccaaatcaaccccccaacatgccaataaaccccccccccccgccgcctccggggtgggggtcttcggcgccgggggggcccagtaacttccccccccctttccacctgcaaaaacaccacccgcacccgaaaatgcccccccctatgggggggagcagctaccaacagtaccagaaacagttgcatcaggggcatcagctcttccagggggacgcgcaaaccataacccccaaggcgctgcaaagcgccaaggttgctctccccactaggaacgtcctcaaccccgccgccgccgaaaacgccaggccccccaatccctctaccagaaaaaagcccatcccccgccgggttgccggacaatccggggaggatcctaccctcactgactggcctgaaaac

SEQ ID NO: 46953 - DNA, 3507 bp, Zea mays
  Clone ID: MRT4577_142830C.1
atgggcagtctccagcaacctctccggcccgggacggtgctccgtttcgggagtcttgagttcatgtcctttgacggcagctacgacatgatactccttccaccgccgtgcgacaacgacaatggcggccgacaacccgcccgccggcggcggaatcgacgacatcttccccgcgtggtggaagaacaacattcgagctcgctccgtcctctcccctgccaacggaggaggaggcggggcaaccaaggccaagcgggaggccgcgcttcgtcggccgtcgagcgaatcgacgcccccgacgcccagacggaaggcacgctgggcgtcgacctcgcgttcgagacgaaggcaagcgtcgtccccccgcgacacgctgatcccgagcaagaagacgacgccagcgcgcttgcgaaaagcttgcaggacgtcgcccttgtacctgagatgacggcgcaaccagtccccgatgtgactacgtcgctccgcgtcgaccaaaaggtactgactaactcccatcttacgtcatttcgactcggcctcaacccgcctagcaaccttgctttggcgggcgccctcattgaggcgagtgcaaccccactggggtttcgtatgcggtcgccttgggaccgtttgacggacgtctcaacctacgggccctctgggtccgaggaagatgacgatcccagcatctgttgggatttctctggacttggcaaccccagtgccacgcgggacttcatgaccgcatgtaactactgcctctccaactgttccgacggaagccgcagccttaacgacgagagctgcggcccaagccgcgaatgtttccacatcgagataggggatccctccgaaggcaaccatctcggcatgccggaggacggtgatcttcctaggccggcgcctcgcgccgacatcccgcgggagctagctgtggtccccgttccggcggggggttacgacccacaactcgagcaagtccgtgaggcgcaggccaggctcgacgagggaacaggagcgcttgagccgatccgtcgggacgtcggacgggtatgggcgggccaacccccggccggagaaatacgtcacctgccccaagggtcaggccgccacccgcatccagcggggtcggtcagaacctggcagccgcagcgatgctcctcctcgcgatgccggagccatcaactaccgagggtcagcggatccagggagagctcaaggatctcctggaaggcgctgcggcccgacgggccgagagcactgcctcttgaaggcagggatacccctcggaacctcatgccgcgacttcctgattcatgcgggaagcctcggtctacaccgggcgcacgcgcaacaccgcgcctgcggccccaggccacctcggcaacgagcaccatcgacgtgaccgtcgggcccacctcgacgaaagggtgcgccgaggctaccaccccaggcgtggggggcgctacgacaacggggaggatcggagtccctcgcccgaaccacccgggcacatacgtgcgccccgggaattcctgggaccttcgaagctgccggcagcagccgggagagtcgctccgggactacatccggcgattctcgaagcagcgcaccgagctacccaacatcaccgactcggatgtcatcagcgcgttcctcgccggcaccacctgccgcgacctggtgagaggcggtcgaggctatcttccgaaaggacaagcagccctagggccgcccatcggaagaggctcccaaggcgtctactccgcgcggcgccaagaagaagggcaagaagaagtcgcaatcgaaacgcgacgccgccgacgcggaccttgtcgccgccgccgagtacaagaaccctcggaagcccccccggaggtgcaaacctttttcgacaagatgctcaaggagccgtgcccctatcatcaggggcccgtcaagcacactctcgaggagtgcgtcatgcttcggcgccacttccacagggccgggccacccgcggagggtggcagggcccacgacgacgataagaaggaagatcaccaagcaggagaatacctcgaggtccgcgactgcttcatgatctacggtgggcatgcggcgaatgcctcggctcggcatcgcaaacaagagcaccgggaggtctgctcggtgaaggtggcggcgccagtctacctagactggtccgacaagcccatcaccttcgaccaggctgaccaccccgaccacgtgccgagcccggggaaatacccgctcgtcgtcgaccccgtcatcggcaacgtcaggctcaccaaggtcctgatggatgggggcagctgcctcaacatcatctacgccgagaccctcaagctcctgcgcgtcgatttgtcctccgtccgagcaggcgctgcgcccttccacgggatcatccctgggaagcgcgtccagcccctcggacaactcgacctccccgtctgcttcggaacaccctccaacttccgaagggagaccttgacgttcgaggtggtcgggttccgaggaacctaccacgcggtactgggaaggccatgctacgcgaagttcatggccgtccccaactacacctacctgaagctgaagatgtcgggccccaacggggtcatcaccgtcggccccacgtacaaacacgcgttcgaatgcgacgtggagtgcgtggagtacgccgaggccctcgccgagtccgaggccctcatcgccgacctggagaacctctccaaagaggtgccagatgtgaagcgtcatgccggcaactttgagccagcggagacggcggtggcgttcttcaccaacatcatccatcgcttcagggtcccaaactccatcatcactgacaacggtatccagttcaccggcaaaaaattcttggatttttgcgaagatcaccacatccgggtggactgggccgccgtggctcatcccatgtcgaatgggcaagtagagcgtgccaacggcatgattctacaagggctcaagccccggatctacaacggcctcaacaagtttggcaagcgatggatgaaggaactcccctcggcggtctggagcctgaggacaacgccaagccgagccacgggtttcacgccgttctacctggtctatggggccgaggccatcttgcccactgacctggaatacagctccccgagggcgagggcctacaccgaacaaagcaaccaagctagccgagaagactcgctggaccagctggaggaggctcgggacaaggccttactacactcggcgcggtaccagcagtccctacgatgctaccacgcccgaggggtccggtcccgagacctccaggtgggcgatctggtgcttcggctgcggcaagacgcccgagggaggcacaagctcacgcccccctgggaggggccattcgtcatcgccaaagtcctgaagcccggaacatacaagctgaccaataatcaaggcgagatctacggcaacgcttggaacatcaaacagctacgtcgcttctacccttaa

SEQ ID NO: 46954 - DNA, 345 bp, Zea mays
  Clone ID: MRT4577_142831C.1
acaaaacattctttttatttctaaaactgaagcttattacatagggaagagttacctttattacaaggccggatatactctaagtgctcctgtggctcgagggcgtgaccagcactgggggtagatgcgagcggcgtctggcaaagcgcggggggggggcgctgtagctgggctgacgcccggcctgcagggctgcaagctcacgcccgcggcaacacgacctatggatcacactccccgtcggacgcacaacactcctgctggtccggcgccttgggcaccagaaggggcggccgccttcacagggaccagggccatgagcggccggcgcggaggtgcatgcaa

SEQ ID NO: 46955 - DNA, 6528 bp, Zea mays
  Clone ID: MRT4577_142832C.1
atgggtagtctccagcaacctcttcagcccgagacgctgctccgttttgggagtctcgagttcatgtccctcgacggtagctacgacatggtactccttcccccgcagcgcgacagcggcaacgacggccatcagcccgcccggcggcggcggactcgacgacgtcttccccccgtggcggaagagcagcatccgggtttgtcctgccaccttccttgccgcaggaggaggaggcgaggcaaccgtggccaggcaggaggcggcacctcgtcggctgtcgagcgagtcgacgacgtcggcaccccagcggtggacatgtcgggcgttgacctcgcgcctgagacgacagcgagtgtcgtttccccgcaacatgccaaccctaagcggacaaatgacgccagcactctcatggaggacttgctgggcgttagcctcgtacctgagataacggtgcagtccgtccccgacgcgacttcatcaccgtccatcgatcgagaggtaccgtccgtttttcaccctgtgccttttagattcagctttgatccaccaagcgaccctgcttcggaagaagacgagcccgactctggttgggatttctccgggctcggtaatcccagtgccatgcgagacttcatgatcgcatgtgactactgcctctccgattgctccgatgatggccacagccttgatgacgagggttgtggcccaagtcacgaatgtttccacgtcaatctagggggtcacgacgaaggcaaccaccttggtatgccggaggatgacgacccccctgggcatgcgcctcgcgttgacatccttcgggagctagctgtggtcccagtccctgtggggggtcaggacacacagctcgagcaaatccgcgagatgcaggtcaagctcgacgaggaagcaggacaacttgtgcagctccggcaaaacatcgagcaggagtgggcaggccgagcactagctggagaagcgcgtcatcaggcccgggacgaccagcgccgtatcgctgacgatgccagggcaaggctgcccccggcttctagtgggatctctaactgggacgagctggtcaaagccttcgctggaaacttccagggcacatatgtgcgccctaggaactcttgggatctccaaagctaccgccagcagccaggggaatccctgcgagactacatccggcagttttcaaagcagcacaccgagctgcccaacatcaccgactccgatgtcatcggggcgttcctcgccggcaccacttgccgcgacctggtgagcaaactgggtcgcaagactcccaccaaggcgaacgagttgatggacatcgccaccaagacaagcagcctcagggacgccagcaggaaagacgtccccgaggcgtccgcccagcgcgacacgaagaagaaggccaagaagaagtcgcaagcaaagcacgacgccgccgacacagatcttgtcgctgccgccgagcacaggaaccctcggaagcctcccggaggggccaacctgtttgacaagatgctcaaggagtcgtgcccctatcaccagggtcccgtcaagcacaccctcaaggaatgtgtcatgcttcggcgctacttccataaggccgggcccccgacggaaggtggcaaaggccaagacaacgacaagaaggagggcggcaaggcagaggagttccctgagtggcgaacgcctcggctccgcaagcaggagcgccgggaggtctactcggtaaaggtggcggcgccagtctacctagactggtccaacaagtccatcaccttcgaccagggcgaccaccccgactgcgtgccgggcccaggaaagtacccgctcgttgtcgaccccgtcatcggccacaccaggctcaccaaggtcctcatggatggaggcaacaacctcaacatcatctatgctgagaccctcaggctcttggaaatcgatctgtccacgatccgggccggtgcagtgccctttcacgggatcatccccgggaagcgcgtcctgccccttggacaactcgatctgcccgtctgcttcgggactccctccaactttcgaaaggaaaccctcacgttcgaagtggtcgggttccgaggaacctaccacgcggtgctggggagaccgtgctacgccaagttcatggccgtccccaactacacctacctcaagctcaagatgtcgggccccaacggggtcatcaccggcggatccacgtaccgacacgcgtacgaatgcgacgtggagtgcgtggagtacgctgaggccctcgccgagtccgaggccctcatcgccgacctggagtgcctctccaaggaggtgccagatgcgaagcgccacgccgacaacttcgagccagcagaggcgcctctgcgccgtttcgacgaagaaaagcgcagagccataggcgaggagatccacaagctgatggctgcagggttcatcaaagaggtattccatcccgaatggttagccaaccctgtgcttgtgaaaaagaaaggtgggaattggaggatgtgcgtagactacactggtctaaacaaagcatgttcgaaggttccctaccctctgcctcgcattgatcaaatcatggattccactgctgggtgcgaaaccctgtcattcctcgacgcctactcaggttatcaccaaatcaagatgaaagagtccgaccagctcgcgacttctttcatcacaccttttggcatgtactgctatactactatgccatttggcttgaggaatgcaagtgcaacataccaaaggtgcatgaaccacgtgttcggagagcacatcggccgaacggtcgaggcttacatcgatgacatcgtagtcaagacgaggaaagccttcgacctcctctctggccttgaaacgacattcaagtgtctaagggcgaagggcgtgaaactcaatcccgagaagtgtgtcttcggagtcccccgaggcatgctcctggggttcatcgtctccgagcgaggcatcgaagccaacccggagaaaatcgcagccatcaccaacatggggcctatcaaagacttgaaaggagtacaaagggtcatgggataccttgcggctctgagccgcttcatctcacgcctcggcgaaaaaggcctacccttgtaccgcctcttaaggaagaccgagcgcttcacttggacccccgaggccgaggaagccctcggaaacttaaaggcgctcctttcaaacgcgcccatcttggtgccccccgctgcgggtgaagccctcttgatctacgtagtcgcaaccactcaggtggtcagcgtcgcgatcgtagtcgagagacgagaagaagggcatgcactgctcgtccagaggccagtctacttcatcagtgaagtgctatccgaaaccaagatccgctacccacaaattcagaagctactgtacgcatctcatctggtgactatggtgtcatccttccccctgggggagatcatccagtgccgagaggcctcgggcaggatagcaaagtgggcggtggagatcatgggcgaaacaatcttgttcgctcctcggaaggccatcaagtcccaagtcttggcggacttcgtggctgaatgggtcgacacccagctaccaacagcttcgatccaaccggaactctggaccatgtacttctatgggtcgctgatgaaaacaggagccgacgcgggcctgctcttcatctcacccctcggaaaacatctctgctacgtgttgcgcctccatttcccggcgtcaaacaacgtggccgagtacgaggctctggttaatgggttgcgcatcgccatcgagctagtggttcggcgcctcgacgctcgtggcgactcgcagcttgtcattgaccaagtcatgaaaaactcccactgccgcgacccgaagatggaggcctactgcgacgaagttcgatgcctggaagacaagttctatgggctcgagctcaaccacgtcgctcgaaggtacaacgagactgcggatgagctggctaaaatagcctcggggcggacaacggttcccccgaacgtcttctccagagacatacatcaacccttcgtcaagaccgacgacacgcccgagcccgaggaggccttggcccagcctgagggggcctcggcccagcccgaggtatcatcggccgccgagggtaagacactgcgcgtcgagggagagcggaatggggtcacgcctaatcgaaactggcagaccacgtacctgcaatatctccaccgaggagagctacccctcgacaaggccgaagctcggcgactggcgcggtgcaccaagtcgttcgtcttactgggtgatgaaaaggagctctaccaccgtagcccctcaggcattctccagcgatgcatatccgtcgccgaaggacaggagctattacaagagatacactcgggggcttgcggtcaccacacagcacctcgagccctcgttgggaacgccttccgacaaggcttctactggccgaccgcggtggccgacgccactaggattgtacgctcctgtcaggggtgtcaattctacgcgagacagacgcacctgcccgctcaggccctgcagacaatacccatcacctggtcatttgttgtgtggggtctggacctcgtcggtctcttgcagaaagcacccgggggcttctcgcacctgctggtcgccatcgacaaattcttcaagtggatcgaggatctacaacgatctcaacaagttcggcaagcgatggatgaaggagctaccctcggtggtctagagtctgaggacgatgccaagccgagccacgggtttctcgccgttctttctagtctatggggccgaggctatcttgcccacagacttagaatacggttccccgaggacgagggcgtacgacgaccgaagcaaccagatcagccgagaagactcactggaccagctggaagaggctcgggacatggccttactacactcggcgcggtatcagcagtctccacgacgctaccacgcccgaggggttcggccccgagacttccaggtgggagacttggtacatcggctgcggcaggacgaccgagggcgccacaaacttactcctccctgggaagggccgttcatcatcgccaagattttgaagcctggatcaaggcgaggtctacaacaacgcttggaacatccgacagctacgtcgcttttacccttaagatgttttcaagtcgttcatatacctcgttttctatacatacacaaataaagtctaaccgtcaaggaagggttcagacatcgacagagggagcagcagcaccctcggcgtcgtttccgcctttggcgggatctggcccggcctcggacggcgacacgggcagaaggatctccacctcgaaggaggacgccagcaccgcgcttgggccatcacaatcaggatgttcaggcctcgacagccacaatgaacaaacaccgacactcaacgtgccattacaaacggaactccggttccattcccgcgggtatgaacaacctccacatcggagggcctgcggaacgacaaactccgggtggctcgccggcgaccactgcagcagcagcgacaacgacctccgcctcaggcggctaaacaggagcagcgatgacctcagggcaaatgctgctgtaggaaggccctcgcccacgtccccacacgaggggcgaggacaagccgtcaaagccaaagagccggagggcaagcgccacctttggcaggcgaagcaggcgtcgtttcacctccgccatgatgaccgtgtcaaaaaaggggttcaaaggttggcccctcggaagggttcgacagccgccccagagcactcgggatttaggctcattactgatcagaggttcgaaggttggcccctcgaaagggttcgacagccgcctcagagcactcgggctccgcgcccactactgatcagggtttcgaaggctggcccctcgaaagggtttgacagccgccccagagcacgcagagcgagggatgactctgggtacgtccgttacatggccgaggcttgggctacgctcccgaggtaccctaggacatttccgagaccagcaggagcgattttgtattggaatcccatcagagggaggcatcgagccctcggatcctatcgaacgggaccgggtccggcaaatcacctgcaggtacttttggagcgcgcctctgggccactagccgacccttatcgaacggggcacgggcgtctactcggatcacccgttagcaactcactggagacaccatgttcggcgccctccgagggcaacatggcgctttcctcccttcctccttgcgaaaaggtgacgaaggggcgtatgataaaagttgagacagtccttgatcgtcctctcgctctgtgcagaggctcgggggctgctctcgcaaacccggctacggccaaaccgttgatagcgtcaacaaaccagcctgaaaactcggaacctgaccatgcacccgggctacaatcagatcgcatgaggaaacaaccagaccgaccgaggcatcacgaaaggcattaa

SEQ ID NO: 46956 - DNA, 430 bp, Zea mays
  Clone ID: MRT4577_142833C.1
caacccacatttgcactattactatttcctggatgcagggtaccatatactacccacggactggacaccagttcatactatacttagataactgccatgccaaactcccgggttagcgagaccacccaaaatagagcttacacaacatactccaacaagcaaattattctacatatggcccaatgctagggcaggaattcttcagggggccctcacaagtgtgcaccgtgccctgtaatgaccaacatcaggttgtgctcagcaaacatgctaaagaaaggcgcagggcataaggtacctgttccggatttacagataccggggtttacaagtttcctgattcccacatcgtgggaaccccccctaaatttcgtataacttggctgcctttaccaccggattaaacttggcaatggaggcacctggcaac

SEQ ID NO: 46957 - DNA, 1783 bp, Zea mays
  Clone ID: MRT4577_142834C.1
ctcggctcggcaccgcaagcaggagcgtcgggaggtctgctcggtgaaggtggcggcgccagtctacctagactggtccgacaagcccatcaccttcgaccaaggcgaccaccccgaccgcgtgccgagcccaggaaagtacccgcttgttgtcgaccccgtcatcggcaacatcaggctcaccaaggtcctcatggacggaggcagcagcctcaacatcatctacgtcgagaccctcgggctcttgcagatcgatctgtccacgatccgggccggaacttaccacgcggtgctggggagaccatgctacgccaagttcatggccatccccaactacacctacctcaagctcaagatgtcgggccccaacgggtgcgtggagtacgctgaggccctcgccgaatccgaggccctcatcaccgacatggagtgcctctccaaggaggtgcctgatgcgaagcgccacgccgacaacttcgagccagcagaggcggttaagtccgtccctctcgaccccaacaacgatgcctccaagcaggcgaaaggcgtaaaactcaatcccgagaagtgtgtcttcggagtcccccgaggcatgctcctggggttcatcgtctccgagcggggcatcgaggccaacccggagaaaatcgcggtcgtcaccaacatggggcctatcaaagacttgaaaggagtacaaagggtcatgggatgccttgcggctctgagccgcttcatctcgcgccttggcgaaagaggcctacccttgtatcgcctcttaaggaagaccgagcacttctcttggaaccccgaggccaaggaagccctcggaaacctaaaggcactccttacaagtgcgcccatcttggtgccccccgctgcaggagaagccctcttgatctacgtagctgcaaccactcaggtggtcagcgccgcgatcgtagtcgagagacgagaagaagggcatgcactgctcgtccagaggccagtctacttcatcagcgaagtactatccgagaccaagatccgctacccacaaattcagaagctactgtacgcagtaattctgacgcggcgaaagttgcgacactacttcgagtctcatccggtgactgtggtgtcatccttccccccggggttgatcatccagtgccgagaggcctcgggtaggatagcaaaatgggcggtggagatcatgggcgagacaatctcgttcactcctcagaaggccatcaagtcccaagtcttggcagacttcgtggctgaatgggtcgacacccagctaccaacagctccgatccaaccagaactctggaccatgtatttcgatggatcgcttatgaaaacaggagcaggtgcgggcctgctcttcatctcacccctcgggaagcacctccgctacgtgttgcgcctccattttccggcgtcaaacaacatggccgagtacgaggctctagttaatgggttgcacatcgccatcgagctagggctcgtcatcgaccaagtcatgaagaactcccactgccgcgaccggaagatggaggcctactgcgacgagaaggcacccaggggcttctcgcacctgctggtcgccatcgacatattctccaagtggatcgaggtccgacccctaaccagcatcaggtccgagcaggcggtggcgttcttcaccaacatcatccatcgcttcggggtcccaaactccatcatcactgacaatggcacccagttcactggcaagaagttcctggaattctgcgaggaccaccacatccgggtggactag

SEQ ID NO: 46958 - DNA, 948 bp, Zea mays
  Clone ID: MRT4577_142835C.1
atgggcgagacaatctcgttcgctcctcggaaggccatcaagtcccaagtcttggtggacttcgtggctgaatgggtcgacacccagctaccaacagctccgatccaaccagaactctggaccatgtattttgatgggtcgctgatgaaaacaggagcaggtgcgggtctgctcttcatctcacccctcgggaagcacctccgctacgtgctgcgcctccatttcccggtgtcaaacaacgtggccgagtacgaggctttggttaacgggttgcgcatcgccatcgagctaggggttcggcgcctcgacgctcgtggcgactcgcagcttgtcattgaccaagtcatgaagaactaccactaccgcaacccaaagatggaggcctactgtgacgaggttcggcacctggaagacaagttctacgggctcgagctcaaccacgtcgctcgacgaccccatacctgcaatatctccactgaggagagctacccctcgacaaagccgaagctcgacgactggcgcggcgcgccaagttgttcgtcttactgggtgatgaaaaggagctctaccaccgcggcctctcaggcatcctccaacgatgcatatccatcgccgaagaaggcacccgggggcttcacgcacctgctggtcgccatcgacaaattctccaagtggatcgagacttttccccgaggacgagggcgtacgacgaccaaagcaactagaccagccgagaagactcactggaccagctggaagaggcttgggacatggccttactacactcggcacggtatcagcagtctctgcgatgctaccacgcccgaggggttcggccccaagacctccacgtgggagacttggtacttcggctgcggcaagacgcccgagggcgccacaagctcactcctccaagggaagggtcgttcatcatcgccaagattttga

SEQ ID NO: 46959 - DNA, 174 bp, Zea mays
  Clone ID: MRT4577_142836C.1
tctagatcgcgagcggcccccttttttgtttttttgaagcggaatttcagtctcttgacccggataagggttcggtctttactaaagtgccccatatttatcaagcgcccgcgtgccgtgaccagggaattcagctcaggcttccaaagcttcttcaacctgcccttccaacaa

SEQ ID NO: 46960 - DNA, 384 bp, Zea mays
  Clone ID: MRT4577_142837C.1
gtaggggatccacgcgataaatctccgtattctgatcacgctgaggattctactcagccggggcgggctcgacgagatggcgctccggaagctcattatcatccacattgacgaacgtgtgcacgcaactatgacggcgaccagacagtgcactgaggccaataactcggtgcggccgtccaacccgaatgctcctgtatgggcgctgaatacgaagcggacccaatacgtatagggctgtgacgcatgaaaccgatacacctacatcatcgagcgcatgacgaggatgaactaggcacggtcttggatcctgtgagaaagcgtctcagcgtcagcgtgatcatttttactgtaatcagctgacaggtcatgatcgacatgcaa

SEQ ID NO: 46961 - DNA, 2119 bp, Zea mays
  Clone ID: MRT4577_142838C.1
ataccataaaggatatcgtatacatatacatatgagtcatgacaagatatcacacgcttcatccaaatatgttcttgatatgtaactgcttgactgaagtctccaacacatcacatcgccccttacatgcgagcattactgagaatctaataccaagctatcaaaccatagctggcattataattgagatgttttgactctcaaaaaaagttgaaatgccttataatttagaaagaagagagcaccgtggagatggagcttcatcaccattcgggaaggtcagcacatcatcatcactctgacacagtatggaatcagcctccactggcagcagggcaaggaaatggatgcatgcttccatgtttcttaagtatgttccttgatacatgatcctgagtgatttagggcttgttcggttagctctcaatctatgtggattgagtaggattggatgggtttgaatcccaaacaagtcaaacttcttaattttttccaatctcatccaattcatgtgtattgggaataaccgaacaaggccttagtgatttgagcgttctgactgaggagttgacgggtaggataactcagattgctcaccgctgcgcagtttggaaccatcgctctgtgaagcttcagacagttgtccatgctccatttgcctgttccttccatcctgatgatttgacttgtaagtctgatccttgggcccttgttggttttgttgctgttgcacgtacggttggatctgttgttgcataatatgttgttgctgtcgctgaagaagcatcatctgctgctgctgttgctcaaacagttgctgttgttgctgccgaactgagtcttgctggtgctgtggcatctgcagtacatactgttgttgttgcattaactgctgctgtaagagctgttgctgctgagcttgctgttgttgatacatctgctgctgctgtataagatacatttgttgttgctgctgaagataaagaagctgttgttgctgcaactgctggctttgttgatccatttgaggtgcttgttgctgctgtttattttggccgtgtttgctatccccggaaggacactgaccctgtttttcgtcaggaagttgctgaactggcagtgcctgttgcagtactacttgtggctgctgttgcacttgttgctgccaaagtaccaattgctggttcagctgctgtacttgctgcataaaagtttgctgaagatgctcagtcgggagctgttgctgttgcagactctgcatctgttgattgtgctgagcctgcaggtaatacagttgttgttggtaatattcccccatttgtgttgcatacccttgcatcatttggagatactgttggtttctgtgattaggctgtgcaagcaattgatcttgaatttgtgcagatgtttgaacattgtgaggcattgtaagctcttgttgttgcatgttttgtgaaaggttattagattgatatgtttgagcattctccaactggtttcgaagttgagcttgaatactgacagtatccgattttgttttcgctgagtccaagctccaaggttttgcacaggctgagagttgatgtgactgcgaagattgaatatagtcttgactcccatgaccaatggcagagatttccttgtcacattcagttggatttggaccatcaaaagatatctctaggtttgcattactgacagaaaaatgatgctctgtgtcgacttttacctgaacctccacatggtgcctttcctccagctctggagatattcgagctggaccagaagaacttccttctttgtgcatgtttggtccagacggcgagtcatattttgagcatactgtttctagatggctgcttgcagatacctcaatgaccttgccctgaaaattgatgttctcagagctagcaattgctttggaaggagaatcacagtcacctgactcagctacaggagtctccgcctcatgagaatttgttttctcatcattttgttcatgcaagattaggtcttgattaatatcttctttggcatgtgaattcatttgcttctctattctgtttttgtacaggatatgttcactgtaaaccatgtcagtgcattcctgagctgtcgt

SEQ ID NO: 46962 - DNA, 876 bp, Zea mays
  unsure (1)..(876): unsure at all n locations
  Clone ID: MRT4577_142839C.1
tgaggatatctttgcttctgcagctcctgttaaattatctcttgcagccacaggctcgttgatggtgacttggggcctttgtctgctaacagctccttggctgttgaaacaggggccctcatctttgactgtggcatccgatcaacaccttttctagctgcaacacgaggtgcatttgctgtggcctttggggggtttgaggcagcaacgggccgacctgaaagtttatcaggtttgccaagagatctctggatcgaagcacggacattatcaaatagttcagtctcaaggctttccatcgcccaggtttcactttccagagttgaggttgttgactcccctgatctcctcgtttcctcaatgattccaggcagcctggaaccttgggccttacgataggtgctgtttacaatggctaattcctcagtgtcgagaaccccttcactggtaaaaaattcgctgtcccaagccaagctcttgcggaggtttacccccttcttggccttgcgctgctccggggactccgtccgctcgggatcttcccgctcctccatcacacagtccggatccgtagcccgaaccgccgccgatggagaaacgccggaggaggttgcctcggctcccactagagactctgcgtggagcggatcgggacgccgcggggccggtgagacgaggttgaagagaagatcgtcctcggtggagacgtcgatgaggaagagtccctccataggcgcagcgaggagtcctgcggccggccggagtcgctggggatcggtaccggtgggaaacccctaaatcgccgccggtgagggattcaagagggagagaaggcgaagacgagcncgagtgtcgtactccggcccggccggcctc

SEQ ID NO: 46963 - DNA, 204 bp, Zea mays
  Clone ID: MRT4577_14283C.1
cccacgggtacagtatataagaacactcgtggaccaacactcgcggacagggggtagagccatcgtttcctagttgagtatccctgcttgcgctgctagcccaaccagtgagcgacacagatgacatgatgatatagctgggctcacttgcccatagcgcccacctgccgcgggttcatgggccggaaacccaaatgggcaccc

SEQ ID NO: 46964 - DNA, 616 bp, Zea mays
  Clone ID: MRT4577_142840C.1
gcacgaggctgcctccggctccgctccgctccccctcccactcccccacctaacccctcccacctacctaacaaaccagacgtccagaccagaccagagctggcggtgtgagaaaaaaaagcagccaccacgacccgggaagggaacacggccacacggggcgggggggaccaaaccgccgggccaatccaatccaatccacgcgcccgtctccatggacgccgcagctttgctcgacgccttctccgccgcgccgcgccaccagctccgcccggcagcctggtgcagatccacgcgcttcgcgtcccaggcgtgccgcgccaccgccccattcgcccgcgccgactggcaggccgcctgcgccatcctcgccagcaacagcacgggcggcgccggccacgatgccagcagcaacaacaacgcgcagccagcgccgcgggtcaacggccagaagcccccgccagccctggaggcgacgccgacgccggacgagctggatctggtgcccgtgtccaacctcccccgcccgctcagcatcagcgacctgtccccggcgcccatgcacgggtcgcagctccgcgtggcgtaccagggcgtcccgggcgcctacagcgag

SEQ ID NO: 46965 - DNA, 792 bp, Zea mays
  Clone ID: MRT4577_142841C.1
ccggccgggccttttctgcgtcctctctgcctttccccaggtaagggcagagggagagaagaaagaggaaggggaaaaaccgtcgaccatgtcgacggccttctccgacttcggtcctctcacggagcggcggcgtatcgagaggcagcggcagcagcgtaggcgcgtcatgctggccgccggcgcagcgtcggtcatacttatccttattgtcatgggcggcgctgccgtcgcgtacaacgctagcatcgaggatgactcgtcctcgtcttcctcttccccgtcgggtggtggctcgggttccgggtcgaaccttatcagcgcgtccaagagcgtcaaaatgatgtgcgcacagaccgactacagggatgcctgcgagaagagcctgtccaaggcggccgcgaatgccagcgcgtcatcgcccgaggacatcgtccgagccgccgtggcggtgatcggcgacgccctcgggaacgcgtttaaccggtcggaggtgatcaagagcgacgatccgcgcgtgaagggcgccgtcgcggactgcagggagatctaccacaacgccaaggacgacctcgcgcgcacgctccacggcatcgatgccggcggcatggcaggggtcaccaagcgcggctaccagctccgcatcttgctcagcgcggggatcacgcacatggagacgtgcatcgacggtttccccgacgggcacctcaagaagcagatgactggcacgatggagtccgggaaaggagctgaccagcaaacgcgctggccatcatcgagaaggcctcatcg

SEQ ID NO: 46966 - DNA, 686 bp, Zea mays
  Clone ID: MRT4577_142842C.1
ggccgcttttttttttttttttttctttttttttttttttttttttttttttttttttttttttttttttttttttttttttttttttttttttttttttttggaaaaaccacccggggggttccctgggtagtaaattttgggaacaaaggagtcccaacagggggggggaaaaaacttttccgggtgggccagcccttttactaaacagggccaattaaccaaattcacccccccaaatgggggagggggcccttgaaccagggccgggggctgagcacccaggacccggggacgaggaaaagggggccccccccggcaacgggggggtagttgagcgggcccttggggcccgggtcccggcccgggaggaaaaaaaccccggggaggggggccccccaaagcagggggacccacccgaccaggaccccgaaggggcccaggtggaagggccccggcacaaaaaacttgggccccagggtcccccggaacaggaacgggagggcgaccaaaaagaccaccccgaccggggggagggaaaccagggccgggaacccccccaggcttcccaaaaacgggaggcccatgcaaagggcgacaagagccgaaacccaaacggggttgaggggcccccccggctgggggaccttgggccaaacgggggagaagggcatgggcccccccct

SEQ ID NO: 46967 - DNA, 422 bp, Zea mays
  unsure (1)..(422): unsure at all n locations
  Clone ID: MRT4577_142843C.1
attgcatattatgtagtaggcactgaatgtaaattccttggcaattggcattaactgggttcttcattatgccattgtacttctgcttttctatttaaacattggtgcattgcatattatgtagtaggcactgaaagtaaattccttggcaattggcattaactgttttcttcattatgccattgtacttctgcttttctatttaactgtttcatgcagtgaggttggcaccagaagaggagtcacacaagcttactgggtttgtgcataacgctgtcacttgcatcgggatggaaacaaacataccggtaatgtaaatttatatttacattgcagctgttgaagcatgtacattgcanagatactactattaggtttagatcacaattaatagatttgtttgtgacataccgtgttttttg

SEQ ID NO: 46968 - DNA, 1340 bp, Zea mays
  Clone ID: MRT4577_142844C.1
ctcgaggccggccgggccggtgctcccagtcagtacgtcgctgcctttcctctcccgactcccgttcaccacactactttccctcgtgcggccgccgccctacaacaggtgccccaggtcttcgctgcgccattcgccagcgacgagcacccaacaggctcagaaacatcgctgacatccacatgcaccacagtagttcagtagagtagctgttggaacccacacaccggcgatggcaactgctcctgtgacatcctccatggctacgaactccacctgtgtgcggctgcctagcatgcccctgaggcgtgcacccgccatcgtctcctttgcctctcgtccatggtcaaccgcaatgacctcatgtactggattgtcgcggcactctgatgtggttgccgccgcggggcaccagaagttgatggggtctttgaacaacaacgagggactcatgtttggggtggttgtggcacggttcaacgaggtcgtgacaaatttgttactacagggtgccctggaaactttcgagcgatactctgttaaagcagaaaatataacagttgttagtgttcctggaagctttgaagttcctataacggcacaaaagcttgggaaatctggaaaatttgatgcaattctgtgcattggagctgtgattagaggtgacacaacccactatgatgccgttgcaaactcagctgcatcaggtgtactcaatgctggattatctgctggtgttccttgtgtatttggtgttctaacctgtgaagacatggatcaggcactgaaccgtgctggtggcaaggctggaaacaaaggagctgaagctgctcttactgccattgagatggcctcgctgttccggcatcacttaggctgacaccttgtgtattctgattttctatacacgaggcggcagcatttcctcctatcaagagttttggctaatagagagcttttccgccgcggctagtataatttatttccaagtctgttggtccggtgcggattggttgctttccttctatgagacctgaaaagctcacaagacatgtctgtaaacctgacaccatgaataattgtcgccacgaacgaaatatggtcatgaataaagatgcacatagtgttttgttagataaaaaaaaaaaaaaaaaagggtaagcatattttttgctgataatctgatgtcaaaggcaagatcatgaaattaagatggccacaatgttctatttctgaagtttattgttggacagtaagttttccggttctatcgaactgcttattgttaacgttgtccttattagttatgcgatcttaagcgttgacgctgcactcattct

SEQ ID NO: 46969 - DNA, 1749 bp, Zea mays
  Clone ID: MRT4577_142845C.1
tttttttttttttttttttttttttttttttagacaaactgtccacttcattcaaaacaatgtcagacctcatggcgaagaccatgccggaggtggtgtccacaggggccttacatgtctgcctcatgctccagtataaaccatctgtttacactctcaggattctttttttttttttttttttgcttagattcgtgtcttaaaccatctctccaatcctgattctagagtttttgacccacacattacatgatctcatgtaatttgatacttttggcagttctgactggacctggtcctacacctcttgtaaattatagaagcatccaccaacactcactgcatttcttcttctctttgactctggactcatacacaggctttgcaaatctgtcaagtgtgttgacaagaagattggacacatcagcctcaccagtgaaagtgaaacgatcttccttgctagcctcctgatgtgcaaccggtgccttgtctgaagcatctgctgtattgggcttggacacgatgccaaggattggtgagtcctccagttttggcaaggaagcaaactgccgaacgttgttgatttgctctcgttcttcttcattgtgctttgttgtcccttcctctatcacctcgaccacttgctcttccttaggatcatcacttactgtaggcccgttgactgcatcagaaggatcagccgcacattctttctgacccttccgtgctgccgcccccaccttggatcttgctgacctcctcctccttctctttgtcgtggccacttcttctgccgtagcttccggtgccgctgtcacctggcctgtctgcacctcctcgtgtgccttgtaaatataagctgtagccctcttagtgacattcttgccttcctgtggttttgtggcctcctccaccttgggaacaacttcatcatatttaggatcaatttcaggtccaacggttgtgtcagaagaatcagctttctgccccttctgtgctgccgctgctaccttggatcttgtggaccttctcgtccttttctttgccatggacaactcttccgccgtcctctgatccggctgcaaatcctcatgtgtcttatatggcgcggctctcctcgtcacgttttgaccttcctgtggctttctgacctcttcttcctccaccacacctactactattgcatgctcttctgaatcctcgcagctcttatctttctgctccttccgggctgccgccgcttgtacgtcctcctctttctgatccagcgcgaccttcaccttggatctcgctgaccttctcgtcctaattcctacggccgcctcttccgcatcatccacaggtgccgcagcagcctcccgtgccaccgtcatcttgggtcccggcaaggtctgtgggcccggcaccatcacctcctcctcatccccctccgtcttactcttccgtgccccggccttccttctcttcccccgtgcacggccgccgcgagggagcgggcacccgtgctcctgctcccctccgaccgcctcttccgcatccggcgtctgttccttcatcgccgataccggcggtggcgccgtgctcccgatctcgtcgatcctgtccaccgcggggaggcacctaagcgcttccgccatggccgcgttggacatgttggcacggatgccgctgctcttgcagagcgcctgaagttctcgccgggagagggagtggaaatccatggccgccgccgtctgcctcttctctcgc

SEQ ID NO: 46970 - DNA, 1445 bp, Zea mays
  Clone ID: MRT4577_142846C.1
cgctgcctttcctctcccgactcccgttcaccacactactttccctcgtgcggccgccgccctacaacaggtgccccaggtcttcgctgcgccattcgccagcgacgagcacccaacagcatggtcaaccgcaatgacctcatgtactggattgtcgcggcactctgatgtggttgccgccgcggggcaccagaagttgatggggtctttgaacaacaacgagggactcatgtttggggtggttgtggcacggttcaacgaggtcgtgacaaatttgttactacagggtgccctggaaactttcgagcgatactctgttaaagcagaaaatataacagttgttagtgttcctggaagctttgaagttcctataacggcacaaaagcttgggaaatctggaaaatttgatgcaattctgtgcattggagctgtgattagaggtgacacaacccactatgatgccgttgcaaactcagctgcatcaggtgtactcaatgctggattatctgctggtgttccttgtgtgtttggtgtcctaacctgtgaagacatggatcaggcactgaaccgtgctggtggcaaggctggaaacaaaggagctgaagctgctcttactgccattgagatggcctcgctgttccggcatcacttaggctgacaccttgtgtattctgattttctatacacgaggcggcagcatttcctcctatcaagagttttggctaatagagagcttttccgccgcggctagtataatttatttccaagtctgttggtccggtgcggattggttgctttccttctatgagacctgaaaagctcacaagacatatctgtaatgtaaacctgacaccatgaataattgtcgccacgaacgaaatatggtcatgaataaagatgcactagtgttttgttaaaaaaaaaaaaaaaaaaaaatgcattggagctgtgattagaggtgacacaacccactatgatgctgttgcaaactcagctgcatcaggtgtactcaatgctggattatctgctggtgttccttgtgtatttggtgttctaacctgtgaagacatggatcaggcgctaaaccgcgctggtggcaaggctggaaacaagggtgctgaagctgctcttactgccattgagatggcctctctgttccggcatcacttaggctgacgcttttgcgtattctggtttctatacacgagggaaaaccgtaataaactgaaaggatacagcttgagatcttatcccgatcttccaaatttggagcatattttttgctgataatctgatgtcaaaggcaagatcatgaaattaagatggccccaatgttctatttctgaagtttattgttggacagtaagttttccggttctatcgaactgcttattgttaacgttgtccttattagttatgcgatcttaagcgttgacgctgcactc

SEQ ID NO: 46971 - DNA, 579 bp, Zea mays
  Clone ID: MRT4577_142847C.1
caaaacaggaaaccccaacttcccccccccgggaaaaaaaaaaccccacttttgggaattttaaaacccaaaaaccataaaaaaccctcccttaacaaacccttaaaacccgggtttaaaaaaggtttcatttccccccaaggaacttatagggggcaaaaaacccggcccacagaatggcaaacgggcctggaaacctaataggaaaatttttttttccccaaagggggaaaaacgggaccccaagtaaccccttcccctcctaaaaactttttaaaaagttgatttttggaaacccaacggccccgggaaaaaaacccaaaatttgggccgatttttcccccacaagtaaaaaaaaatgttggtaagaaagccccttacctccccctaataaaaagggccgttttttgcaaaatcatggcaaaaactataataatcaccctaaaaaaaaccctgggccttggttttaaaaggtccaccggggggataaccctttgaaggacccgaggctgagggaaaaaaaccatcggaaaaccaagcatccccttttggaattttttccaagtaattatccttttg

SEQ ID NO: 46972 - DNA, 564 bp, Zea mays
  unsure (1)..(564): unsure at all n locations
  Clone ID: MRT4577_142848C.1
cgtcgctgcctttcctctcccgactcccgttcaccccactactttccctcgtgcggccgccgccctattacaggtgccccaggtcttcgctgcgccattcgccagcgacgagcacccaacaggggtgtacatgtcgatgttgcctctttattcggcgctaagaagctcagaaacatcgctgacatccacatgcaccacagtagttcaccagagtagctgttggaacccacacaccggcgatggcaactgctcctgtgacatcctccatggctacgaactccacctgtgtgcggctgcctagcatgcccttgaggttgctctagacctngaatcctttgcctcttgtccatggtcaaccgcaatgacctcatgaactggaaagtcacggcactctgatgtggttgccgccgcggcgcaccagaagttgatggggtctttgaacaacaacgagggacctctgtttggggtggctgtggcacggttcaacgaggccgcgacaaatttgttactacagggtgccctggaaactttcgagcgatactctgttaaagcagaaaatataac

SEQ ID NO: 46973 - DNA, 477 bp, Zea mays
  Clone ID: MRT4577_142849C.1
gggggccatattacttggcggttctgtcacagatggtagcaggatgggaaggaaaagggcaaaacatgtccaaactcatcatgagcctggcgacccaatggcacgcgccatccacatttattctcaggatatacaagcagccaccatccatgagaagaatgaggaaaaaacggctctacgtgggtcttgaacatgtggtggatcatgtcaacaacacgggtgctgtcgcccgactatctgtggtaccactggactagcttgacgaagcggtcgattagagcgatcccagccttgactttgaagatgctcgacctgctgtcaccaaggaaggctgttaacaccatatcctgctacgcatgacccatgatacccttgagcggaccctacgaagcagactcaatagctgtctagatagcctgatatgatgaccaattctccattctgacggtgaggtggacaacctggacattcacagtt

SEQ ID NO: 46974 - DNA, 671 bp, Zea mays
  unsure (1)..(671): unsure at all n locations
  Clone ID: MRT4577_14284C.1
aattcggcacgagggcatctcgcccgccacatcccagatctccccgccccgcatctcgcccgccagcgaccggcgagggggcgcgcgcccgccgccgccgccgcgatgtacctggcgtacggatggccgcagtcgatcccgctggacccggacaactcggaccgcgtggtcctcctccgcttgctcggccgcttcctcctcgccgtctgcccggcctcgctccacctctggtccgccgcacaacaccgggtccgcctcgcccgctccgaccgctctccggagtctctctccgcccacggctacaacgcgcacgccgtgtggagccccgacgccaagaccgtcgctgtcctgacctcttccttctacctctacgtttacaaggttcagcacttggggaagcaactgatcgtcggtggcaagcaggtcccggggctttgcctggctagcatatccctaatcatcaccgagaaggttcctctcgccaatgacgttgctataacgagcaatttcgtgtgtgacaacaaaagcatgctcctcgggctatccaacgggcatgtgcaggtcatgtcctggaacgctgaggtacatggaaacgcatgncacttttgtttattttttcagacagcttcaagcttggttggctctgtgtgttcgtctgagaacctactgct

SEQ ID NO: 46975 - DNA, 203 bp, Zea mays
  Clone ID: MRT4577_142850C.1
ccattgcatcgcttcaacagcatcttctacagcgcttgccatgactaagacagggaggcggggtgaatcctgtcacctacttgcaacagcagctgcttgcatgcaacccacttgctccaccgatcgtccctgtataccaacaacaacaacagctgcaacattttatgccagtgctgattctacttgccatggtgaaccctgct

SEQ ID NO: 46976 - DNA, 411 bp, Zea mays
  Clone ID: MRT4577_142851C.1
tctagtatggagtcgtaccgccccttccctcgccggaccagagacagcaccgcgccatgtgcataaggaggtacttgaccgagcgcgcctctctccgcaaggccacggtgaccgccgccgcggcaatgactgccaccgacctgcttgtcggctgcgacatggccaactaggtgatgctgggctgcaggcgcactacggggtcgtcttcgagcccagccagttcaccgcctagggcggcgacaccatcacattcaagaacaacgccagctccccccacaacatcgtcttcgacgaaaactaggtgacgagcgccgacaacgccaccaagatctctcaggacgagtacctcaacgagacaggctagaactactgcgtcagcatcaccgagacgataaactactgcatctactg

SEQ ID NO: 46977 - DNA, 282 bp, Zea mays
  Clone ID: MRT4577_142852C.1
caatccggcgcaacccaagctaaaacccccaatttttgggggggttttccaaccgcctcaaatttcatttcttccttaaaatttagggcccgggtttattccacggggggctcccccacctccggcgtggaaaaagcattttcctccagggcaggttatgcattgggcccttctatcggatcttttggtaaatggggccggggggctcccgtatttggaccctccaaaacatgaaatgggggggggcacccccatcaaaaacaggccccccccccttttccc

SEQ ID NO: 46978 - DNA, 2376 bp, Zea mays
  Clone ID: MRT4577_142853C.1
atggcagccgtcagcccgcccgccggcggcgaaatcaacgacgtcttccccacatggcagaagaacgacatccgggtttgtcccgtcacctcccccaccgacggaggaggaggcggggcaaccatggccaagctcggtaaccccagtgccattcagcacttcatgaccgcatgcgactactgcctctccgattgttctgatggtagccgcagcttcggcaacgaggactgcggcccaagtcgtgaatgtttccacgtcgatctagggggtcccggtgaaggcaaccatcttggtatgccggaaaacgacgatccccctaggcctgcgcctcgcgttgacatccttcgggagctagctgtggtcccagtccctgcggggggtcaggacgcacagctcgagcaaatccgcgagatgcaggccaggctcgacgagggagcaggaacaattgagcagttccagcggaacatcgggcaggaatgggtagaccaagctccggtcggagaagcgcgtcatctaccccagggcatgcagcaccgcgttgccaatgacgtcagggcaaggccgccaccggcttccagtggggccggccagaacctggctgcagcagcaatactactccgcgcgatgccggaaccatcgaccatcgaagggcggcgtatccagggagagctcaagaatctcctggaggatgccgcagtccgacgggccgaaagctctgcctcccgaaggcaggggtacgcctcggagcatcacgctgcgacttcccgattcgtgcgggaagcctcggtccacaccgggcgcacgcgcaacacgacgcctgcggccctaggtcgccttggcaacgagcaccaccaccgcaaccgtcgagcccacctcgacgagagggtgcgccgaggctaccacctcaggcgtgggggacgctacgacagcagggaggatcggagcccctcacccgaaccacccggtccgcaagctttcagccgggccatacgacgggcgccgttcccgaaccggttccgaaccccgacaaccatcacaaactgccgccagcagccgggagagtctctccgggactacatccggcgattctcgaagcagcgcactgagctacccaacgtcaccgcctcggacgtcatcggcgcgttcctcgccggcaccacctgccgcgacctggtgagcaagctgggtcgcaagacccccaccagggcgagcgagctgatggacatcgccaccaagttcgcctctggccaggaggcggttgaggccatcttccgaaaggataagcagccccagggccgccagccggaagacgtccccgaggcatccactcagtgcggcaccaagaagaagaacaagaagaagtcgcaagtgaaacgcgacgccaccgacgcggaccttgtcactgccgctgagtacaagaaccctcggaaacctcctggaggtgccaatctcttcgataagatgctcaaggagccgtgcccctatcatcaggggcccgtcaagcacacccttgaggagtgcgtcatgcttcggcgccactttcacaaggccgggccaccggcggaaggtggcagggcccacaacaacaacaagaaggaggattacaaggcagaggagttccccgaggtccatgactgcttcatgatctacggtgggccagtggcgaacgcctcggctcgacaccgcaagcaagagcgtcgggaggtctgctcgctaaaggtggcagcgccagtctacctagactggtccgacaagcccatcaccttcgaccagggcgaccaccccgaccgcgtgccgagccccgggaaatatccgctcgttgtcgaccccgtcatcggcaacgtcaggctcaccaaggtcctcatggacggaggcagcagcctcaacatcatctacgccgagaccctcgggctcctgcagatcgatctgtcctcaatccgggccggcgcggcgccttttcacgggatcatccccgggaaacgcgtccaacccctcgaacaactcgatctgcccgtctgcttcgggactccctccaacttccgaagggaaaccctcacgttcgaggtggttgggttccgaggaacctaccacgcagtactggggaggccacgctacgccaagttcatggttgtccccaactacacctacctcaagctcaaaatgcctggccccaacgagtgcgtggagtacgtcgaggccctcgccgaatccgaggccctcatcgccgacctggagagcttctccaaggaggcgccagacgtgaagcgccacgctggcaacttcgagccagctgagacggtcaaatccgtccctctcgaccccagcaacgacgcctccaagcagatactgatcggctccgagctcgaccccaaatag

SEQ ID NO: 46979 - DNA, 1926 bp, Zea mays
  Clone ID: MRT4577_142854C.1
atgccgtttggtttaaggaatgcgggtgcaacgtaccaacggtgcatgaaccacgtgttcggcgaacacattggccgaacggtcgaggcctacgtcgatgacatcgtagtcaagacgaggaaagcctccgacctcctttccgaccttgaagcgacattccgatgtctcaaggcgaaaggcgtgaagctcaatcccgagaagtgtgtctttggggttccccgaggcatgctcttggggttcatcgtctccgagcggagcatcgaggccaacccggagaagatcacggccatcaccagcatggggcccatcaaggacttgaaaggcgtacaaagagtcacaggatgccttgcggctctgagccgtttcatctcgcgcctcggcgaaagaggcctgcctctgtaccgccccttaaggaaggccgagtgcttcacttggacccctgaggccgaggaagcccttgggaacctgaaggcgctcctcacgaacgtgcccatcttggtgccccccgctgccggagaagccctcttgatctacgttgccgcgaccactcaggtggttagcgccgcgatcgtggttgagagacgagaagaggggcatgcattgcctgtccagaggccagtctacttcatcagcgaagtactgtccgagaccaagatccgctacccacaaattcagaagctgttgtacgcggtgatcctaacgcggcggaagttgcgacactacttcgagtctcatccggtaactgtggtgtcatccttccccctgggggagatcatccagtgccgagaggcctcgggtagaattgcaaagtgggcggtggaaatcatgggcgagacgatctcgttcgcccctcggaaggccatcaagtcccaggtcttggctgactttgtggctgaatgggtcgacacccagctcccaatagctctgatccaaccggaactctggaccatgttcttcgacgggtcgctgatgaagacaggagcaggcgcaggcctgctcttcatctcgcccgtcgggaagcacctacgctacatactacgcctccatttcccggcatccaacaatgtggccgagtacgaggctctggtcaacgggttgcgcatcgccatcgagctaggagtccgacgcctcgacgctcgcggtgactcgcagctcgtcatcgaccaagtcatgaagaactcccactgccgcgacccgaagatggaagcctactgcgatgaggttcggtgcctggaagacaagttctacgggctcaagctcaaccacgtcgcccggcgctacaacgagactgcggacgagctggctaaaatagcctcggggcgaacaacgaaggcacccgggggctacacgcacctgttggtcgccatcgacaaattctccaagtcgatcgaggtccgacccctaaacaacatcatgtctgaacaggcggtggcgttcttcaccaacatcatccatcgctttggggtcccgaactccatcatcaccgacaacggcacccagttcaccggcagaaagttcctggacttcagcgaggatcaccacatccgggtggactgggccgccgtggctcaccccatgacgaatgggcaagtagagcgtgccaacagcatgatcctgcaagggctcaagccgcggatctacatcgacctcaacaagttcggcaagcgatggatgaaggagctcccctctgtgtccctacgacgctaccacacccgaggggttcggtcccgagacctccaggtgggcgacctggtgcttcggctgcgacaagacgcccgagggcggcacaagctcacgcctccctgggaagggccgttcgtcgtcgccaaggttctgaagcccggaacgtacaagctggccaacagtcaaggcgaggtctacagcaacgcttggaacatccgacagctacgtcgcttctacccttaa

SEQ ID NO: 46980 - DNA, 761 bp, Zea mays
  unsure (1)..(761): unsure at all n locations
  Clone ID: MRT4577_142855C.1
accaccggttcttctcagacgacctatggccnntttaccagccaactggaaccaatgggcggaaccacaaccactgcgagcgccgagatcgcaggaaagctcctcatctcccccatcgatgctgctcgggcggggagaagtgtcctctcatggtggttgaggagaccaatctgcgtcgccagtccctgcgactgcttccatgtggtggtcttggctcctagggcggtatgctcgttgtggttggcgagatgaacaaccacacgactggaacaagcaatggcggatccgaggatgcggcagccggggacgcgaccaggaggaacactagatgcccaaatatacttagggagttgttgccaaacaattatcaaaagtgagacaaagcaacatttctcttggaggttattgaatatatatacgttttttcaagagaaagtgcaaaaatacgaggcaacattcccagaatggaaccaagaaaatgcaaagatgcttccatgggtaattgcttctttctccaaagtcgcaatgcttgctactactgtcaggaaatgaacagtcaattcttgattttctgtgtctagatgtagttttacattcttgtagtcaaatatgtattttcgatcattctagaaaatgcacatgcaagtgtttgttgctataaatgcatttgcttagccgagntgttaatgttgtatcaatagttttcaatcaccatcttatgcatggcttgttatttgaaaaaaaaaaaaaaaaagggccct

SEQ ID NO: 46981 - DNA, 741 bp, Zea mays
  Clone ID: MRT4577_142856C.1
atgccgtttggcttgaggaatgcgggtgtgacgtaccagcggggcatgaaccatgtgttcggcgaacacattggccggacggtcgaggcctacgtcgatgacatcgtagtcaggatgaggaaagcctccgacctcctttccgaccttgaagtgtcattccgatgtctcaaggcgaaaggcgtgaagcttaatcccgagaagtgtgtctttgaggttccccgagacatgctcttggggttcattgtcttcgagcggggcatcgaggccaacccggagaagattgcggccatcaccagcatggggcccatcaaggacttgaagggcgtacagagagtcatgggatgtcttgtggctctgagccgcttcatctcgcgcctcggcgaaagagcacctcgagcccttattggaaacgccttccgacaaggtttctactggccgacggtggtggccgacgccactagaattgtccgcacctgcgaagggtgtcagttctacgcgaggcagacccacctgcccgctcaggctctgcagacgatacccatcacctggccttttgctgtgtggggtctggacctcgtcggccccttgcagaaggcacccgggggctacacgcacccctgggaagggctgttcgtcatcgccaaagttctgaagcccggaacgaacaagctggccgacagtcaaggcgaggtctacaccaacacttggaacatccaacagctacgtcgcttctacccttaa

SEQ ID NO: 46982 - DNA, 352 bp, Zea mays
  Clone ID: MRT4577_142857C.1
acaccctatagtgagtcgtcataccggctgagcaggacatggtcaccgaggacagcctccccggaaggaacaatctcatcgtggttttcattgacactctcagcatggacgttcctctaccttctcctcctcggacaatattatctgaacgtctgcgacgtcccggactagatcatccctgacgacagtcgcattctcctgaaggcctggtcgctacgccaccagagctgctactggaagctcaaaaacgagttcgtcccggagaggttcctcaccgggagatatagccggcggcatcgagctcaagactaagcagttccaattccggtctttcatatcttccctgatgatc

SEQ ID NO: 46983 - DNA, 2778 bp, Zea mays
  Clone ID: MRT4577_142858C.1
atgggcagtctccagcaacctctccaacccgggacggtgctccgttttgggagtcttgagttcctgtccctcgacgacagctacgacatgatactccttctcccgccgcgcgacagcgacaatggcggtcgacaacccacccgccggcggagaaatcgacgacgccttccccacatggtggaaggacgacattcgggcttgtcccgtcctctcccccaccgatggaggaggaagcagggcaaccaaggccaagcgggagacgacacctcgttggctgtcgagcgagtcgatggtgccggtgccccaacggggagagcgtcgggcatcgacctcgcgtctgagacgaagacgagcaccgtctccccgcaacacatcaacctcaagcaaacggacgacgccagcatgctcgcgaaggacttgctgggcgtcaccctcgtacctgagacgacggtgcagtcagtcattgatgtgacttcgtcaccgcccgtcgaccaaaaggtaccgaccgattcccatctcacgtcttttggattcggcctcgacccgccaagcaactccgcttcggtggacactctcatagaggcaagtccaaaccctctggggtatcgtgtgcggtcaccctgggaccggctgacggccaactcgacctacgggccctcggggtccgaggaagatggcgagcccgacctctgttgggatttctccgaacttggtaaccccagtgccatgcaggacttcatgaccgcatgcgactattgcctttccgactgttccgacggtagccacagcctcgacgacgaggactgcggcccaagtcgcgaatgtttccacgtcgatctagggggtcccggcgaaggcaaccatcttggtatgccggagaacagtgatccccctaggcccgtgcctcgcgttgacatccttcgggagctagctgtggtccccgtcccggcggggggtcctgacccacagctcgagcaaatccgcgagatgcaggccaggctcgacgagggagcaggaacgcttgtgccgatctaccgggacatcgggcaggaatgggcgggccaacctccggccggagaagcacgtcatctccccctgggcatccagcaccgcatcgccgacaacgtcagggtaaggccgccacctatttccagtggagtcggccagaacctggctgcagcggcagtacttctccgcgcgatgccggagccatcaaccaccgagggtcgacgtatccagggagagctcaagaatctcctggaggacgccgcgatccgacgggccgaaagctctgcctcccgaaggcaggggtacccctcggaacatcgcgccgcgacttcccgattcatgcgggaaacctcggtccactccgggcgcacgcgcaacacagcgcctgcggccccgggtcgcctcggcaacgagcaccatcactgcagccgtcgggcacacctcgacgagagggtacgccgaggctaccaccccaggcgtgggggacgctacgacagcagggaggatcggagtccttcgcccgaaccacccggtccgcaggctttcagccgcgccatacgacgggcaccgttcccgacccggttccgaaccccgactactatcacaaagtactcgggggagacgagaccggaactgtggctcgtggactatcggctggcctgccaactgggtggaacggacgatgataatctcatcatccgcaacctccccctgttcctctctgacaccgctcgaacctggctggagcacctgcctccggggcagatctccaactgggacgacctggtccaagccttcgccggcaatttccaaggcacgtacgtgcgccctgaaaactcctgggatctccgaagctgccgccagcagccgggagagtctctccgggactacatccgacgattctcgaagcagcgcaccgagctaccctacgtcaccgattcggatgtcatcggcgcgttcctcgccggcaccacctgccgcgacctagtgagcaagctgggtcgcaagacccccaccagggcgagcgaactgatggacatcgccaccaagttcgcctttggccaggaggcggttgaggccatcttccggaaggacaagcagccccagggccgcccaccggaagatgttcccgaggcgtcaactcagcgcggcaccaagaagaagggcaagaagaagtcgcaagcgaaacgcgacgccgccgacgcggaccttgtcgccgccgccgagtacaagaaccctaggaaacctcccggaggtgccaacctcttcgacaagatgctcaaggagtcgtgcccttatcatcaggggcccgtcaagcacaccctcgaggagtgtgccatgcttcgacgccactttcacaataccgggccacccacggagggtggcaaggccctcgacgacgcgaagaaggaggatcataaggcgggagagttccccgcgagtggtccgtttcgaggaacctaccacgcagtactggggaggccatgctacgccaagttcatggccgtccccaactacacctacctcaagctcaagatgtcgggccccaacagggtcatcaccgtcgggcccacgtaccgacacgcgtacgaatgcgacgtggagtgcgtggagtacgccgaggccctcgccgagtccgaggccctcatcaccgacctgaagagcctctctagggaggcgccagacatgaagcgccacgccggcaacttcgaggcagcggagacggtcaagtccgtccctctcgaccccggcaacgacgcctccaagtag

SEQ ID NO: 46984 - DNA, 371 bp, Zea mays
  Clone ID: MRT4577_142859C.1
ccctatagtgaggtcgtattatacatagcagacgagcataacatggtcagcgagaacggccacacgggaagggacaatgtcatcgtggtttccattgacactctcagcatggacgttcctctacttctcgtcctcggacaatattatctgaacgtctgcgacgtcgcggactagatcatccctgacgacagtcgcattctcctgaaggcctggtcgctccgccaccagagctgctactgggagctccaaaacgagttcgtcccggagaggttcctcagcgggaatatagccggcggcatcgagctcaagactaagcagttccaattcctgtctttcagatcttccctgatgatcttcctcggcgtcaaatc

SEQ ID NO: 46985 - DNA, 844 bp, Zea mays
  unsure (1)..(844): unsure at all n locations
  Clone ID: MRT4577_14285C.1
aattcggcacgaggaaaaaatttgctgcatcgctcgcgtcgcaccggccaccgttcacccctgacccccatttcgttccttccagatctccccgccccgcgtctcgcccgccagcgaccggcgagggggcgcgcgcccgccgccgccgcgatgtacctggcgtacgggtggccgcagtcgatcccgctgggcccggacgactcggaccgcgtggtcctcctccgcgtgctcggccgcctcctcctcgccgtctgcccggcctcgctccacctctggtccgccgcccaacaccgggtccgcctcgcccgctccgaccgctctccggagtctctctccgcccacggctacaacgcgcacgccgtgtggagccccgacgccaagaccgtcgctgtcctgacctcttccttctacctctacgtttacaaggttcagcacttggggaagcaactgatcgtcggtggcaagcaggtcccggggctttgcctggctagcatatccctaatcatcaccgagaaggttcctctcgccaatggcgttgctataacgagcaatttcgtgtgtgacaacaaaagcatgctcctcggactatccaacgggcatgtgcaggtcatgtcctggaacgctgagttctcagacagcttcaagcttggttgctctgtgtgttcgtctgagaaacctactgctgtcatagatgcgttggtgtttgatcctcccagtttgcgagataactctaacgcaaggcctgctccttgctgcacaggcaattcttctattgtccatgttgagctgtcggtgaagctgaggttgctggttgctttgtactcangctgtcgcattgccctct

SEQ ID NO: 46986 - DNA, 1158 bp, Zea mays
  Clone ID: MRT4577_142860C.1
atggcgcaccggacagtccggtgcacaccggacatgtccggtgcccccgccacgtcatcagtgccgttggaaattgaccgttggagttctgacttctgggcccgccttgatgtccggtggcgcaccggacatgcactgttcactgtccggtgcgccggcatgggcgactctgacttctgcgcgcgctgcgcgcgcattaaatgccgtcgcagaattatccgcacctgcgaagggtgtcaattctatgcgaagcagacccacctgcctgctcaggctctgcagacgatacccatcacctggccctttgctgtgtggggtctggacctcgtcggccccttgcagaaggcgctcgggggctacacgcacctgctggtcgccatcgacaaattctccaagtgggtcgaggtccgacctctgaacagcatcaggtccgagcaggcggtggcgttcttcaccaacatcatccatcgctttggggtcccgaactccatcatcaccgacaacggtacccagttcaccggcagaaaattcttggatttctgcgaggatcaccacatccgggtggactgggctgccgtggctcatcccatgtcgaatgggcaagtagagcgtgccaacggcatgattctacaagggctcaagcctcggatctacaacgatctcaacaagttcggcaagcggtggatgaaggaactcccctcggtggtctggagcctgaggacaacaccgagccgagccacgggtttcacgtcgttcttcctcgtctacggggccgaggccgtcttgcccactgacctggaatacggctccccgaggacgagggcctacgacgatcaaagcaaccaagctagccgagaagactcgctggaccagctggaagaggctcgagacaaggccttactacactcggcgcggtaccagcagtccctgcgacgctaccacgcccgaggggtccggccccgagacctccaggtgggcgacctggtgcttcgactgcggcaagacgcccgagggaggcacaagctcacgcccccctgggaggggccattcgtcatcgccaaagttctgaagcccggaacgtacaagctggccaacagccaaggcgaggtctacggcaacgcttggaacatccaacagctacgtcgcttctacccttaa

SEQ ID NO: 46987 - DNA, 1488 bp, Zea mays
  Clone ID: MRT4577_142861C.1
atgtcacaggaggcaccatcattaccctaccctaagctgactcaggctacggggaacaagaccggcgtcccatctggctcgctccgggaactcctgggaaactcctgggatctccgaagctgccgccagcagccgggagagtctctctgggattacatccgacgattttcgaagcagcgcaccgagctgcccaacatcaccgattcggatgtcatcggcgtgttcctcgccggcaccacctgctgcgacctggtgagcaagctgggtcacaagacccccaccagggcgagcgagctgatggacatcgccaccaagttcgcctctggccaggaggcggttgaggccatcttccggaaggacaagcagccccagggccgcccaccggtagatgtccccgaggcgtcaactcagcgcggcgccaagaagaaaggcaagaagaagtcgcaagcgaaacgcgacgccgccgacgcggaccttgtcgccgccgccgagtacaagaaccctcggaaacctcccggaggtgccaacctcttcgacaagatgctcaaggagccatgcccctatcatcaggggcccgtcaagcacacccttgaggagtgcgccatgcttcggcgtcactttcacagggccgggccacccgcggagggtggtagggctcgcgacgatgataagaagaaagatcacaaggcaggagagttccccgaggtccgcgactgcttcatgatctacggtgggcaagtggcgaacgcctcggctcgacaccgcaagcaagagcgtcgggaggtctgctcggtaaaggtggcggcgccaatctacttagactggtccgacaagcccatcaccttcgaccaagacgaccatcccgaccgcgtgctgagcccggggaaatacccgctcgttgtcgaccccgtcatcggcaacgtcaggctcaccaaggtcctcatggacggaggcagcagcctcaacatcatctacgccgagaccctcgggctcctgcggatcgatctgtcctcaatccgggcaggcgctgcgcctttccacgggatcatccccgggaaacgcgtccagcccctcggacgactcgatctacccgtctgcttcgggacaccctccaacttccgaagggagaccctcacgttcgaagtggtcgggtttcgaggaacctaccacgcagtgctggggagaccatgctacgccaagttcatggccgtccccaactacacctacctcaagctcaagatgctgggccccaacggggtcatcaccgtcggccccacgtaccgacacgcgtacgaatgcgacgtggagtgcgtggagtacgccgaggccctcatcgccgacctggaaagcctctctaaggaggcgccagacgtgaagcgccacgccggcaacttcgagccagcggagacggttaaatccgtccctctcgaccccagcaacgacgcctccaagcagatccggatcggctccgagctcgatcccaaatag

SEQ ID NO: 46988 - DNA, 376 bp, Zea mays
  Clone ID: MRT4577_142862C.1
acaccacgcgccctctagaagcatgctgcaccggccgacaccgtgatgcatatctcgctaattatgcctcgcatcgacgacaccatgtataaaccaagtgcggtcttccttacggatgccggcgcccataacctgcatgagcttgcccgtatagacaacatcttcgcctcgcacaaaggctgtgacgctcgttccaccgctcgagacaccgccccacatgaatgaccatcaagagatcgacttagccccgcgaatgcgaactgttccagataggccacactgcaagtacaggttctcaaaggcaaatcgcagcacactgtcggacgctactagcgtacccgatctagatgaccagcttggcgtaatcacggccata

SEQ ID NO: 46989 - DNA, 651 bp, Zea mays
  Clone ID: MRT4577_142863C.1
attgggtacctcgaggccggccgggaaaaaaattcaaaaaaaaaaaaaaaaaaaaaaaaaaaaaaaaaaaaaaaaaaaaaaaaaaaaaaaaaaaaaaaaaaaaaaaaaaaaaaaaaaaaaaaaaaaaaaaattccccggcctttttcgaaagccccggaaacaaaagcccgctttcgcggcggcggctttgggaatccccgaaggggcaaaaaattgtttacggggttcaagggcccaaccccgggaagggccaagggtttcgccccaaaaaaaagggtgggggccgcccccaacacaaaccgggggggggggttaataaggggaaagggggccccaatgggtttcttcgggcgggaaaggccccccctaagggctttaaagcccatctggtggggggggggttccgggttaagggacttcaactgggggacccgcgcccaaggggggggaaaaacgtcaaaaattaacccctttcccaaggccgtcccaagggggttcgcccccaacaacaaaaagaacttcaacagggcccccaaaaagggggtaagggaatttttccccgggaaaaacggaccctttttggtggcaaacccaaggggttgaaacccaaaaaatttcgggggtcggggcccccgcccaagtttcaaaaa

SEQ ID NO: 46990 - DNA, 2982 bp, Zea mays
  Clone ID: MRT4577_142864C.1
atggtgctccgcttcgggggtctcgagttcatgtcccttgacggcagctacgacatggtactcctccccccgcagcgcgacagcaacaacggtcgtcggctcgcccagcagcggagaactcgacgacgacttccccccgtggtagaagaggaacactcgggtttgccccaccaccctcctcgccggaggaggaggagacggggcaaccgtggccatgcaggaggcggcacctcgtcggctgtcgggccagagcgagtcgacgacaccggcacccctgcgggggccatgtcgggtgttgtcctcgcacctgagacaacgacgggtgtcgcttccccgcaacacgccaaccccaagcggactgatgacgccagcaccctcgcgaaggacttgctgggtgttagcctcgtacctgagataacggtgcagtccgtccctgacgtgacttccccaccgtccatcgaccaagaggtaccgtccatttttcaccctgtcccttttagattcagcttcgatccaccaagcgaccccgcttcggaagacgacgactccgacttcggttgggatttctccgggctccgtgatctcagtgccatgcgagacttcatgtccgcatgtgactactgcctctccggctgctctgacgatgaccacagcctcgacgatgagggttacgacccgagtcgcgagtgtttccacgtcgatcagggggatcacggtggagacaaccaccttggcatgccggaagatgacaacgcccctatgcctgcgtctcgcgttgacatcccgcgggagctagatgtggtcccagtccctgcgggggaatgggcaggtcgagctctcgccggaggagcgcgtcatcgggcccgggacatccagcgccgtatcattgacggtgccagggcagggctgctcccggcctccagcggggtcggcgaaaatctagctgcagcagcgatgctgcttcgaacgatgccggagccatccactaccgaggggtggcgtatccagggcgagctcaaggatctcctggaagatgccgcagtccgactagctaagagctttgcctcccaaaggcaacgatgcccctcggagcatcgcacaacgccctcccgacgtgtacgggaggcctcggtccgcaccgggcgcacgcgggacgggacgcctgcagccccggatcgcctcggtgacgagcaccaccgcctcggggagaagttgggagggacggatgacgacaaccttatcatccgcaacctccccctcttcctctccgacgctgctcgggcatggctggagcatctgcctgctacgcagatctccgaatgggacgacctggtcaaggccttcgcgggaaacttccaagccgtcgagcacaggaacccccggaagcctcctggaggagtcaacacgtttgacaagatgctcaaggagttgtgcccctatcacaggggtcctgtcaagcacacccttaaggagtgcgacatgctccgacgctacttcatcaaggcgggaccctcggcagaaggtggcaaggaccaaggcaacaacaagaaggggggcgacaaggacgaggagttcccggaggtccgcgactgcttcatgatctacggaggacaggtggcgaacgtctcggctcggcaccgcaagcaggagcgtcgggaggtctgctcggtgaaggtagcggcgctagtctacctagactggtcctacaaacccatcaccttcgaccaaggcgaccaccccgactatgtgccgagcccaggaaggtacccgctcgtcatcgaccccatcatcggcaacgccaggctcaccaaggtcctcatggacggaggcagcagcctcaacatcatctacgccgagaccctagggctcttggggatcgatttgtccatgatccgggccggtgcagcgcctttccacgggatcatccccggtaagtgcgtcctgccccttgggcaactcgatttgcccgtctgcttcggaactccctccaacttccgcagggaaaccctcaccttcgaggtggtcgggttccgagggacctatcacgcggtgttgggaagaccgtgctacgccaagttcatggtcgtccccaactacacgtacctcaagctcaagatgccgggccccaagggaatcatcactgtcgggtccacgtacagccacgcttacgagtgcgacgtggaatgcgtggagtacgctgaggccatcgccaaatctgaggtcctcatcgccgacctggattgcctctccaaggaggcgcctgacgcgaagcgccacgccggcaacttcgaaccggtcgaggcggttaagaccgttgccctcggccccagcaacgacgcctgcaagcacgtcaggcagcacctgcgccgctttgatgaagagaagcgcagggccataggcgaggaggtccacaagctgatggctgcagggttcatcaaagaggtattccatccagaatggctagctaaccatgtgcttgtaaagaaaaaaggtgggaaatggaggatgtgcgtagactacactggtttaaacaaagcatgtccaaaggttccctaccctctacctcgcatcgaccaaatcgtggactccactgctgggtgcaaaaccctgtcattcctcaacgcctattcaggttatcaccaaatcaagatgaaagagtccgaccagctcgcgacttctttcatcacacctttttgcatgtattgttatactactatgccatctggcttgaggaatgcaggtgcaacctaccaaaggtgcatgaaccatgtgttcggagaacacatcggcagaacagtcgaggcttacgtcgatgacactcggcatggtatcagcagtctctgcgacgctaccacgcccgaaaggtttggccccgaggcttccaagtgggagacttggtacttcgactgcgacaagacgcctgagggcaccacaagcttactcctccctgggaagggcctttcatcatcaccaagattttga

SEQ ID NO: 46991 - DNA, 215 bp, Zea mays
  Clone ID: MRT4577_142865C.1
taactctggcccctcacctgctccccttctgtccagcccacgggagggcgactagggtaggggcgacggagtcccgcgcctgcaaatcaccatccttccgatcagcgcgagtccaggcgtggtgtgagcgcgccttctcagccgcctctctgcgtcgcttgccgactcgacaatgcagagtctcatctcacaacaatcatacgtactgacgagat

SEQ ID NO: 46992 - DNA, 391 bp, Zea mays
  Clone ID: MRT4577_142866C.1
gccgccgaccgcgcgccgcccaccatgctcttcggagtgcacctcagcgccgcgcgaggcagcaagaggccggcttccccggaggaagaagacgaccagtcgcccacgtcgcctgctgggaagccacggctggcgctggagtgcgccggcttgagcctggccgtcgcggtgccctccgccggcgcctcgtcccctgctagcactagctagctaagctcactcaccttgcgcgcaacctgacgcgcgtttgcatgctgctgcatgcaaacgcaacggcgggcgtggccgttttgttgttctagctctagtttgatcgacgtgttccatttgaaccggtagatccagatgggttctctctcgttgatgtgtctagtgtctttcggttagggtt

SEQ ID NO: 46993 - DNA, 4014 bp, Zea mays
  Clone ID: MRT4577_142867C.1
atggcggaagagcagcatccggctttgtcccgttgccttcctcgccgcaggagaaggaggcggggcaaccgtggccaagcaggaggcggcacttcgtcggctgtcgagcgagtcgacgacgccggcgccccagcgggggacatgtcgggcgtcgacctcgcgcctgagacgacgacgagcgttgtttccctgcaacacgccaaccccaagcggacagattcagcttcgatccaccaagcgatcccgcttcggctcggtaatcctagcgtcatgcgagacttcatgactgcatgtgactactgcctctccgattgttccgatgatggccatagccttgacaacgaaggttgtggcccaagtcgcgaatgcttccacatcgatctaggagtcacaacgaaggcaaccacctggctccggcaaaacatcgggcaggagtgggcaggccgtgcactagccggagaagcgcgtcatcaggcccaggacatccagcgccgtatcactgacgatgccagggcaaggctgcccccggcttccagtggggtcggccagaacctggctgcagcggcaatactactccgagcgatgccggagccatccaccaccgaggggcggcgtatccagggagaactcaagaatcttctggaggatgctgcggtccaacgggccgagagctctgcctcccggaggcaagggtaccccccagagcatcacgccgcgacttcccgattcataagggaagcctcggtccacaccgggagcacgcgggacgcgatgcctgcggccctgggtcgcctcggcaatgagcaccgccgctacgaccgtcgagctcgcctcgacgaaaaggtgcaccgaggctaccaccctaggcgtgggggacgctacgacaacgaggaggattggagcccctcgcccgaaccacccggtcaggaagctttcagccgggccatacgacgggcaccgttcccgacccatttccgagccccgactaccatcactaagtactcgggggaaacgaggccggaactgtggcttgctgactaccggctggcctgccagctgggtggaacgtacgatgacaacctcatcatccgcaacctccccctgttcctctccgatgccgcccgagcctggctggagcatctgcctcctgcgcggtgctggggagaccatgctacgccaagttcatggccgtcccaactacacctacctcaagctcaagatgccgggccccaacgaggtcatcaccgtcggatccactgcgtggagtacgctgaggccctcgccgaatccgaggccctcatcgccgacctgttgtgcctctccaaggaggtgcctgatgcgaagtgccacgccggcaacttcgagccagcagaggcggttaagtccgtccctctcgaccccagcaatgacgcctccaagaagcctctgcgccgtttcgacgaagaaaagcacagagccataggcgaggagatccacaagctgatggctgcggggttcatcaaagaggtattccatcccaaatggttagccaaccctatgcttgtgaaaaagaaaggtgggaaatggaggatgtgtgtagactacactggtctaaacaaagcatgtccgaaggttccctaccctctgcctcgcatcgatcaaatcgtagattccactgctgggtgcggaaccctgtcattcctcgatgcttactcagggtatcaccaaatcaagatgaaagagtccgaccagctcgcgacttctttcatcacaccttttggcatgtactgctatattactatgccatttggtttgaggaatgcaggcgcgacatatcaaaggtgcatgaaccacgtgttcggagaacacatcggcagaatggtcgaggcttacgtcgatgacatcgtagtcaagacgagaaaagcctccgacctcctctctgaccttgaaacgacattcaagtgtctgagggcgaagggcgtgaaactcaatcccgagaagtgtgtctttggagtcccccgaggcatgctcctggggttcatcgtctccgagcggggcatcgaggccaacccggagaaaatcgagaccgtcaccaacatggggcctatcaaagacttgaaaggagtacatagggtcatgggatgccttgcggctctgagccgcttcatctcgcgcctcggcgaaagaggcctacccttgtatcggctcttaaggaagaccgagcgcttctcttggacccccgaggccgaggaagccctcggaaaactaaaggcactccttacaagtgcgcccatcttggtgccccccgttgcaggagaagccctcttgatctacgtagccgcaaccactcatgtggtcagcgccgcgatcgtggtcgagagacgagaagaagggcatgcactgctcgtccagaggccggtctacttcatcagcgaagtgctatccgagaccaagatccactacccgcaaattcagaagctactatacgcagtaattctgacgtggcgaaagttgcgacactacttcgagtctcatccgatcatccagtgccgagaggcctcgggtaggatagcaaaatgggcggtggagatcatgggcaagacaatctcgttcgctcctcagaaggccatcaagtcccaagtcttagcagacttcgtggctgaatgggtcgacacccagctaccaacagctccgatccaaccggaactctggaccatgtacttcgatgggtcgctgatgaaaacaggagcatgtgcgggcctactcttcatctcacccctcgggaagcaccttcgctacgtgttgcgcctccatttcccggcgtcaaacaacgtgaccgagtatgaggctctggttaacgggttgcgcatcgccatcgagctaggggttcggcgcctcgacgctcgtggcgactcacagctcgtcatcgaccaagtcatgaagaactcccactgccgtgaccggaagatggaggcctactgcgacgagattcggcgcctggaagacaagttctacggactcgagctcaaccacgtcgcccgacagtacaacgagactgtggacgagctggctaaaatagcctcggggcggacaacggttcccccggacgtcttctcccgagacctacatcaaccctccatcaagaccgacgacacgcccgagcccgatgaggcctcggccgccgaaggtgaggcactgcacgtcgaggaagagcggaatggggtcatgcctaatcgaaactggcagaccctgtacctgcaatatctccatcgaggagagctccccctcgacaaagccgaagctcggcgactagcgtggcgcaccaagtcgttcgtcttactaggcgatgaaaaggagctctaccaccgcagcccctcaggcattctccaacgatgcatatccatcgctgaaggacaggagctattgcaagagatacactcgggggcttgcggtcaccatgcagcacctcgagccctcgttgggaacgccttccgaaaaggtttctactggccgaccgtggtggctgacgccactaggattgtacgcacctgccaagggtgtcaattctacgcaaggcagacgcacctgcccgctcaggccctgcaaacaatacccatcacctggtcgtttgctgtgtggggtctggacctcgttggtcccctgcagaaggcacccgggggcttcacgcacctgctggtcgctatcgacaaattctccaagtggatcgaggtccgacccctaaacagcatcaggtccaagcagacggtggcgttcttcaccaacatcatccatcgcttcggggtcccgaactccatcatcactgacaatggcacccagttcactggcaagaagttcctgggcttctgtgagaaccaccacatccgggtggactgggccgccgtggctcaccccatgacaaatgggcaggtggagcgtgccaatggcatgattctgcagggacttaagccgaggatctacaacgacctcaacaagttcgacaggcggtggatgaaggaactaccctcggtggtctga

SEQ ID NO: 46994 - DNA, 4323 bp, Zea mays
  Clone ID: MRT4577_142868C.1
atgtcaggcgttgtcctcgcacctgagacaaagacgggtgtcacttccccgcaacgtgccaaccccaagcggactgatgatgccagcaccctcgcaaacgacttgctgggcgttagccttgtacctgagataacggtgcagtccgtccccgacgcgacttcgccaccgtccatcgaccaagaggtaccgtccgttttccaccctgtcccttttagatttagcttcgatccaccaagcgaccccgcttcggtgagcgcctccgcaagggcataccctgaccttccagggtaccatatgtggtcatcttgggaccgactgacggccgtctcaacctccggactcgcgggttccgaggaagacgacgactccgactttggttgggatttctccggactcagtgatcctagtgccatgcgagacttcatgtccgcatgtgactactgcctctccagctgctctaatgatggccacagcctcggcgatgagggggatcacggcgaggacaaccacctcagcatgccgcaagatgacaatgcccccgtgcctgcgtctcgcgttgacatcccgcaggagctagctgtggtcccagtccctgcggggggtcaggacacacagctcgagcaattccgcgagatgcaggccaagctcgacgaagaagcggggcaacttgtgcagctccgacaaaacattgagcaggagtgggcaggccgagcacttgccggaggagcgcctcatcaggcccaagacgtccagcgccgaatcattgacgatgccagggcaaggctgcccccggccttcagtggggtcggccagaatctagctgtggtagcgatgctaatccgagcaatgccggagccatccaccactgaggggcggcgtatccagggcgaactcaagggtctcctggaagacgcagcggtccgacgagctgagagctctgcctcccgaaggcaagcgtgcccctcggagcatcgcgcaacgtcctctgacttatgcgggaggcctcggtccgcaccgggcgcacgcgggacaggacgcctgctgccccggatcgcctcggcgacgagcaccaccgccgcgaccgtcgagctcgcctcgaggagaaggtgcgccgaggctaccaccccaggcgcggaggacgctatgacaatcttcgactgggacgacctggtcaaggccttcgcgggaaacttccaaggtacgtacgtgcgccctgggaactcatgggatctccgaagctgccaccagcaaacaggggaatccttgcgagagtacatctggcggttttcaaagcagcgcaccgagctgcccaacatcaccgactcgaacgtcatcggggcattcttcgctgacaccacgtgccgggacctgcgtggctcaaaaaagaaggccaagaagaaggcgcaagcaaaacgcgacgccattgacgcggatctcgtcgccgctgctgagcacaggaatccccggaagcctcccggaggagtcaacacgtttgacaagatgctcaaggagtcgtgcccctatcacaggggtcccgtcaagcacgacatgctccggcgctacttcgtcaaggcgggaccctcggcagaaggtggcaaggaccaaggcaacaacaagaaggggggcgacaaggatgaggagttcccggaggtccgcgactgcttcatgatctacagtggacaggtggcgaacgcctcggctcggcaccgcaagcaggagcgtcgggagtccgacaagcccatcaccttcgaccaaggcgaccaccccgactatgtgccgagcccaggaaggtacccgctcatcgtcgaccccatcatcgacaacgctaggctcaccaaggtcctcatggacggaggcagcagcctcaacatcatctacgccgagaccctagggctcttggggatagatctgtccatgatccgggccggtgcagcaccctttcacgggatcgtccccggcataccgagggatgtcgccgagcactcgctggatatccgagctggagcccgacccgtgaagcagcacctgcgtcgctttgacgaagagaagcgcagagccataggcgaggaggtccacaagctaatggctgcagggttcatcaaagaggtattccatcccgaatggttagctaaccctgtgcttgtgaagaaaaaaggtgggaaatggaggatgtgcatagactacactggtctaaacaaagcatgttcgaaggttccctaccctctgcctcacatcgatcaaattgtggactccactgctgggtgcgaaaccctgtcattcctcgacgcctattcaggttatcaccaaatcaagatgaaagaatccgaccagctcgtgacttctttcatcacaccttttggcatgtattgttatactactatgccatttggcttgaggaatgcaggtgccacctaccaaaggtgcatgaaccacgtgttcggagaacacatcggcataacggtcgaggcttacgtcgatgacatcgttgtcaagaccaggaaagcctccgacctcctctccgacctcgaagtgactttcgggtgcctgcgcgcaaaaggcgtaaaactcaatctcaagaagtgtgtctttggagtcccccgaggcatgctcctggggttcatcgtctccgaaagaggcatcgaggccaacccaaagaaaatcacagccatcaccaacatgggacccatcaaggatttgaaaggagtacaaagggtcatgggatgccttgcggctctgagccgcttcatctcgcacctcggcgagaaaggattacccttgtaccgcctcttaaggaaggccgagcgcttcacttggacccccgaggccgaggaagccctcggaaacttaaaggcgctccttacaaatgcgcccatcttggtgccccccgctgcgggagaagccctctttatctatgtagccgcaaccactcaggtggttagcgtcgcgatcgtagtcgagagacgagaagaggggcatgcactgctcgtccagaggtcggtctactttatcagtgaggtgctatccgagaccaagattcgctacccacaaatccagaagctactgtacacagtaattctgacgcgacgaaagttgcgacactacttcgagtctcatccggtgattgtggtgtcatccttccccctgggagagatcatccagtgccgagaggcctcgggtaggatagcaaaatgggcggtggaactcatgggcgaaacaatttcatttgcccctcggaaggccataaaatcccaagtcttggcggacttcgtggctgaatgggtcgacccccaattgccgacagctccaatccaggccgaactttggaccatgtacttcgatgggtcgctgataaaaacaggagcaggcgctggctttctcttcatctcacccctcgggaaacatgtgcgctacgtgctgcgcctccattttctggcatcaaacaacgtggccgggtacgaggctttggttaacgggttgcgcatcaccgtcgagctatgggttcggcgcctcgacgctcggggtgactcgcagcttgtcattgaccaagtcatgaagaactcccactgtcgcgatcaaaaaatggaggcctactgcgacaaagttcggcgcttggaggataaattccacgggctggaactcaaccatgttgctcggcggtacaacgagactgcggatgagctggctaaaatagcctcggggcgaacgacagttcccccggacgtcttctccagggacatatatcaaccatccatgaaactcgacgacgtgcacgaacccgacgagtcctcggcccagctcgagaaggcacctgggggcttgaagcacctgctgggcgccatcgacaaattctccaagtggattgagttcactgggaagaagttcctggacttctgcgaagaccaccacatccatgtggactgggccgccgtagctcaccccatgacaaatgggcaggtggagcgagccaacagtatgattttgcagggactaaagccgaggatctacaacgacctcaataggtttggcaagcggtggataaaggaactaccctcggtggtttggagtctgaggacgacgccgagccgggccacgggtttctcgccgttctttctagtctatggggctgaggccatcctatccacggacttagaatacagttccctaaggacaaaggcttgcgacgaccaaagcaaccagaccaaccgagaatactcgttggaccagctggaagaggctcgggacgtggccttactacactcggcgcagtatcagcagtccctgcgacgctaccacgcccgaagggttcgtccccgaggcttctaa

SEQ ID NO: 46995 - DNA, 2788 bp, Zea mays
  Clone ID: MRT4577_142869C.1
atgccgttcggcttgaggaatgcgggtgcgacgtaccaacggtgcatgaaccatgtgttcggcgaacacatcggccggacggtcgaggcctacgtcgatgacatcgtagtcaagacgaggaaagcctccgacctcctttccgaccttgaagtgacattccgatgtctcaaggcgaaaggcgtgaagctcaatcccgaaaagtgtgtctttggggttccccgaggcatgctcttggggttcatcgtctccgagcggggcatcgaagccaacccggagaagatcgcggccatcaccagcatggggcccatcaaggacttgaaaggcgtacagagagtcacgggatgccttgcggctctgagccacttcatctcgcacctcggcgaaagaggcctgcctctgtaccgcctcttaaggaaggccgagtgcttcacttggacccctgaggccgaggaagccctcgggaacctgaaggcgctccttacaaacgtgcccatcttggtgcctcccgctgccggagaagccctcttgatctacgtcgccgcgaccactcaggtggttagcgtcgcgattgtggttgagagacgagaagaggggcatgcattgcccgtccagaggccagtctacttcatcagcgaggtactgtccgaaaccaagatccactacccacaagttcagaagctgctatacgcagtgattctgacacgacagaagttgcgacactacttcgagtctcatccggtaactctggtgtcatccttccccctgggggagatcatccagtgccgagaggcctcgggtagaattgcaaagtgggcggtggaaatcatgggcgaaacgatctcgttcgccccccggaaggccatcaagtcccaggtcttggcgaacttcgtgggtgaatgggtcgacacccagctcccaacagttccaatccaactggaactctggaccatgttcttcgatgggtcgctgatgaagacaggagcaggcgtgggcctgctcttcatctcgcccctcagaaagcacctgcgctacgtgctacgcctccacttctcgacgtccaacaatgtggctgagtatgaggctctggtcaacggtttgcgcatcgccatcgagctaggggtccgacgcctcgacgctcacggtgactcgcagctcgtcatcgaccaagtcatgaagaactcccactgccgcgacccgaagatggaatcctactgcgatgaggttcggcgcctggaagacaagttctacgggctcgagctcaaccacatcgcccgacactacaacgagactgcggacgagctggctaaaatagcctcggggcgaacaacggttcccccggacgtcttctcccaagacctgcatcaaccttccgtcaagaccgacgacacgcccgagcccgagaaggcctcggtcgagcctgaggcaccctcggctcagtccgaggtaccctcggctctgcccgaggcacccttggcccaacctgaggcaccctcggctcagttcgaggtaccctcggctcggtccaaggcaccctcggttcggcccaaggtaccctcggcccccgaggaaggcacccgggggctacacgcacctgttggtcgccatcgacaaattctccaagtggatcgaggtccgacccctaaacagcatcaggtccgaaaggcggtggcgttcttcaccaacatcatccatcgctttggggtcccgaactccatcatcaccgacaacggcacccagttcaccgggagaaagttcctggacttctgcgagggtcaccacatccgggtggactgggccgccgtggctcaccccatgacgaatgggcaagtagagcgtgccaacggcatgattctaccaggacccaagcctcggatctacaacgacctcaacaagtacgacaaacgatggatgaaggaactcccctcggtggtctggagtctgaggacaacgccgagccgagccacgggcttcacgccgttctttctagtctatggggccgaggccatcttgcccacagacttagaatacggttccccgaggacgagggcctacgccgaccgaagcaaccaagctagtcgagaagactcattggaccagctggaagaggctcgggacatggccttacaacactcggcgcggtaccaacagtccctgcgacgctaccacgctcgaggggttcggtcccgagacctccaggtgggcgacctggtgcttcggctgcgacaagacgcccgagggcggcacaagctcacgcctccctgggaagggccgttcgtcatcgccaaagttctgaagcccggaacgtacaagctagccaacagccaaggcaaggtctacagcaacgcttggaacatccaacagctacgtcgcttttacccttaaagcagccaaggctgaccgagccgagggactcctacgcctccgggatacggatacctcactgatcaccttctgcgacaagtaacttgcgctcggataaagcgactccgtggaccgaacaagtcttcacgttcggaagctctcctgccgaagcagtccttcaagctttctcgactaagtcggggacagggcctcatggacgggtgaaagtacgcgtaagcggcaaggccgaccgagccgagggatccccacccctctgggatacggatacctcactcgtcccttccgcgaaaagcaactctcgctcacacaaacatccctgttaccaacagagtccagatgctcgaaacaagaggaaaaaagacgcagcttcgcaagcgcggcgagggtgtgtttccctgcccccggc

SEQ ID NO: 46996 - DNA, 553 bp, Zea mays
  unsure (1)..(553): unsure at all n locations
  Clone ID: MRT4577_14286C.1
naaaaaaaaaaaaaaaaaaaaaaaaaatgataagaaaaggaaaaaaaaaaaaaaaaaaaaaaaaaaataaaaaaaaaaaaaaaaagaaggaccataataaaagggaacaaagttaaattaagggggttatgcgggtggataacttttttttttgggggcaccttaaagttggttcggctgtgcgggtgttttttacgccgggggggggggggaaaacccttggatttcccctttctttatgggccttggggctaattccccgtttccgcccggtttgggtattttcgcacagggggcccacaccgggccgccctttaccaaaaggtgtttaccctgaatggccatttggcccccccctgttgggggccattaacccccgggggtcgttttgttacccccagcgggaccctttcttttgtttgggcccttccccccgctcctttccatttctttcctttttttgtggccacctttggggggtttcccccgcaagccttgaaccgggggccccctttaggggtcccatttaatgctttaggggccctttcccccc

SEQ ID NO: 46997 - DNA, 1580 bp, Zea mays
  Clone ID: MRT4577_142870C.1
aaaacggccagtaattaaattagggactctataaaaattaagaagtagaatgcacgcgtagtaaactggaaatacggctaaggaacaacactcgcgagtcgcgagcacagatcgaacaggcaggcggcctctgtcctctgatctgtcgccattgtctcgttgtgttgtcccggaggagcaggagcaggagcgatcaggccaacgctttggactcctggacctaccccgatggcgccagcctcctctccgatgagacagtaatccagcgagcgcgagtgagaggcaaccagcaaccatgaggccagacacggcggcctccgcctctccgactccgaagaagaaacccgacagtaaagccgcgctggacctcgcgtcgtggagcttcaacgtcaccacgtccgtcgggctcatcatggtcaacaaggctctaatggcgacgtacgggttcacgttcgccacgacgttaacggggctgcatttcgcgaccaccaccgtgatgaccctcgtgttccggtgggtcggcctgagccagccgtcgcagcttccgttaccggacctagccaagttcgtggtgttctccaacctgtccatcgtggggatgaacgtcagcctgatgtggaactccgtcggcttctaccaggtagccaagctgtgcatgatcccggcgtcgtgcctcctggaggtggtcttggaccgcgtgcactactcccgggacaccaggctcagcatcgcggtcgtgctcgcaggagtggcggtgtgcaccgtcactgacgtgagcgtcaacgccagaggcctggtcgcggccgtcgtggctgtctggagcacggctctgcagcagtattatgttcatttcctccagcgcaagcactctctcaactcgttcagcctgctgggccacacggcgccggcgcaggcagggtcgctgctgctggcagggccgttcgttgactacctgctgacagggcaaagggtggaccacttcagcttctcgtctctcgctctgttgttcctcgcgctgtcgtgcttcatcgcgatcggggtcaacctgagccagttcatctgcatcggccgcttctccgccgtgtccttccaggtcctgggccacatgaagaccgtgctcgtcctctccctcggcttcctcttcttcggcaaggaaggcctcagcctccaggtcgtcgtcgggatggccctcgccgtcctcgggatggtgtggtacgggaacgcgtccgctaaaccgggcggcaaggagcgccgcggcaaagacctgccggtgagcctcaaacaagacaaggacgacactgacaaataatcatttgttatagttacaggtatacgtgtaatcgtttaatcacatggtgcaattgtttgccaaatcattgaacaatttcctgtggtatacgtgtgtgtgtgtgtgtttgcctttgccaaaacattgaacgatttggtttgtaaacgcgtacaaggtgtggagccttcaatcgcacacccacagcatggcataaaagtggtaaaaaaaaaaaaaataaagggcggccgacgaagagtgagctcgtaaacccaagaattaattccggaacggt

SEQ ID NO: 46998 - DNA, 771 bp, Zea mays
  Clone ID: MRT4577_142871C.1
gacgtcgtcaaggcgctgctggagctcggcgccgccgacgtcaactgccgcgccggccccacggggaagaccgcgctgcacctggccgtcgagatggtgtcccccgacatggtgtccgtgctcctcgaccaccacgccgaccccagcgcccggacgctggacggcgtcaccccgctcgacgtgctccgcggcctcacctccgagttcctcttcaggggcgccgtgccggggctcacgcacatcgagcccaacaagctgaggctctgccttgagctcgtgcagtccgcggtgatggtgaccacgcgcgacgacgacgccggggcagggggaggaggaagcgatgccgccgacgacagcttggtgagcctcaccatgaactccacgctcatgtaccagggccaggagatagcgggggcgatggccggcgaggccaggaaagggagcggcggcggccgagggagcccgtccaacttgtacttccccactgccttcccataataagtatttagtttccttcatcaagcaagcaatgccttttgttttcatacatatatgcatccatccatccaaagatgatggatcttcaatttcgttgtattagatttttaatctgcattgtgatgtgaggatgcatgatggtggtgtggctagctagatactaatgcaagaatttcatggtatttgatgtggattaattgttccatgcatcttagtacatgtaaatgatccgtctattggtctgggcagcaactgttttactttactttgttc

SEQ ID NO: 46999 - DNA, 336 bp, Zea mays
  Clone ID: MRT4577_142872C.1
ctaagcaattaatacatacatactttgttccaaaaattctactccacacctaccggcgggtcttatcactcgccatggctccctccaccgatccccattcgctcgacaattacaacctactcacgcatctcttctaccactccacatacttctatccctctaaaatactcactcccaacatcaactacctatcaacacatctttaactaattcaataccacaccttcaacattattaacatccctaccaatctcactcacaacttacaactcccctaccattcctaaaacaccaactactagatttacattccaatattaccacctacaactactc

SEQ ID NO: 47000 - DNA, 826 bp, Zea mays
  Clone ID: MRT4577_142873C.1
cattgaatgtctcgaggccggctgggagtgtcgaacgccgacagggaaaaaacgaacgcccagagcgccggccatccgaccatccctcccttcgcccgttcgctgggctccgatctatacgccgccccaagcccgacggcccccaccgtccgacctaaaccaataatacggcgaaattgctgccaccgcaactcctttccgacccgacgtgcatagcgccccggctaccgccgttcgcttccgactcgatctccacagctccgacccgaccgccgcatctccactcttactcgaaggtggaggtctccttcagccgccttctacgtcatcgcaactgccggggtcggtggctgcctcgagcaccgtggcacctcacggaaccttacagtttcgtggacttctgttgcgaacaaacatggagaaaagatatctgtgatctcaactgaaatatggagccagtcaaactagttgaggggtacaactttgatgaccatactacaagtgatgtccgtgtttgctttaaactgattgatgagcagccggaatggttttcctgccactcatctgttctttcccaaaacagcaagtatttttcagatcggcttggtcaaaatgatattcgttctaatagttgcgttgaaattgagtgcccaagagctcagtatgaccattatgtcaagatgttgaagttgatgtatcttcccggggaatcaattgtagattcatttgattctgttaaatcagctctgggtgttcttcgagcatcaaattcactcgatgcgagttggttaccaaaggatgtattgcatacattgaagctgtccca

SEQ ID NO: 47001 - DNA, 389 bp, Zea mays
  Clone ID: MRT4577_142874C.1
gaaccgacgggcgcatgggcaatcagagagcccagaattcctcaccgagaggaatcaccgacaccgaatccggcatgcaccgaggttatgcaattatacacctccatttctgactagcaagggaccgtggagcctggagcccagcaagttgaaaataccgagtaagagcccgctgaaggtgaagaggaggtaccaccgggaagagaaattactacgacgagaactaggggccgactccgagtcagctgctggcgtcggagaaaaataatctaagttcgatttacttacttataggtatgtggaaagaacatttgcgatatggaatagaagaatatgacaatcggctataaacaccgagtgataggatatatagaaccaggtaaccggac

SEQ ID NO: 47002 - DNA, 299 bp, Zea mays
  unsure (1)..(299): unsure at all n locations
  Clone ID: MRT4577_142875C.1
tcgaggcctgncctcctctttctgcgcctgccactcgtccctccttgatcagcgagtcccggagtggaagatccggcctttttagctccttgtggtggttgttggttgtttttggggagttgcaccaccaggaagcggggcaggagagggagtggaggggaagccaagggttggtgggttcgcgctttgcggtggcgtcccgatggactccggcaacagcgggagcctccagtcgtccagcggcggcgacgacgagttcgactcgcgggccggcggcggtggagggggttttttatttt

SEQ ID NO: 47003 - DNA, 1964 bp, Zea mays
  Clone ID: MRT4577_142876C.1
atgtcccgtccctcgccaccgccatggccgacgtcggcgagcctcctccctcgctctgccccttatgcggccaccccgctgccttctccgtttcaccgtcgacgtctgcggcggccagcgtgtcccccgcaaggccgctgctgaagcgaaggaccccacccgaggcgccacctgcggtcgtgagggtggagatcggggatgaggccgcggcgctgcgcgaggcattggcgcggcagcaagcggcgctcgccgacgtccaggcggagctcgacgcggagcgcggggccgcggccggcgccgccagcgaggccatgaccatgatcctccgcttgcagcgcgagaaggctgaggccatgatggaggcacgccagttccgccgctacgccgaggagaagatggcccacgacgccgccgagctcgcggccctcgaggaggctctctcgaagcgtgaggccgggatgcgggcgctccagggccagacgccccgtcacgcctgcgccgtgccgtcggggggctccaccccacgacgcccctctgtggccacgccgcgccacccaccctcctcgctgtcccccgcggcgtcgtccggaggagggtactacccgcctctgcggtgcagcatcgaccacccgcccaccgcgtccgaagcagacgcgctcgagacaccgcgcgaccagctcaaccacctcgcccaccgcgtccacctcctcgagcgcggcgcgaccccgatggccgccaccaacaccacgcccatcatccgtgtcgcgccggggtctgccttcccgcaccatgcacgggcctactcggacgacagccttgacttgtacgatggtggcgactgcttcccggatgacgattgcggcgccagcgaccgggtatacaccgtggacgccattcatggggcacccctggcggttcctgagggctcctacgccggtagcacgcccatggggagcgactgctacggcggcgctccgtgggcagaagacgaggaggtgcgccgcctcagcgtgcggatgcaggcgttggaggcagaccgtgagtccatgaggcaagccatcatgtccatgggagccgagaaggcgcaggtgatgctgctcaaggagatcgcgcagaagctctgcaaggacgcgacaccaccggttccagcggcagcagtggctcagcacagcttttacaaagggggcaacacacagccggccatgaccatcactgtgcgaccaccacggcacccggctttgcttatgcaaaggaaactggtgaagaagaagccatcactccttgctgcagtggtcaagtgggttacatcaatcatgtggtggcgaaggaaatcatcccgcgtcaagttccctattgggcagtgcggcaacaacgtggggctgcttctgctgctcgacaaggctcccagggcaggccacgggcaccagaggcctcccaagaggatctaaccaccaaatgagtcatctgtttgtgaagcaaacacatgactgggcttccgcattgttgttctcgcgttcttctattcaccgtgtctggtgatgtagctttcacatatggaaaccatttttttctcatgtaggatataccacctgagcattgtacgttgtgtgttcatgggacttcaatcaccagaagttgactcagatcttagaatcgatcatatggaattgacgttcatggcaattcgccgctgaatactgttgttgggtgtcatttgagcaccatattcaacttgtcagtaaatacatggtttacggtttcatgatggttttttttgggtggggtgggggattttgaataggcaattaccagggtagttcttggtttcatgattgtttgggggatgctgattttgaataggcaattaccagggtagtggaacttaggctatccgcaacggtgtcctctaaattttccctctatatgctacaatgcagtcacatcaacaagatttcttccccttt

SEQ ID NO: 47004 - DNA, 303 bp, Zea mays
  Clone ID: MRT4577_142877C.1
attatttttttttttttttttttttttttttgggggggtttaaaccaggatccatgataagataccaagcaagcgaagacgaccaacttgtccaaagctgtttgttccacgggggggacgaccaactacaaaggggggtctcataggttgcctggacccagggaaaagcaacggcccatggggtacagagttcaaacaacaaagccgaaaacgctaggcaactgggctctactactagggggaccgggttctcacacgaagggcccgtcaacaaacttgaaggcagggccgcgcggggtgcct

SEQ ID NO: 47005 - DNA, 285 bp, Zea mays
  Clone ID: MRT4577_142878C.1
tcgctctcgggcaggtctgcctctgcccgggtcttcgccttcctcttccagtccccgcgcgcgagatcgccgccccgtgtgggccctagatcccgatggccttgcgccgacgaccctgctcaaggtcatcatactcggcgatagtggggttgggaagacttccttgatgaaccaatatgggaacaagaagttcagcaatcagtacaaggctacgattggggcggatttacttaccaaggaggtgcaattcgagggcaggctcttaactctgtgaatatgggacac

SEQ ID NO: 47006 - DNA, 371 bp, Zea mays
  Clone ID: MRT4577_142879C.1
ggaaaaagggaacaagccggggggttctttccgggggggggggataaaaaacaatttccccggagataaaatcccgtttcacgggaaatcgaatccgggttcccgggagatcgaattggtaggggaaaagggttcaaattcaaaaaaaaaggggggtgggcccgggaaactttccaccttcttggaactgggggggaaaatttcaacaaggttggcatgcagcgcaccttttggaaccaaaacccccccccggggggggatgattttccccgaggttggggcaactgcaaaaaccaacgggtttccactccaagaaagggggggaccaccgggcttccgggcccaaattaccccaacaggggggtcccaaa

SEQ ID NO: 47007 - DNA, 205 bp, Zea mays
  Clone ID: MRT4577_14287C.1
tatatggatgatttaaaatgtattcttcacaacttgggatatcctgcactatggagggccatgtacctctaggcccaagacgggatcgcggagagcgtctccccaaaggacaagctcatcatctatcccatgttcgtgaagatagctgacacgtaatctggcacaggttgcgcctcgtgagccactcgaagttgaactacgctat

SEQ ID NO: 47008 - DNA, 445 bp, Zea mays
  Clone ID: MRT4577_142880C.1
caaacgctttcagatgttgatataaatattattgctttggcttacatgttataagcggggaggcatgggactagccatttgcgagagcaccctcctcctctgaaaattctcgaatacttcctctgaagaatattgagtcaagatatcttcatgtgtgataccaacagtctttgtggggcacaagaggatatagagctctagccatcaaagaaggatgcacctgttgcatgggaagacgatgagaacgatgtacgttggatgcatgctattagccgtagaatgcacagaagatatttgcataggaaggcaaggcgtgatgccctcaaggaattttgacaaaatttttgagacaagttctgttggtccaataatccgatgatgataaaaattctctctgaaaatagtggattggagcatggtctgactttcaactgatggccctttc

SEQ ID NO: 47009 - DNA, 254 bp, Zea mays
  Clone ID: MRT4577_142881C.1
aggctactccctgagaggacactgtgctcacgtggcctgcttcggctgtcaccaccgcgccgactcactggggctcaccgtatcacaccagtcgctcgcgcatcgtcccgtcacgcccccgcggcccacagacaccacgcccgggcggcataacgccagcttcgtgacctgacgcggcgcgccacccgaggtcacatacgcaaaaataccgccatagatggttccggccatgcgcagctcgtcgttaacgttca

SEQ ID NO: 47010 - DNA, 510 bp, Zea mays
  unsure (1)..(510): unsure at all n locations
  Clone ID: MRT4577_142882C.1
agagttctcctcaggaacttcctaagaatacttcacaaatagtcttgagaatactgcatcgagtgtcaaatggaagcagcagatgaggagaggccactgctgaaccgccatcgccggcctgcacagacacaggacgaaagctcaagttatacaagtgatggaacggttgatatctacagacagcctgctctcaagcagagcactggcaactggagagcatgcttcttcattctaggcgccgaattcagcgaatgcatgtgcttcttcgccgtcgccaagaacttggtcacctaccttacgacggtgctccatgagagcaacgtcgacgctgcgaggaacgtgtcgacttggatcggcagctgcttcctcacgccggtcatcggagccttcttggccgactcttactggggaagatacaccacaattgcagttttcctgtcggtttacatcgttgggatgctcatcgtgacatcatcggncggcgcttccgtttctccttcctcgttcctc

SEQ ID NO: 47011 - DNA, 723 bp, Zea mays
  Clone ID: MRT4577_142883C.1
aacatctgccaccgactccccccaatggcgggctaccgcagcgcctcctcctcctccgcggccggcgccggaggggcggcggtgttcgcgatgcgcgtgctcctcctcctcacgctgctaccgctcgcgctcgccgccttcgccttcgcgctccagtggcgcggcggcatgcgcgaccccaccggcaccgtgtggcccgccgacacgcagcggttccccggcatggagaacagcccactgggctcctcctcatcctccacgggaggccgaggctcctacttcgccgtctcctccgcgtcggcctcctccgcggccgccgactgcgccgagatcctcggccggagcgcctcctcccacggaatctctctctaccgaggctggagcttcgactccgacaccgctataacccccaagatctgtatcacgggaagcacatctgctagcttacaccaaattcttccatggttgtattatcacaaggtcattggtgtttcacactctattctatttgttgaaggagaggctgctaaaccagctgttacttctgttctcgaatctattcggggtgtaaaaattatttacagaactaaagaactaaaagaacaacaggacagaagccgcatttggaatgaaacttggctttcaggtttcttttacaagccatgcaattatgagctttttgttaagcagtcacttaacatggaaatggctattgttatggca

SEQ ID NO: 47012 - DNA, 418 bp, Zea mays
  Clone ID: MRT4577_142884C.1
ggcatgcgcacgcgcgcggcgcgggtcctcttagagggggcccccttctttttctcctttttttttttttcttccaaaaacaaggggggactttttaaacacccaggggccattaaactgatttgcacaccaaaatcatagctctgaaaccaaccaggttttatcagccgacattacttccactagaagtggccaccacaccactttcttatgtaggttaacataggacaggacccatgtctgacgggaagataacccggaatgaacacccttatacacaaggaacgccccctggcccgatcgtagtgaccaaaccagcactggtggctaagatcaagcctttcacttcttcatgatgggggaagcactggtacacgactgtcttgggatgcttggcctcggggtgcttcctgcactt

SEQ ID NO: 47013 - DNA, 375 bp, Zea mays
  Clone ID: MRT4577_142885C.1
tccccaaatccacatacaacccttccccaaaaacttctcaagtttcttcgcgcccaaccttttcttttttgagaagggggctacccacatttcttttttaaaaccctattcaaaaaaccttaactacctaacatacctactgctccacccctataaaatccaaacttatcctcctctcctctttaactattacaacaatattggtccccccaaaatcaaataaattccccggtattctcatacacaaaaacctttaataacccttattttcaccattttttacactcttttaccaaatctctttttttatatacatgttatattaaaaaaaagccaatacttatcccttttcttaaaattcccccccccttatta

SEQ ID NO: 47014 - DNA, 2226 bp, Zea mays
  Clone ID: MRT4577_142886C.1
atgatctacggtgggcaagtggcgaacgcctcggctcggcaccgcaagcaagagcgtcgggaggtctgctcggtaaaggtggcagcgccagtctacctagactggtccgacaagcccatcaccttcgaccagggcgaccaccccgaccacgtgccgagcctggggaaatatccactcattgtcgaccccgtcatcagcaacgtcaggctcaccaaggtcctcatggacggaggcagcagcctcaacatcatctacgccgagaccctcgggctcctgcggatcgatctgtcctcggtccgggcaggcgcgacgccttttcacggaatcatccccgggaaacgcgtccagccccttggacaattcgatctgcccgtctgcttcgggactccctccaacttccgaagggaaaccctcacgttcgaggtggtcgggttccgaggaacctaccacgcagtactggggaggccatgctacgccaagttcatggtcgtccccaactacacctacctcaagctcaaaatgtcgggccccaacggggtcatcaccgtcggccccacgtaccgacacgcgtacgaatgcgacgtggagtgcgtggagtacgccgaggccctcgccaaattcgaggccctcatcgccgacctggagagcctcttcaagatgaaagagtccgaccagctcgtgacttctttcatcacacctttcggcatatactgctacgttactatgccgtttggtttgaggaatgcgggtgcgacataccaaaggtgcatgaaccacgtgttcggccaacacatcggtcgaacgatcgaggcttacgtcgatgacatcgtagtcaagacgaagaaagcctctgacctcctttccgaccttgaaacgacattccggtgtctcaaggcgaaaggcgtaaaactcaaccccgagaagtgtgtcttcggagtaccccaaggcatgctcttggggttcatcgtctccgagcaaggcatcgaggccaacccggagaaaatcgcggccatcaccaacatggggcccatcaaggacatgaaaggcgtacagagggtcatgggatgccttgcggctctgagccgcttcatctcgcgcctcggcgaaagaggcctacccctgtaccgcctcttaagaaaggccgagtgcttcacttggacccttgaggccgaggaagccctcaggaacctaaaggcgctcctcacgaacgcgcccatcttggtgccccccgctgccggagaagccctcttggtctacgtcgctgctaccactcagaggtcggtctacttcatcagtgaggtactgtccgagaccaagatccgctacccacaaattcagaagctgctgtacgcggtgattctgacgcggcagaagttgcgacactacttcaagtctcatccggtgactgtggtgtcatccttccccctgggggagatcatccagtgccgagaggcctcgggtaggattgcaaagtgggcggtggaaatcatgggcaagacaatctcgttcgcccctcggaaggccatcaagtcccaagtcttggcggactttgtggctgaatgggtcgacacccaactcccggcagctccgatccaaccggaactctggaccatgtttttcgacgggtcgctgatgaaaacaggggcaggcgtgggcctgctcttcatctcacccctcgggaaacacctccgctacgtgctgcgcctccatttcccggcgtccaacaacgtggccgagtacgaggctctggttaacgggttgtgcatcgccatcgagctaggggtccgacgcctcgacgctcgcggcgactcgcagcttgtcatcgaccaagtcatgaagaactcccactgtcgcgacctgaagatggaagcctactgcgatgagaaggcacctgggggctacacgcacctgctggtcgccatcgacaaattctccaagtggatcgaggcccgacccctaaacagcatcaggtccgaacaggcggtggcgttcttcaccaacatcatccatcgctttggggtcccgaactccatcatcaccgacaacggcacccagttcgccggcagaaagttcctggacttctgcgaggatcaccacatccgggtggactgggctgccgtggctcaccccatgacgaatgggcaagtagagcgtgccaacgacatgattctgcaaggactcaagccacggatctacaacgacctcaataagttcggcaagcgatga

SEQ ID NO: 47015 - DNA, 3528 bp, Zea mays
  Clone ID: MRT4577_142887C.1
atgccggagccatccaccaccgaggggcgacgtatccagggagaactcaagaatctcctggaggatgccgcggtccgacgggccgaaagctctgcctcccgaaggcaaaggtgccccccggagcatcgcgcaatgacttcccgactcatgcgggaggcctcggtccacaccgggcgcacgcaggacgtgacgcctgcagccccggatcgcctcggccacgagcaccaccgccgcgaccgtcgagcccaccttgacgagaagggcacatacgtgcgccttgggaactcatgggatctccgaagctgctgccagcagccaggggaatccctgcgagagtacatccgacggttttcaaagcagcacaccgaactgcccaacaccactgactcagatgtcatcggggcgttcctcgccggcaccacttgccgcgacctagtgagcaaactggaccgcaaaactcccaccaaggcgagcgagttgatggacatcgccaccaagttcgcctctggtcaggaggcggtcgaagccatcttccggaaggacaagcagcctcagggacggcagcaggaagacgtccccgaggcgtccgcccagcggggcacaaagaagaaggccaagaagaaggcgcaagcaaagcgcgacaccgctgacgcggatctcgtcgctgctgtcgagcacaggaacccacggaagcctcctggaggggccaacctgttcgacaagatgctcaaggagtcgtgcccctatcaccagggtcccgtcaagcacacccttgaggaatgcgtcaagcttcggtgctacttccataaggccgggcccccggcggaagatggcaaaggccaagacaacaacaagaaagagggcgacaaggaagaggagttccccgaggtccacgactacttcatgatctacggtgggcaagtggcgaatgcctcggcttggcgccacaagcaggagtgccgggagctcaccaaggtccacatggacggaggcagcagcctcaacatcatctacgccgagaccctcgggctcttggagatcgatctgtccacgatccgggccggtgcggtgccctttcacgggatcatccctgggaagcgcgtcctgccccttggacaactcgacttgcccgtctgcttcagaactccctccaacttccgaaaggaaaccctcacgtttgaggtggtcgggttccgaggaacctaccacgcagtgctggggagaccgtgctatgccaagttcatggccgtccccaactacacgtacctcaagctcaagatgccaggccccaacggggtcatcactgtcggatccacgtaccgacacgtgtatgaatgcgacgtggagtgcatggagtacgctgaggccctcgccgagtccgaggccctcatcgccgacctagggaatgcaggtgcaacataccaaaggtgcatgaaccacgttttcggagagcacatcggccgaacggtcgaggcttacatcgatgacatcgttgtcaagacgaggaaagcctccgacctcctctctgaccttgaaacgacattcaagtgtctgagagcgaagggcgtgaagctcaatcccgagaagtgtgtcttcggagtcccccgaggcatgctcctggggctcatcgtctccgagcggggcatcgaggccaacttggagaaagtcgctgccatcaccaacatggggcctatcaaagatttgaaaggagtacaaagggtcatgggatgccttgcagctctgagccgcttcatctcgcgcctcggcgaaaaaggcctacccttgtaccgcctcttaaggaaggccgagtgcttcacttggacccccgaggccgaggaagccctcggaaacttaaaggcgctccttacaaacgcgcccatcttggtgccccccgctgcgggagaagccctcttgatctacgtagccacaaccactcaggtgaagctactgtatgcagtaattctgacagggcgaaagttgcgacactactttgagtctcatccggtgactgtggtgtcatccttccccctaggggagatcatccagtgccgagaggcctcgggtaggatagcaaagtgggcagtggagctcaagggcgaaacactctcattcatccctcggaaggccataaaatcccaagtcttggcggatttcctagcggaatgggtcgacacccaattgccaacagctccgatccaaccagaactttggaccatgtacttcgatgggtcgctgatgaaaacaggagcaggtgctggcctgctcttcatctcacccctcgggaaacatctccactacgtgttgcgcctccatttcccagcgtcaaacaacgtggccgagtacgaggctctggttaatgggttgcgcatcgccatcgagctaggggttcggcgcctcgacgctcatggcgactcacagcttgtcatcgaccaagtcatgaagaactcccactaccacgaccggaagatggaggcctactacgacgaagttcgacgcctggaagacaattctacgggctggagctcaaccacatcgctcgacgcacctcgagccctcatggggaatgccttccgacaaggtttctactggccgaccgcggtggccgacgccactaggattgtacgctcctgccaagggtgtcaattctatgcaagacagacgcacctgcccgctcaggccctgcagacgatacccatcacctggccgtttgctgtgtggggtctggaccttgtcggtcccttgccgaaggcacccgggggcttctcgcacctgctggtcgccatcgacaaattctccaagtggatcgaggcggtggcattcttcacaaacatcatccatcgctttggggtcccgaactccatcatcaccgacaatggcacacagttcactgggaagaagttcctggacttctgcgaggaccaccacatccgtgtggactgggccgccgtagctcaccccatgacgaatgggcaggtggagcgtgccaaaggtatgattctgcagggacttaaaccgaggatctacaacgaccacaacaagttcggcaagcggtggatgaaagagctaccctcagtggtctggagtctgaggacgacgccgagccgagccacgggtttctcgccgttctttctagtctatggggctgaggctatcttacccacagacttagaatacggttccccgaggacaaaggcgtacgatgaccgaagcaaccagaccagccgagaagactcactggaccagctcgaagaagctcgggacatggccttactacactcggcacagtatcaacagtctttgcgatgctaccacgcccaaagggtccggtcccgaggcttccaggtgggagacctggtacttcggctgcggcaagacgcccgagggcgccacaagcttactcctccctgggaagggccgttcatcatcgccaagattttgaagcctagaacatacaagctggccaacgatcaaggcgaggtctacagcaacgcttggaacatccaacaactacgtcgcttctacccttaa

SEQ ID NO: 47016 - DNA, 3282 bp, Zea mays
  Clone ID: MRT4577_142888C.1
atggcggaagagcagcatccgggtttgtcccgtcgccttcctcgccgcaggaggaggaggcggggcaaccgtggccaagcaggaggcggcacctcgtcggctgtcgagcgagtcgacgacgccagcaccccagcgggggacatgtcgggcgttgacctcgcgcctgagacgacgacaagcgtcgtttccccgcaacacgccaaccccaagcggacagatgacgccagcacactcgcggaggacttgctgggcgttagcctcatgcctgagataacagtgcagtccgtccccgacgcgacttcgtcaccgtccatcgatcgagaggtaccgtccattttccaccctgtgccttttagattcagcttcgatccaccaagcgatcccgcttcggtgagcgctttcataaaggcatatcctaaccttccggggtaccatatgtggttaacctgggaccgactgacggccgtctcgacctatgggcccccgggttccgaggaagacgacgagcccgactctggttgggatttctccgggctcggtaatcccagtgccatgcgagacttcatgaccgcatgtgactactgcctctccgattgctctgatgatggccacagccttgacgacgaaggttgtggcccaagtcgcgaatgtttccacgtcgatctagggggtcacgacgaaggcaacctccttggtatgccggaggacgatgatccccctgggcctgcgcctcgcgttgacatcctgcgggagctagctgtggtcccagtccctgcggggggtcaggacacacagctcgagcaaatccgtgagatgcaggccaagctcgacgaggaagcaggacaacttgtgcagctccggcaaaacatcgagcaggactgccgccagcagccaggggaatccctgcgggaatacatccggcgattttcgaagcagcgcaccgagctgcccaacatcaccgactcggatgtcatcggggcattcctcgtcggcaccacttgccgcgacctggtgagcaaactgggtcgcaagactcccaccaaggcgagcgagttgatggacatcgccaccaagttcgcctctggtcaggaggcggtcgaggccatcttccggaaggacaagcagccccagggatgccagcaggaagacatccccgaggcgtccgcccagcgcggcacgaagaagaaggccaagaagaagtcgcaagcgaagcgcgacgctgccgacgcagatcttgtcgctgccgccgagcacaggaaccctcggaagcctcccagaggggccaacctgttcgacaagatgctcaaggagtcgtgcccctatcatcagggtcccgccgggcccccggcggaaggtggcaaaggccatgacaacgacaagaaggagggcgacaaggcagaggagttccccgaggtccacggctgtttcatgatctacggtgggcgagtggcgaacgcctcggctcggcaccgcaagcaggagcgccgacaggtctgctcggtaaaggtggcggcgccagtctacctagactggtccgacaagcccatcaccttcgaccaaggcgaccaccccgactgcgtgccgagcccaggaaagtacccgctcattgtcgaccccatcatcggcaacgccaggctcaccaaggtcctcatggacggaggcagcagcctcaacatcatctacaccgagaccctcgggctcttggaaatcgattgtccacgatccgggccggaaaccctcacgttcgaggtggtcgggttccgaggaacctaccacgcggtgctggggagaccgtgctacaccaagttcatggtcgtccccaactacacctacctcaagctcaagatgtccggtcccaacggggtcatcaccgtcggatccacgtaccgacacgcgtacgaatgcgacgtggagtgcgtggagtacgctgaggccatcgccgagtccgaggccctcatcgccgacctggagtgcctttccaaggaggtgccagatgtgaagcgccacatcggcaacttcgagccagcaaaggcgattaagttcgtccctctcgaccccaacaacgacgcctgcaagcaagtggtcagcgtcacgatcgtagtcgagatacgagaagaagggcatgcactactcgtccagaggctggtctacttcatcagtgaagtgctgtccgagactaagatccactacccgcagattcagaagctactatacgcagtaattctgacgcggcgaaagttgcgacactacttcgagtctcatccggtgactgtggtgtcatccttccccctaggggagatcatccagtgtcgagaggcctcgggagcaggtgcgggcctgctcttcatctcacccctcgggaagcacctccgctacgtgttgcgcctccatttcccggcgtcaaacaacgtagccgagtacgaggctctggttaacgggttgtgcatcgccatcgagctagaggttcggtgccttgacgctcgtggcgactcgcagcttttcatcgaccaagtcatgaagaaatcccactgccgcaaccggaagatggaggcctactgcgacgaggttcgatgcctggaagacaagttctacggactcgagctcaaccacgtcgcccgacggtacaacaagactgcggatgagctggctaaaatagcctcggggcggacaacggttcccccagacgtcttctccagagacatacatcaaccctccatcaagaccgacggcacgcccgagcccgaggaggcctcggcccagcccgaggcaccctcggccgccgagggtgaggcactgcgcgtcgagggagagcggaatggggtcacgcctaatcaaaactggcagaccccatacctgcaatatctccaccgaggagagctacccctcgacaaaaccgaagctcggcgactggcgcggcgcgccaagtcgttcgtcttactaggtgatgaaaaggagctctaccaccgcagcccctcaggcattctccaacgatgcatatccatcgctgaaggacatgagctattgcaggagatacactcggggcttgcggtcaccatgcagcaccacgagccctcgtcgggaacgccttccgacaaggcttctactggccgaccgcggtggccgacgccactaggatttctctgcgacgctaccacgcccgaggggttcggccccgatacttccaggtgggagacttggtacttcggctgcggcaggacgcccgagggcgccacaagcttactcctccctgggaggggccattcatcatcgccaagattttga

SEQ ID NO: 47017 - DNA, 1185 bp, Zea mays
  Clone ID: MRT4577_142889C.1
atggcttcaattagggctcccattgcctatgggggttttgctttggggttttggggagatccccacttagatgtgcatgataagctagggcatgacatccaagtgagcaagttgggtcgcaagactcccaccagggcgagcgagctgatggacatcaccaccaagttcgccactggtcaggaggcggtcaaggccatcttccagaaggacaagcagcctcaggggcgccagccggaagacgtccccgagggtcccgtcaagcacacccttgaggagtgcgtcatgcttcggcgctacttccacaaggctgggcccccggcggaaggtggcagagcccacaacaacgacaagaaggaggatcacaaggcagaggagttccacgaggtccacgactgcttcatgatctacggtgggcaggtggcgaacgcctcggctcggcaccgcaagcaagagcgccgggaggtctgctcggtgaaggtggcggcgccagtctacctagactggtccgacaagcccatcaccttcgaccaaggcgaccaccccgaccgcgtgccgagcccgggaaagtacccgctcgttgtcgatcccgtcatcggcaacgtcaggcttaccaaggtcctcatggacggaggcagcagcctcaacaccatctacgctgagaccctcgggctcctgcagatcgatctgtcctcgatccgggccggcgcggcgccctttcacgggatcatccccgggaaacgcgtccaaccccttgggcaactcgatctgcccgtctgcttcgggactccctccaacttccgaaaggaaaccctcacattcaaggtggtcgggttccgaggaacctaccacgcagtactggggagaccatgctacgccaagttcatggccgtccccaactacacctacctcaagctcaagatgtcgagccccaacggggtcatcaccgtcggctccacgtaccgacacgcgtacgaatgcgacgtggagtgcatggagtacgccgaggccctcgccgaatccgaggccctcatcgccgacctagagagcctctccaaggaggtaccagatgcgaagcgccacgccggcaacttcgagccagcagaggcggttaagtccgtcccactcgaccccagcaacgacacctccaagcagatccggatcggctccgagctcgaccccaaatag

SEQ ID NO: 47018 - DNA, 126 bp, Zea mays
  Clone ID: MRT4577_14288C.1
tcaccctaaagtcttcaatgtcagctcgccctaccctcaacgaacccagtcggtaccattctcctgtaccgcaggttccacccctgtaggcttccctatggttcaacacgatggttgttgtctttg

SEQ ID NO: 47019 - DNA, 247 bp, Zea mays
  unsure (1)..(247): unsure at all n locations
  Clone ID: MRT4577_142890C.1
ttcatttgtgttctctagagaaacganagctttataacatacgcggacgcacagattaatatacacagagcagacaggactaaagtcggtacaagtgaccttgatctaagacaatgctctccaattccttccatttaacacaagtatcaatacaaatagaactcatcctaagatccttgcatacttcactcgtatatactcatctgcatgcatacacaatagatatatcctaccattttatcatcca

SEQ ID NO: 47020 - DNA, 3093 bp, Zea mays
  Clone ID: MRT4577_142891C.1
atgagcggcgcagaggatagcgacgaaggggtgttacaattctcgaagcagcgcaccgagctgcccaacgtcaccgactcggacgtcatcggcgcgttcctcgccagcaccatctgccgcgacctggtgagcaagctgggtcgcaagacccccaccaagacgagcgagctgatggacatcgccaccaagttcgcctctggccaggaggcggttgaggccatcttccggaaggacaagcagccccaaggccgccagccggaagacgtccccgaggcgtccactcagcgcggcaccaagaagaagaacaagaagaagtcgcaagcgaaacgcgacgccatcgacgcggaccttatgctcaaggagcagtgcccctatcatcaagggcccgtcaagcacacccttgaggagtgcgtcatgcttcggcgccactttcacaaggctgggccacctgcggagggtggcagggcccacaacaacgacaagaaggaggatgacaaggcagaggagttccctgaggtccacgattgcttcatgatctacggtgggccaacggcgaacgcctcggctcggcaccgcaagcaagagcgtcggggagactggtccgacaagcccatcaccttcgaccagggcgaccaccccgaccgcgtgccgagcccggggaaatatccgctcattgtcgaccccgtcatcggcaacgtcaggctcaccaaggtcctcatggacggaggcagcagcctcaacatcatctacgccgagaccctcgggctcctgcagatcaatctgtcctcgatccggacaggcgcgacgccttttcacgggatcatcccgaaacgcgtccaacccctcgaacaactcgatctgcccgtctgcttcgggactccctccaacttccgaagggaaaccctcacgttcgaggtggtcgggttccgaggaacctaccacgcagtactggggaggctatgctacaccaagttcatggtcgtccccaactacacctacctcaagctcaaaatgtcgggccccaacggggtcatcaccgtcggccccacgtaccgacacgcgtacgaatgcgacgtggagtgcgtggagtacgccgaggccctcgccgaatctgaggcccttatcgctgacctggagagcctctccaaggaggcgccagatgcgaagcgccacgccggcaacttcgagccagctgagacggtcaaatccgtccctctcgaccccaacaacgatgcctccaagcagactacactggtctacttcatcagtgaggtactgactgagaccaagatccgctacccacaaattcagaagctgctgtacgcggtgattctgacacgacggaagttgcgacactacttcaagtctcatctggtgactgtggtgtcatcctaccctctgggggagatcatccagtgtcgagaggcctcgggtaggattgcgaagtgggcggtggaaatcatgggcgagacaatctcgttcgcccctcggaaggccatcaagtcccaagtcttggcggactttgtggctgaatgggtcgacacccagctcccggcagctccaatccaaccggaactctggaccatgtttttcgatgggtcgctgatgaaaacagtggcaggcgcgggcctgctcttcatctcgcccctcgggaagcaccttcgctacgtgctgcgcctccatttcccggcgtccaacaacgtggctgagtatgaggctctagtcaacgggttgcgcatcgccatcgagctagggcttgtcatcgaccaagtcatgaagaactcccactgccgcgacccgaagatggaagcctactacgacgaggttcgacgcctggaagacaagttctacgggctcgaggtcaaccacgtcgcccggcggtacaacgagactgtggacgagctggctaagatagcctcggggcggacaacagttcccccggatgtcttctcccgagacctacatcaaccctcagtaaagaccgacgacacgcctgagcccaagaaggtctcggcccttcccgaggtgccctcggcccagcccgaggcaccctcagcccctgagggtgaggctctgcgcatcgaggaagagcggaatggggtcacgcctaatcgaaactggcagaccccgtacctgcaatatctccaccgaggagagctacccctcgacagagccgaagctcggcgactggcgtggcgcgccaagtcattcgtcttgctgggtgacgggaaggagctctaccaccgtagcccctcaggcatcctccagcgatgcatatccatcgccgaaggccaggagctcttacaagaaatacactctggggcttgcggtcatcatgcagcgcctcgaacccttgttggaaacgctttccgacaaggtttctactggccgaccgcgaaggcacccgggggctacacgcacctgctggtcgccatcgacaaattctccaagtggatcgaggtccgacccctaaacagcatcaggtccgaacaggcggtggcgttcttcaccaacatcatccatctcttcggggtcccgaactccatcatcaccgacatcggcacccagttcaccggcagaaagttcctggacttccgtgaggatcaccacatccgggtggactgggccgccatggctcaccccatgacgaatgggcaagtagagtgtgctaacggcatgattctgcaaggactcaagccatggatctacaatgacctcaacaagttcggcaagcgatggatgaaggaactccccttggtggtctggagtctgaggacaatgccgagccgagccacgggcttcacaccgttctttctagtctatggggccgaggccatcttgcccacagacttagaatacggttccctaaggacgagggcctacgacgaccgacgcaaccagaccaaccgagaagactcactggaccagctggaagaggctcgggacatggccttactacactcggcgcggtatctgcagtccctgcgacgctaccacgcccgaggggttcggtcccgagacctccaggtgggcgacttggtgcttcgactacgacaagacgcccgagggcggcacaagctcacgcctccctag

SEQ ID NO: 47021 - DNA, 410 bp, Zea mays
  unsure (1)..(410): unsure at all n locations
  Clone ID: MRT4577_142892C.1
ttacacgcccggccgatactacagcccccacccgaccgnctgcgcgcggggggtttttaaggactgaacagcggcgcatggctcgcataggccaggtgagggcccccgcgagggatggtgtggaccgctggtatggcaatgggaggtgcctgcgcagggtcgatcacgatggcgatagccgccaccgaacctaccgcgattggacccctaccaaatattatagtggaacgtgacacacagaacgaaaaccattatggttacgccacctaaggtgatcctgatcaacgacatgaccccccctattaccatcacctgcacatgcaacaacaacatcatcatcaacgttttccaacatgcattaccaagccggtccttttaacctggtacgggtatccaccatgaggaaagaa

SEQ ID NO: 47022 - DNA, 1854 bp, Zea mays
  Clone ID: MRT4577_142893C.1
atgtcgtttggtttaaggaatgcgggtgcaacgtaccagcgatgcatgaaccatgtgttcggcgaacacatcggccgaacggtcgaggcctacgtcgatgacatcgtagtcaagacgaggaagccctccgacctcctttccaaccttgaagtgacattccgatgtctcaaggcgaaaggcgtgaagctcaatcccgaaaagtgtgtcttcggtgtcccccgaggcatgctcttggggttcatcgtctccgagcgaggcatcgaggccaacccggagaagatcgcagccatcaccagcatggggcccatcaaggacttgaaaggcatacagaggacgggggccggcgcgggcctgctcttcatctcgcccctcgggaagcacctgcgctacgtgctacgcctccacttcccggcgtccaacaacgtggctgagtacgaggctctgctcgtcatcgaccaagtcatgaagaactcccactgccgcgacccgaagatggaagcctactgcgatgaggttcagcgcctggaagacaagttctacgggctcgagctcaaccacatcgcccgacgctacaacgagactgcggacgagctggctaaaatagcctcggggcaaacaacggttcccccggacgtattctcccgagacctgcatcaaccctccgtcaagaccgatgacacgcccgagcccgagaaggcctcggcccagcccgaggcaccctcggctcagtccaaggtaccctcggcgcggtccgaggtaccctcggctcggcccgaggtaccctcggcccccgagggtgaggcactgcgcatcgaggaggagcggagcggggtcacgcctaatcaaaactggcagaccccgtacctacaatatctccaccgaggagagctacccctcgaccaagccaaagctcggcggttcgcgcggcgcgccaagtcgttcgtcttgctgggagatgggaaggagctctaccaccgtggcccctcaggcatcctccagcgatgcatttccatcaccgaaggccaggagctcttacaagagatacactcgggggcttgtggccatcacgcagcacctcgagcccttgttggaaacgccttccgacaaggtttctactggccgacggtggtggccgacgccactagaattgtccgcacctgcgaagggtgtcagttctacgcgaggcagacccacctgcccgctcaggctctgcagaccatacccatcacctggccgtttgctgtgtggcacctggacctcgtcggccccttgcagaaggcacccgggggctacacgcacctgctagtcgccatcgacaaattctccaagtggatcgaggtccgacccctaaacagcattaggtccgaacaggcggtggcgttcttcaccaacatcatccatcgctttggggtcccgaactccatcatcaccgacaacggcacccagttcaccggcagaaagttcctggacttctgcgaggatcaccacatccgggtggactgggccgccgtggctcaccccatgacaaatgggcaggtagaacgtgccaacggcatgattctgcaaggactcaagcctcggatctacaacgacctcaacaagttcggcaagcggtggatgaaggaactcccctcggtggtctggagtctgaggacaacgccgagccgagccacgggcttcacaccgttctttctagtctatggggccgaggccatcttgtccacagacttagaatacggttccccgaggacgagggcctacgccgaccaaagcaatcaagctaatcaagaagactcactggaccagctggaagaggctcgggacatggccttactaccctcggcgcggtactag

SEQ ID NO: 47023 - DNA, 2775 bp, Zea mays
  Clone ID: MRT4577_142894C.1
atgaggccggaactgtggctcgcggactaccgactggcctgccagctgggtggaacggacgatgacaacctcatcatctgcaacctccccctgttcctctccgacaccgctcgagcctggctggagcatctgcctccggggcagatctccaactgggacgacctggtccaagccttcgccggcaacttccagggcacgtacccgggagagtctctccgggactacatccagcgattctcgaagcagcgcaccgagctgcccaacgtcaccgactcggacgtcatcggcgcgttcctcaccggcaccacctgccgcgacctggtgagcgagctgggtcgcaagacccccaccagggcgagcgagctgatggacatcgccaccaagttcgcctctggccaggaggcgcgcggcaccaagaagaagaacaagaagaagtcgcaagcgaaacgcgacgccaccgacgcggaccttgtcgccgccgctgagtacaagaaccctcggaaacctcctggaggtgccaatctcttcgataagatgctcaaggagtcgtgcccctatcatcaggggcccgtcaagcacacccttgaggagtgcgtcatgctttggcgccactttcacaaggccgggccacctgtggagggtggtagggcccacaacaacgacaagaaggaggatcacaaggtagaggagttcaccgaggtccacgactgcttcatgatctacggtgggcaagtggcgaatgcctcggctcggcaccgcaagcaagagcatcgggaggtctgctcggtaaaggtggcggcgccagtctacctagactggttcgacaagcccatcaccttcgaccagggcgaccaccccgaccgcgtgccgagcccggggaaatatccgcttgttgtcgaccccgtcatcggcaacgtcaggctcaccaaggtcctcatggacggaggcagcagcctcaacatcatctacgccgagaccctcgggctcctgcagattgatctgtcctcgatccgaacaggcacggcgccttttcacgggatcatcctcgggaaacgcgtccaaccccttggacaactcgatctgcccgtctgcttcgggactccctccaacttccgaaggatgaaagagtccgaccagctcgcgacttctttcatcacaccctttggcatgtactgctacgttactatgccattaggtttgaggaatgcgggtgcgacgtaccaaaggtgcatgaaccacgtgttcggagagcacattggtcgaacggtcgaggcttacgtcgatgacatcttagtcaagacaaggaaagcctccaacctcctctccgaccttgaaacgacattccaatgtctcaaggcgaaaggcgtaaaactcaatcccgagaagtgtgtcttcggagtcccccgaggcatgctcttagggttcatcgtctccaagcggggcatcgaggccaacccggagaaaatcgcggccatcaccaacatggggcccatcaaggacttgaaaggcgtacagagggtcatgggatgccttgcggctctgagccgcttcatctcgtgcctcggcgaaagaggcctacctctgtaccgcctcttgaggaagaccgagcgcttcacttggacccccgaggccgaggaagccctcgggaacctgaaggcgctccttacgaacgcacccatcctggtgcctcccgctgccggagaagccctcttgatctacgtcgccgctaccactcaggtggtcagcgccgcgatcgtggttgagagacgagaagaagggcatgcattgcccgtccagaggccggtctacttcatcagtgaggtactgtccgagaccaagatccgctacccacaaattcagaagctgttgtcgctgatgaaaacaggggcaggcgcgggcctgctcttcatctcgcccctcgggaagcacctccgctacgtgttgcgcctccatttcccggcgtccaacaatgtggctaagtacgaggctctggtcaacgggttgcgcatcgccatcgagctaggggtccgacgcctcgacgctcgcggtgactcgcagcttgtcatcgaccaagtcatgaagaactcccactgccgcgacccgaagatggaagcctactacgacgaggttcggcacctggaggacaagttctacgggctcgaggtcaaccacgtcgcccggcggtacaacgagactacggacgagctggcgaagatagcttcggcgcgagcaacggttcccccaaaagtcttctcccgggacctacatcaaccctcagtcaagacaaacgacacgcccgagcccgagaaggcctcggcccggcccgaggcaccctcggcccccgagggtgaggctctgcgcatcgaggaagagcggaatgggaaggcacccgggggctacatgcacctgctggtcgccatcgacaaattctccaagtggatcgaggtccgactcctaaacagcatcaggtccgaacaggcggtggcgttcttcaccaacatcatccatcgctttggggtcccaaactccatcatcaccgacaacggcacccagttcaccggcagaaagttcctggacttctgcgaggatcaccacatccgggtggactgggctgccgtggctcaccccatgacgaatgggcaggcagaacgtgccaacgacatgattctacaaggactcaagccgaggatctacaacgacctccacaggttcggcaggcgatggatgaaggaactctccttggtggtctggagcctgaggacgacgccaagttga

SEQ ID NO: 47024 - DNA, 2460 bp, Zea mays
  Clone ID: MRT4577_142895C.1
atggacaatcttcagcagcctcttcagcccgggacggtgctccgctttgggagtctcgagttcatgtccctcgatggcagttacgacatggtactcctccccccgcagcacgacaacgacgacggtcgtcggctcgcccggcgggggcgaacccgacgacgacatctccccggagcggaagaggaacacccgagtcaaccccgccaccctcctcgccgaagaagacggagatggggcaaccatggccaggcaggaggcagcacctcatcggctgtcggaccagagcgagtcgacgacgccgacacccctgcgggggacatgtcaggtgttatcctcgcacctgggacaacgacaggtgtcgcttccccgcaacgtgccaaccccaggcggactgatgacgtcgacacccttgcgagggacttgtcaggcattagtctcgcacctgagataacgacacattccatctccgatgcaacttcaccgccgtccaccaaccaggaggtaccatcagttttccatcctgttccctttagattcagcttcgacccaccaagagaccccacttcggcctcggtccacactgagctcacaggagacgagacacctgcagcccgggattgcctcggcaacgagcaacaccgccgcgactgttgggccagcctcgaggaaaaggtgcaccgaggctaccaccccagacgcgggggacgctacgacagtgaggaggatcggagcccctcgcccgaaccactaggtccgcgggtcttcagccgggccatacgacgggcgccgttcctgccccggttccgagcctcgactaccactaccaagtactcaggggagacgaggccagagttgtggctcgtggattaccggctggcgtgccagttgggagggacggacgacgacaacctcatcatccgcaacctcccccttttcctctccgacgctgcccgggcctggctggagcatctgcctcctgcgcagatcttcgactgggacaacctagtcaaggccttcactggaaatttccagggtacgtatgtgcgcccggggaactcgtgggatctcctgagctaccgtcagcagctaggggaatccctgcgagagtacatccggcagttctcaaagcagtgcaccgagttgcctaacatcaccgactcagacgtcatcggagcattcctcgccggcaccacttgccaggacctggtaagcaaactgggacgcaagacacccaccaaggcgagcgaattgatggacatagccaccaagtttgtctctggtcaggaggcggtcaaagccatcttccggaaggacaagcagcctcagggaaggcagaaggaagacgaccccgaggcgtccgtccagcgtggcatgaagaagaagaccaggaagaaggcgcaagcaaaacgcaacgccgttgacgcggatctcgtcgctgctgccgagcacaggaatcctcggaagcctcccgaagggaccaacgtgttcgacaagatgcttaaggagtcgtgcccctttcacaggggtcccgtcaagcacacccttgaagagtgcgacatgctccggcgttacttcaataaggctgggccctcggcggagggtggcaaggaccaaggcaacaacaagaaaggaggcgatagggaagaagagttcctagaggtccacaactgcttcaggatctacggtgggcaagtggcgaatgccttggctcaacaccgcaagcaagaacgccgggaggtctgctcggtgaaggtagcgacgctagtctacctagactggtccgacaagcccatcaccttcgaccaagacgacaaccccgactacgtaccgagcccaggaaggtaccctcttgtcgtcaaccctgtcatcggcaacgctaggctctccaaggtcctcatggacggaggcaacagcctcaacatcatctacgccgagaccctagagctcttgggggttgatcgatccatgatccgagccagtgcagcaccctttcacgggattgtccccagcaagcgtgtcctgccccttgggcaacttgatttgcccgtctgcttcggaactccctctaacttccgaaaggaaaccctcacttttgaggtagtcaggttccgagggacctatcacgcggtgttgggaagaccgtgctacgccaagttcatggccgtccccaactacacgtacctcaagctcaagatgccaggccccaagggaaccatcaccgttggatccacatatcgccacacttacgaatgtgatgtggaatgtgtggagtacgccgaagccatcgccgaatcggaagccctcatcgccgacctggattgcctctccaaagaggcgcccgacgcgaagcggcacgccggcaacttcgaactagccgaggcggttaagtccgtctctcttgactccagcaacaacaccggcaagaaagtcaggatcggctccgagcttgaccccaaatag

SEQ ID NO: 47025 - DNA, 1026 bp, Zea mays
  Clone ID: MRT4577_142896C.1
atggcggaagagcagcatccgggtttgtcccgtcgccttcctcgccgcaggaggaggaggcggggcaaccgtggccaagcaggaggcggcacctcgccggctgtcgaccgagtcgacgacgctggcaccccagcgggggacacatcaggcgttgacctcgtgcctgagacgacggcgagtgtcgtttccccgcaacgtgccaaccccaagcggacagacgacgccagcactctcgtggaggacttgcagggcgttagcctcgtacctgagataacggtgcagtccgtccccgacgcaacttcgtcaccgtccatcgatcgagaggtaccgtccgttttccaccctatgccttttagattcagcttcgatccaccaagcgaccacgcttcggtgagcgctttcataaaggcatatcctaaccttccggggtaccatatgtggtcaacctgggaccgactgacggccgtctcgacctacgggcccccgggttccgaggaagacgacgagcctgactctggttgggatttctccaggctcggtaatcctagtgccatgcgagacttcatgaccgcatgtgactactgtctctccgattgctccgatgacggccacagccttgacaacgagggatgtggcccaagtcacgaatgtttccacgtcgatctaaggggtcacgacgaaggcaaccaccttggtatgccggaggacgatgatccccctgggcctacgcctcgcgttgacatcctgcgggagctagctgtggtcccagtccctgcgggggacttagaatacggttccccgaggacaagggcgtacgacgaccaaagcaaccagactagccgagaagactcgctggaccagctggaagaggctcgggacgtggccttgctacactcggcgcggtatcagcagtctctgcgatgctaccatgctcggggggttcggccccgagacctccaagtaggagacttggtgcttcggctgcggcaagacgcccgagggctccacaagcttactcctccctag

SEQ ID NO: 47026 - DNA, 1086 bp, Zea mays
  Clone ID: MRT4577_142897C.1
atggcggtgccacgggcgccgagtcccacgactgccgcgtcgccacctcgagccgaacccacctcctgccttcggcaccgccgctctcgcgcccgccgcgccctcctggttctctttgacagggtgtcgcagctcaacgctcctcgatctctgctccccgccatcaacgctcctcgctcaccttccatcgacgggatcggcgttgatggcggatcggcgaggacgggttcaagggtgaaggataattctgaacaaggacagggtaatggtctcgtgcgtgaggagcactggctcagctcacttcggctgcgccttcccctacgtcagggcctcctcttcggcgtaagtgcttgctttcaacgctgtagtcactgtcgccttggaaatgtagtttcaggcattgctattgtccgtctaactcactgtgaattgaagtgcgaggaacctcgagccgctgagggcgatagccacgcaggcgccccctaccgtgccacaatattcgagtggggagaagacaaagattggcatcaacgatccccgcccttcccccaaaccctgcccccatcgtctctgcagatccggcgttcgctcgggtctccttgcctcgccggggtcccaccgcgatggtcgaggagcatggtgggcgcggggaggcgggaacgagcggcggaggaggttaagctcgacatccgcaacgtgctcatgacgctcgaatccctcaagaaggagtccctcaagaagaagaagggcgatgccgcgcagcagcaagagccaccacagaaggaggtattctgggctcccgcgtcgctcaccaccaagtcctgtgcagatgtcgagtacgacgacgatgactcgatgcgtcccgccgccgagcccgccaaggaggaggaggacatcgagggagctgtgtgcagcgccccctgtcgccgcgctgtcaggaatactaccccctccccctcgcgcgacatggtggatgcacgggccagtactggtggtgagaatcccacggccgtggacgtcgtcgtgacgcaactgatgccggaggaggaggcactccagctctgcaccggctgcgtccacctctag

SEQ ID NO: 47027 - DNA, 2916 bp, Zea mays
  Clone ID: MRT4577_142898C.1
atggcagctacgacatgcgaccccgcttcggtgagcgcttttgcaagggcatatcctgaccttccagggtaccatatgtggtcaacttgggaccaactgacggtcgtctcaaccttcggacccgcgggttccgaggaagaggatgaccctgacttcagttgggatttctccggactccgtgatcccagtgtcatgcaagacttcatgtccgcatgtgactactgcctctccggctactctgacgatggccacagcctcaacaacgagggttacgacccaagtcgcgagtgtttccacatcgatcagggggatcacgacgaagacaaccacctcggcatgctaggaaatgacgacgcccctgtgcttgcgtctcgcgttgagatcccgcaggagctagctgtgggcagggctgcccccggccttcagtggggccgaccagaacctagctgcagcggcaatgctacttcgaacaatgccagagcatccaccaccgaggggcaacgtatccagggcgaactcaaggatctcctggaaaacgtcgttgtccggcgagccgagagctctgcctcccaagggcgaggaggcccctcggagcatcatgcagcgtcctctcgatgcatgtgcgaggcctcggtccacaccgagcacacaggagacaggacacctgcagcacgggatcgcctcggcgacgagcaacaccgccgcggccatcgagcccgcctcgaggagaaggtgcgtcgaggctaccaccccaggcgcgggggacactacaacagtgaggaggatcggagcccctcgcctgaaccactaggtccgcgagtcttcagccgggccatacgacgggtgttgttcccgacccggttccgagcccctactaccatcaccaagtactcaagggagacaaggccggagttgtggcttgcagattaccgactggcatgccagttgggagggacatacgacgacaacctcatcatctgcaacctcccccttttcctctctgacgccgcccgggcctggctggagcatctgcctcctgcgcagatcttcggctgggacgacctagtcaaggccttcgcgggaaatttccaagagtacatccggtggttttcaaagcagtgcaccgagttgcccaatatcaccgactcggacgtcatcggggcattcctcgccggcaccacttgccgcgacctggtgagcaaactgggacacaagactcgcaccaaggcaagcgaatttatggacatagccaccaagttcgcctctggtcaggaggcggtcgaagccatcttccggaaggacaagcagcctcagggaagacagaaggaagacgcccccgcggcgtccgtccagcgtggcacgaagaagaagaataggaagaaggcacaagcaaaacgcgacgccgttgacgcggatctcgtcgctgctgccgagcacaggaatcctcggaagccttccggaggggccaacatgttcgacaagatgctcaaggagtcatgcccctatcacaggggtcccgtcaagcacacccttgaagagtgcgacatgctcgggcgttacttcaataaggcaggaccctcggcagaaggtggcaaggaccaaggcaacaacaagaaggggggcgacaaggaagaggagttcctgaaggtccacaagtgcttcatgatctacagcggacaagtggcgaatgcctcggcaccacaagcaagaacgccgggaggtctgctcggtgaaggtagcaacgccagtctacctagactggtccgacaaacccattaccttcgaccaaggcgaccaccccgactgcgtaccgagcctaggaaggaaaccctaacttttgaggtagtcgggttccgagggacctatcacgcggtgttgggaagactgtgctacgccaagttcatggtcgtccccaactacacgtaccttaagctcaagatgccaggccccgagggaaccatcaccatcggatccacataccgccacgcttacaagtgcgacatggaatgtgtggagtacgccgaggccatcgccgagtccgaagccctcatcgccgacctggattgcctctccaaagaggcgcccgatgcgaagcgacacgccggcaacttcgaatcagctgaggcggttaagtctgtccctctcgaccccagcaacgacgccaacaagaaagaagcagtgctcgtcgactttcgccgcacaaacgctaaagtttttgcgtggagtccctcggatatgccaggcatatcgagggatgtcgtcgagcactcactggacatccgagccggtgctcgacccgtgaagcagcccctacgccgttttgatgaagaaaagcgcagggccataggtgaggaggtccacaagctaatgactgcagggttcatcaaagaggtattccatccagaatggttagctaaccatgtgcttgtaaggaaaaaaggtgcaacataccaaaggtgcatgaaccacatgttcggagagcacatcggcagaacggtcaaggcttacgtcgatgacattgttgtcaaaacaaggaaagcctctgacctcctctctgaccttgagataacattcaggtgtctaagagcgaagggcgtaaaactcaatctcgagaagtgtgtcttcggagtcccccgaggcatgctcctagggttcatcgtctccgaacgaggcatcgaggccaacccggagaaaatcgcggccatcaccaacatgggacccatcaaagatttaaaaggagtacaaagggtcatgggatgccttgcggctctgagccgcttcatctcgcgccttggcgagaaaggattgcccttgtaccgcctcttaaggaaggtcgagcgcttcacttggactcccgaggccgaagaagctctcgggaaccttaaagcactccttactgtcggggaccataattag

SEQ ID NO: 47028 - DNA, 664 bp, Zea mays
  Clone ID: MRT4577_142899C.1
ggccgcaaattttttttttttttttttcgtttttttttttgtaattgctgggtatttggttcatgaatcatgaagaagcatactcaagtacagcactttggattgtgttatatatagtgttcttctcactaaaagacatctgtctacagtctactgatggagaaatcatcttgaccaggaagccctgctaccggctaccctgactctagaagtctccatgtctttgtcaccagacaccacacctcaaaaacaaagctgaccagtataccattttttatataattttgaatgcacatcaatacgggagaatgtccgtttgctcatgaatcgtgatctgtcgtggcaaagctattgtcacgtgcaaggtttcaactgatctggacaaataaagctgcctgatttttgagtcctgacttgtcatcaacccaatgtacaatgcagggcatggcacgtatcttgtagccgtcaagaatactaatttggaatgttgccgcaggcgattctggtccagatatatgatcaattcaagcagaagcacatagagattatcagttcaggattagagaaagaaacaatggtaatatatatatcacgatatttcatagaaagtgacgacagtggaggtggcgggttggtgctgatcccggcggcacgtcgtcggaac

SEQ ID NO: 47029 - DNA, 421 bp, Zea mays
  Clone ID: MRT4577_14289C.1
accttcgacagagagcccaaccggtgaaccgctgcgaatcctcggcctcgcatccgccggtggccgccgggggcgtggagcaccaacttcccaccagctgcgagacaccccccccccccccctcacctccacggaagcacacacccgaagaagaagaagagaaggcgagaaccatggcgccatctgctgtgtccatctcgcccatctgctgcgtcccataccccgcctccgggccccgcgaggctcccgggccccccacctcactcatacggtcccccagatccacgatatcgaactagcaatgaaggaacacgacgcggatccgacacggatgatctacagagcaaacatggcgtttgcccctgcttcctcgagaaggaatacgcgaatgtccacatgcctaggtcaaaatggatagcat

SEQ ID NO: 47030 - DNA, 387 bp, Zea mays
  Clone ID: MRT4577_1428C.1
tcgggatgcagcacgacgcccgttgggaagggagcttacaggcggcagtcatggctttggttgaggaggcgcgccggacctatcctttcctttcctctctcgcccggcccactcccatgccgatctcgctccagctgcactcgccccgtcgccgtcggcgtccacacctgcggctgccggcggcggcaatgcgcgtgcggctctccttcttgctgctttccgcggcattcctgacgatcctgtcggcagcggcgccgtcggccgtaccggacccagagccggaggtgaagccgagcgacacggacgcgctgaccatcttccggcacggcgcggacgcgcacggcatcctggcggcgaactggagcaacgggcgacgcgtgcgcgggg

SEQ ID NO: 47031 - DNA, 258 bp, Zea mays
  Clone ID: MRT4577_142900C.1
actagttctagatcgcaagctgccgccctttttttttttttttataaacttttgttcgtgacaacaacattgatctataagataaaatttatagtacacgtgctataatttataattgtatatgatatggtttcaacaatcaaagttgtatgtggaggagcggtaggtgtgtctatgtgcattatagattgtacacaggcatggccgtatagacctgtccatgccgcatttctattaggaagatcaaataatttcaca

SEQ ID NO: 47032 - DNA, 516 bp, Zea mays
  Clone ID: MRT4577_142901C.1
ccggccgggaatcagacctccgttttcctcgcgtgcggactcacacctaccatcccagaatgccccggatcgatcaccgccgtccgcatcctgcgtaccgcccccctgtacggtactccaactccttcctacccatgttatgtgttcagagcacgactccaaagagtgccgtgcatgtcccgcatcgctcgagctagcccactatgcgaacgaggacctacaaccgccctgggccctaagtgctgacgatcctcggctttgaatacctacactacaactccctcgtgggtgtgtacggtgattagtgatcaagatgccgccatctcctgagggctcctctcttgcccgccgctcgatctgctgatctactgacagcgccgatctgagaccgctccaccatagacgacctaatcgagatgacatcaccgtgggcgagtgggtactcccacaatgctgactgatgctctctcataacactcgtcactcttatgccactcgcgccgcacctgctgcagt

SEQ ID NO: 47033 - DNA, 308 bp, Zea mays
  Clone ID: MRT4577_142902C.1
ggacgacgacgtgcgcggcggagggcacagcacccgcgacctatacctcgcaggtagcatgcaccatcacaacatgggcagcgcacaatcacccagaacagccgagactgttacgaattgaacacgtgacattaaacaacgatccaatgaaacaaaggcctaatcctcctgaaccccagcaaagtgcagataatataaaaggtccgctgcacctgcaccgaattttatagtacacctgggaagaaataaaagatagaaaaattttggttgtttttgctacaacgattctcactgtttatggtgcccat

SEQ ID NO: 47034 - DNA, 246 bp, Zea mays
  Clone ID: MRT4577_142903C.1
ggccattgtcttgtttgtatttttctatctcctcagcataacgtcaccatggtgattatgcaccatatcacactgcagagagggtaagaaagcactattacagctaatgttattgtacacactctccgtgcgtacctatgtatactaaagaatggtattgagacctgatctacttgctgtgtgctgaacctatcggggatacgggcaaaccacacctgtggtacttgattgaaccatacccacatg

SEQ ID NO: 47035 - DNA, 916 bp, Zea mays
  unsure (1)..(916): unsure at all n locations
  Clone ID: MRT4577_142904C.1
ctcgagccgattcggctcgagccgaggagtgacccttcttcagctgagcttccatctgccgttcgctcgcttcttcccagagagaacggcaactctgttggcagctccaggtcagctgccacgacgacaacggaggaggacggatgtggggtcccgacgtcgagtgacgtcaactcgttgaggtcaacaaggctcgccaacaacagcggcggaagcgagaggagcagtggcagcagcgacatcaacaggagcgccgcggggaggggggcaagggggattctgatgccgaagaagatgctgagcaagctctggtctgggaaaacgaacgccggtgagaacagcagctcagacacgtcgcagagccctgggtccgtcaacaacccggaggaggtgaagtccacgcagtcaaggatcacaaggcgctcggtatcctagtcgcggaggggtaaccgcggtcacagcctagttttgttcttgctcttgatttttgccttcactggagagtagtggcaatctaaaaaatgtggagttactggagtaggtttggtcattgatgatgttttcagccatgttccatgggaactttttacatacaaagaaagtataggttgttataattgatgatttttgctggcaaaatcatagtgttttagtttgctttttacggccaccggccaagcccggcacgattaatttcaagggctgaagacagagtgaagtaaatgctttatgatgtgattggatttgttagagcaactatnnacagaaaacaaaaattaaaaaggaccgtaaaccaaacaccccatgttggctaggcgagagcctcagtctagaggtcgtgggtaccgacggtcatgaccaactgctgggtgtcactactagtaataaagaattaataacacggaggatgcatgct

SEQ ID NO: 47036 - DNA, 494 bp, Zea mays
  unsure (1)..(494): unsure at all n locations
  Clone ID: MRT4577_142905C.1
actgctcacgcgtccgccgctccctcgctctctggtctctctcaccgaatcacacacacaggcaggcagtgaggcaggggcacgaaggcgcggctccctctctcaagcccctcgccattactcgctcataaaggaagaacagagcgagcgggtagcgaggaagaagctgggccgcggggcaagaggagagaggtccccacccgtaggtctgctctgcaactccggctcgccgcctggcaaccgcgcggggcgggcaccacgctaggcccctcgcccttctcgtaggccaccggcagggaggaaagaaggcggggtcaatggcatcggcgccggggaccggggccgacgaccagcacggcggcggcaagctcagcatgaagagcctgctgtggcacggcggctccgtctggaacgcgtgggttcagctgcgcctccaaccaggtggcgcaagtgctcctgaccttgccgtactccttctcccagctgnggatgct

SEQ ID NO: 47037 - DNA, 440 bp, Zea mays
  Clone ID: MRT4577_142906C.1
aaaaaaaaacttttgaattttttgtaaatttgggaaaggccccggcccacccccttttctgaaaaacggggccctttaagggaaaaagggggggaggccccctttcttccggggccaggaaacccgttggggccccaaaaacccaaaaaccccggcctggaaggtttttacccaaggccccgaagcctgggggtttttggccccggaaaatttttgggaaaaagacccccccttttgcccggggcctaacttggctgaaaggaccttttgtttgggggggaacttgggacggttttttgcccccccgggcctttgttttttccccgtttttttaaaaatttcccggccccccccgggggggggggaaaccccctttggcggggtgaaccctttaagaaaaaaatgcccccccttggccctctgaagtccttttccaactt

SEQ ID NO: 47038 - DNA, 760 bp, Zea mays
  Clone ID: MRT4577_142907C.1
gccctctctccgctcgctcgctctctctctcccgaatcacacacacaggcaggccagtgaggcaggggcacgaaggcgcggctccctctctcaagcccctcgccattactcgctcataaaggaagaacagagcgagcggggagcgaggaagaagctgggccgcggggcaagaggagagaggtccccacccgtaggtctgctctgcaactccggctcgccgcctgcctgccaaccgcgcggcgcggccaccacgctaggcccctcgccctcctccgtgcggagacgggaaggccgtgcgctcaaggatggcgcgcgagcagctggaggagtccatcgtggccgacggcaacggcaaggaggaagaggtcggggtcatgggcatcggcgccgcggacggcgccgacgaccagcacggcggcggcaagctcagcatgaagagcctgctgtggcacggcggctccgtctgggacgcgtggttcagctgcgcctccaaccaggtggcgcaggtgctcctgacgctgccgtactccttctcccagctggggatgctgtccggcgtgctgctgcagatcttctacggcttccttggcagctggaccgcgtacctcatcagcgtcctctacgtcgagtaccgctcccgcaaggagaaggagggcgtcagcttcaagaaccacgtcatccagtggttcgaggtgctggacgggttgctgggcccctactggaaggcggggggtctggcccttcactgcacgttcctgct

SEQ ID NO: 47039 - DNA, 3141 bp, Zea mays
  Clone ID: MRT4577_142908C.1
aatcacacacacaggcagggcagggaggggggggcacgaaggcgcggctccctctctcaagcccctcgccattactcgctcataaaggaagaacagagcgagcgggtagcgaggaagaagctgggccgcggggcaagaggagagaggtccccagccgtaggtctgctggggggggcggctcgccttctgccaaccgcgcggcgcggccaccacgctaggcccctcgccctcctcgtaggtgaacagagcctgcagtcgatacaacagtaaattccgcggcattccattcgctttccctctcgaaacgcaccctgcatttactgcacgtcgctcgccctccggccatccgcgatcttcaaatcttccactgtaaaaaggttcgtgctgttgttttttttttacttttttcgtgcgttcgcgttcgacgcctcgctcggctgggtccttccttccttccgctgtgttcccttctgtttctgtacgggcggtgtatatatttttgttttatatcgttgtttggatcttgatctggccggctgatgaatacgtgcttctctctccgacgaacgacgcagcgggcggagacgggaaggccgtgcgctcaaggatggcgcgcgagcagctggaggagtccatcgtggccgacggcaacggcaaggaggaagaggtcggggtcatgggcatcggcgccgcggacggcgccgacgaccagcacggcggcggcaagctcagcatgaagagcctgctgtggcacggcggctccgtctgggacgcgtggttcagctgcgcctccaaccaggtggcgcaggtgctcctgacgctgccgtactccttctcccagctggggatgctgtccggcgtgctgctgcagatcttctacggcttccttggcagctggaccgcgtacctcatcagcgtcctctacgtcgagtaccgctcccgcaaagaagaaggagggcgtcagcttcaagaaccacgtcatccagtggttcgaggtgctggacgggctgctgggcccctactggaaggcggcgggtctggccttcaactgcacgttcctgctgttcggctccgtcatccagctgatcgcctgcgcgagcaacatctactacatcaacgaccggctggacaagcggacatggacgtacatcttcggcgcctgctgcgccaccacggtgttcatcccgtccttccacaactaccggatctggtccttcctgggcctcggcatgaccacctacaccgcgtggtacctcgccatcgccgcgctcctcaacggccaggccgaaggcgtggcgcactccggccccaccaagctcgtgctctacttcaccggcgccaccaacatcctctacaccttcggcggccacgccgtcacagtcgagatcatgcacgcgatgtggaagcccgccaagttcaaatacatctacctgctggcgacgctgtacgtgttcacgctgacgctgccgtcgtcggcggccatgtactgggcgttcggcgacgagctgctgacccactcgaacgccttctcgctgctgcccaagacccggtggcgcgacgcggcggtgatcctgatgctgatccaccagttcatcaccttcggcttcgcgtgcacgccgctctacttcgtgtgggagaaggtgatcgggatgcacgacgccaagagcatcttcaagcgcgcgctggcgaggctgcccatcgtcgtgcccatctggttcctcgccatcatcttccccttcttcgggcccatcaactccgccgtcggcgcgctgctcgtcagcttcaccgtctacatcatcccggccctggcgcacgtcctcacctaccgcacggcgtccgcgcgcatggtacgtatacatatgcatgcgtgcatttgcattgcattgcacccccgtcgtttagcaaacaataacaacggcgtcctgtggcctggccggccgtcgcgttgcctaatgcctactggttcgggtacgagtaagtgacccgatccgttcatccccgttgcctagctagagtgcagtagtaccgccaccagtcgcagcagctgtcacgaacagtggcaggactgcaacacgaaatagacagtggagatccgtgcacacgcagcagccagttcacgttagatgcaaagcaccggtcccccacttgggcaaatcccccaatcattgaatggagacaacagccacattcaattcgaagccggccccgcccccgcggcgcccgacaacgatatgggacgacggatcggggatcggaacaccgcatcacccccacgtcatcatccgcgtctctgcccgtcgcctcgccgaatgccggtgcccatggcagatgtaggcttcactgtgccggttccgacagctggcgggggcggtttcggagcgacttttttgcgagtacggcacggcggcgatggcaacgccggcgtgggtcaaggaaccgcttgcctgtgacggaagatctgacgtagcgccgatgcggtgctgacgttgggtgtcgcgctgtgacggaagaccctcctggcgaggcgcgacgcgacggtggtcgcgacgtcgcggcactggcgcgcgtctggacgcactcggccggccaatcgcgctcccaggtcccagggcccggcatcgtgtggcggtgtggctggaacgcgagagatgatggctcctctgtcctccgtagacaacgggatggcgatggagatgtgagatctcggtgtgcgctggagggttcctttcctcgccctccgttttccccagctttttatttccgaaaggaattcgagcagtgaccctgtgaaaatgcctcgaaaaggatagggctaggaacaagctaaggcggggcacgccgcgatgcttatcttttattcatgtcagtgcttctggcgatcgatttcattctgacgactgctgctctgtgtttccctgcaaaaaaaaaattatttgtttttgcaacagaacgccgcggagaagccgcccttcttcctgccgagctggacggggatgttcgtcctcaacatgttcatcgtggtgtgggtgctggtggtcggcttcgggctgggcggctgggccagcatggtcaacttcgtgaggcagatcgacacgttcgggctgttcgccaagtgctaccagtgcccgaagccgccggtcc

SEQ ID NO: 47040 - DNA, 394 bp, Zea mays
  unsure (1)..(394): unsure at all n locations
  Clone ID: MRT4577_142909C.1
tcggggcgggctttttcggggggggcaatctgttgtggtacatggacacgagggtagctggtggtcttgttgttcattgagcgaggaaacaggatcgactagaacttgttctcttagatcgttaaccaccttttcgtggttntgctcaggcatcatcctcttcacggaggtggtgctgacttccacgcaccttgcgatcttnatggttttcgcttcttgctgcgagctgttttatctcatctgctacgccgggcggtttctctctgactagtcgcgctacttttttcattcatctggtttgctgcgtcagcttctgtcacgtcttgaacatttgtcaccgggaccttaatctgggtaacacgctgcttgactgttttccggggccgcgcctcaa

SEQ ID NO: 47041 - DNA, 531 bp, Zea mays
  Clone ID: MRT4577_14290C.1
ctgtgtgatattgttttttgtttacaatttcacattttttttttgtcgttagctttaagtgttagccccgaggtgccttatgagaaaggggtctgacaaaaaaagcttttgagaggactcgcccgatttacagggggggattcctgaagggccagctgccttaaagaatcgaccaacgcgcggggaaaaaaaggatcccccccagggcgcccccgaggaggggccccccaccaaaaaaacaaaaaggggcggggggcccttccccgtctggcccagaaagagtggccctttgcggacaaaaaaagaatgacccaacaagagaaaaggggggggaaggtggtaaaaaagccaaaattacaggggggggggtaaaaaactgggggggggacttccggggggtttaaaacaacacgcttccaaaaatggggggggggggcccacagcccccttttttttaggggcaaagaaaagcttcctaaaagtgggaacgcttccgggaaaaattattagcatggggagattttttccggg

SEQ ID NO: 47042 - DNA, 127 bp, Zea mays
  Clone ID: MRT4577_142910C.1
gtggtcgacgtcgtggacgcagagctgcttctggcagcgctcatgacgaccttacacgcctccataaccagcgggcatgtgagcttcggcatgcctccctggctatactacgaccgatggacgacgt

SEQ ID NO: 47043 - DNA, 508 bp, Zea mays
  Clone ID: MRT4577_142911C.1
ccggccgggacatagtggatttctctttgacgttggcctcctgctaatgacataccttcatagggaatgaccccctcgagattctcgtagaatgcctgctgtaccttcctacagcatgatcttcctcgtcctgggagtggagacgaagctcgtgtagcccagcaggccgacgccctaccaatagctacatagctctccaacatgtacaacctgcactcgctcagcttgaacggctacggctccttcttctagctgagcagcccctacaaaggcttcactttccccctcaaacttgctccactcgtcggtgacggagaagctcacgacctttcatccgatctccaggccatgccgcactctcctgtcctcgacgtacctcgacatcggagtgcactagcgagataagccgtgtttgtgtagatcgacacggtagtactgcatgcataaccgtagaaactcccttggaccgaacagtgctgtgctctgccgatctgatatgtgattccca

SEQ ID NO: 47044 - DNA, 339 bp, Zea mays
  Clone ID: MRT4577_142912C.1
tttttgtttggagattattacatacctttttttatatgttttttttaaactcaaagggcgccccggggatttcattggtttttacccggggaccgggggaaaactaccaccttagaataaaaagggccgggggaaaaaaagaaaagggggaaaaaaaaaaagttcgcttaaagcaaaaggggagaatgaaaccttggtccacatatcaaatggggagaacgggcgaaaataaacaatagccgaagagggttggtttaaagaaacccatgggcccccaaaacccttcaaaagttatttctaaacaacccaggtgctcctcccaaaaaaatacaatagggc

SEQ ID NO: 47045 - DNA, 162 bp, Zea mays
  Clone ID: MRT4577_142913C.1
cccacttcctcacacctgttaggacagataaaacacttgatgcccgatcggcgattcccaatacacaacggttcaattggattagggaaaatacaaggtcttcagttggggattcaacctaactcaagattacccaatccacatggactgcgagcctaccca

SEQ ID NO: 47046 - DNA, 605 bp, Zea mays
  Clone ID: MRT4577_142914C.1
ctcataccccggtctcagcttaacttcactccactgcaatcacagacgagaccagtacgcgtagagcttctagagggccgggtaatatgcctgcaataggatcgccctggggagccaccaggatgtgtaccacccgggcgcccttaaggcggagatcgctgatgccatctccacccttattttgggatgatcctgacagtgctgctgcatgggcttaaacaggctgaccggaggacgaccatactacccctgtggtcctgatcgcgggggtggaggagcacacgtacgatctgatcgtggcggtgtctgtgggcacaaacatttacggcgggcacatgaaccctgtccagacctttggagccttacagggccgtaacatcaacctgttccagctgctgctaaactgagtagcgcacatgctggggtgcaccgcgagcgtcttactgctcctgttctcgactgtagatcaggccacgggcaccttaaggcttaccgacgtgccagaaaatgaggcgctggtgctttaaatcgggatgaccttgctgctggagtacacggcgtacaccacggatgtggacccttaagagggcagtcatggcaccatc

SEQ ID NO: 47047 - DNA, 1649 bp, Zea mays
  unsure (1)..(1649): unsure at all n locations
  Clone ID: MRT4577_142915C.1
gggtacctcgaggccggccgggagaccccaccccagtgcaaatctgcccctacgtgaaacgttcccctcctctcctcgccctccttgcgcaggttgaggcccgaggtgtagtgcaaggtggcgacctctcggcggcttgggtcggattggtttcggaaagtttggtctccagtgacccgagcactggagatgccctgtttggagcaaattccgatggcgaccggcgagaccgccgtggatcgtcgcgaggaccaccgcgacatggatttgtcaggggaggagcacgtgcggcccaaggcgcggaagccgtacacgatcacgaagcggcgggagaggtggacggaggacgagcacggtcagttcctcgaggccctgcagctgcacggtcgcgcctggcgccgcatacaagtgcacatcggcaccaagactgccgtgcaaatccggagccacgcgcagaagttcttcaccaaggtggtccgagaatcgtcgccaggaagcaacgcctccgcgggcgccgcgccggcgatccagatccccccgccgcgccccaagaggaagccggcgcacccttacccgcgcaaagcggacggcgcggccaagaagcccgcgccggagctcaagcggctggagaagacgtccctgcgcgaccgggtccgggacgaagggtcgccgacgtcggtgcttgcctcggcgcgcacggcgtcacgagcggaggtgtcgggcagcctggtcgcgaacagctcgagcgccagcaggtcgccagccctgtctgacgccggttccgacgagcgtggcgacggcggcggctcgctggcctcctcggtggaccgtgaggacggctgcgcgtcgccaaggacgagagcgccatgtaccaaggtgctctgtcatgcacacgaagtgtcgcgtctaggatcgggagctccagtcgtgaagctgttcggaaacaaggtcgtcgtggtgaaagtgaaagacctggaaacggacactccgcctgcgagcgttgccgaggcagccagaaacgggagccctcctaacggtgccgcaggagcgagctcgtggaaaccgtggccggagctcacgtgcctcgttccccggcgggacggcttcgcggcgcaacccgtcgtgagcccgccgtgcgcggtgttctactacccgcaagcttcggcggcttcggctcaggagcaccagcaagcttcagagccgctggatcacagacgcgcgcagagggaagggtcgtcgccgacaggttcgagcgtggcctccagcgccgccgcggagtcccgccacggtcccgtgcaagagaacgccagcgacggctacgcggcgctacgggccgcaatcccgaggccgaccaagcgcgtgagctcggcttccttcggcgggagagggttcgtgccgtacaagcggtgcgcggccgagagcgaggcggcgcggccggtggcactggcactggcacccggagaggaggccgacggcgacctgacgaggctgtgcttgtgacaagagctgaaggctgcaatgcacatgctctctgctgaaacaggtggcaagagctttgtcgggtgggtcgggcacgacactggaaccaccatctaaaggtttgtttgacaaagcgttcctctggacaannnnnnnnnnnnnnnnnnnnn

SEQ ID NO: 47048 - DNA, 3851 bp, Zea mays
  Clone ID: MRT4577_142916C.1
ctaagtgttcactacaagcattaacatcaaaatccttacaccttttaaagaagaaatggtttcattacaagtagaaagttcacaagaaagtattccatttcttttaacttctagagcaagtgaattttgtgtactaacaaatttatcatgttcttcatataaaaggtcttcttgtttctctaagattctatccttttcatttaaggcatcaatcaattcattaatcttagctatcttagttctatccaatcccttgaataaactagagtaatcaatttcatcctcactggattcatcatcactagaagaatcataagtattagcattacgagtgatcaccttcttttcccttgccatgaggcaagtgtgatgctcgttggggaagagagccgatttgttgaaggcagtggcagcgagtccttcgtcgtcggagtcggacgaagagcaatccgaatcccactcctttccaaggtgtgcttcgcctttggccttcttgtaaaccttcttgttctctctcttcccatttttcccttgctcctggtcactatcattttcgggacagttagcaataaaatgaccaagcttaccgcatttgaagcatgatcgctttcccttggtcttggccttgcttggctgtccctttcgaccttttagcgccgtcttgaatctcttgatgatgagagccatctcttcatcattaagaccggcagcctcaatttgtgccaccttgctgggtagcgcctccttgctccttgttgcttttagagcaatgggttgaggctcgtggagtggaccgttcaacgcgtcgtcgacgtatcttgcctccttgatcatcatccgcccgctcacgaattttccaagtacttccttgggcgtcatcatcgtgtacctgggattctcacgaatattgttcacgagatgaggatcaagaacggtaaaggacctgagcattaggcggacgacgtcgtgatccgtccaacgcgtgcttccgtagctccttattttgttgataagggtattgagccggttgtaagtttgagttggctcctctccccttatcatggcgaatcgtccaagctcgccctccaccaactccatcttggtgagcatggtgatgtcgttcccctcgtgagagatcttgagggtgtcccatatctgcttggcattgtccaagccgctcaccttattgtactcttccctgcacaaagacgctaagagaacagtagtagcttgtgcatttctatgaatttgttcatttataagcaaagggctatccgagctatcaaatttcattccattctccacaatctcccatatgcttggatggagagagaataagtgactacgcattttgtgactccaaaatccgtagtcctccccatcgaagtgtggaggtttgccgagaggaatggaaagcaaatgtgaattcgaactatgttgaatacgagaataatcaaatgaaaagttcgaattgaccgtctttttatagtcgttgtcatcatccttttgggaagaagtagactcatcactatcgtcgtagtagatgatctccttgatgcaccttgtcttcttcttcttcccttcctttcgtctatgccccgagccagagtcggtaggcttgtcgtccttcggctcgttgacgaaggattccttctctttgtcgttgatcacaattcccttccccttaggatccatctcttcgggcggtaagtccctttgtgaagagaacggcttcgataccaattgagagcacctagaggggggggtgaataggtgatcctgtaaaaacttaactttgctcttgatttgcactttgttcatccattgcataaattcacattttaagcacttgagttggcactcaatcaccaaaatacttagaaatggcccaagggcacatttccctttcaggaaggatgacaccacagttatcggatgagactcgaagtagtgtcgcaacttccaccgcgttaggatcaccgcgtacagcagcttctgaatttgtggatagcggatcttggtctcggacagtacctcgctgatgaagtagactagcctctggacgggcaatgcatgcccctcttctcgtctctcaactacgattacggcgctaaccacctgagtggtcacggcgacgtagattaagagggcttctccggcagcggggggcaccaagatgggcgcgttcgtgaggagcgcctttaggttcccgagggcttcctcggcctcaggggtccaagtgaagcactcggccttccttaagaggcggtacagaggcaggcctcttttgccgaggcgcgagacaaaacggctcagagccgcaagacatcccgtgactctctgtatgcctttcaaatccttgatgggccccgtgctggtgatggtcgcgatcatctccgggttggcctcgatgccccgctcggagacgatgaaccccaagagcatgcctcggggaaccccgaagacacactttttgggattgagcttcacgcctttcgccttgagacatcggaatgtcacttcaaggtcggaaaggaggttggaggcttccctcgtcttgactacgatgtcatcgacgtaggcctcgaccgttcggccaatgtgttcgccgaacacatggttcatgcactctttgatgaaccctgccgccattagcttgtggatctcctcgcctatggctctgcgcttttcttcgtcgaatcggcgcagaggctgcttcacgggtcgggctccagctcggatatccagcgagtgctcggcgacatccctcggtatgccgggcatgtccgaggaactccacacgaaaacgtcggcgtttgcacggagaaagtcgacgagcactgcttcctcggggaactctcctgcctggtgatcttccttattatcgtcgtcgcgagccctgccaccctccgcgggtggcccagccttgtgaaagtggcgccgaagcatggcgcactcctcaagggtgtgcttgacgggcccctgatgataggggcacggctccttgagcatcttatcgaagaggttggcacctccaggaggtttccgagggttcttgtactcggcgacagcgacaaggtccgcgtcggcggcgtcgtgcttcgcttgcgacttcttcttgcctttcttcttggcgccgcgctgagttgacgcctcctggccagaggcgaacttggtggcgatgtccatcagctcgctcgccctggtgggggtcttgcgacccagcttgctcaccaggtcgcggcaggtggtgccggcgaggaacgcgccgatgacatccgaatcggtgatgttgggcagctcggtgcgctgcttcgagacggctgtcaaccgatcccagggtgaccgcatacgataccccagagggtttggactcgcctctacgagagcgtccaccaaagcgaagtcgcttggtgggtcgaggctgaatccaaaaggcgtgagatgggaatcggttggtacctcttggtcgacgggcggtgacgaagtcacgtcaggggctgactgcaccgtcgtctcaggtacaagggtgatgcccagcaagtccttcgcgagcgtgctggcgtcgtccgtttgcttgggattggcgtgttgcggggagacgacgctcgtcttcgtctcagacgcgaggtcgatgcccgacgtgccccccgttggggcgccggcgccgtcgactcgctcgacagccgacgaggtgccgcctcctgcttggccttggttgccccgcctcctcctccgtcggcgggggaggggacggggcgagctcgaatgttgttcttccaccacgcggggaagacgtcgttgattccgccgccggcgggcgggcgggctggcgggctgacggccgccat

SEQ ID NO: 47049 - DNA, 556 bp, Zea mays
  Clone ID: MRT4577_142917C.1
atgcagacatatgatgatcgtcgctcttgtgcgatgccgtcaatgttcctctctgtgcaccagctagcacgcctatctcatctctatcaggtacagtgtagggctgacccccaacgcagtctacaaaatgacgccatattactcaagatctgcgatgtctgtgcatgccgctacagaccaggccccgatcgacctcgccaacgtggaggtgtctgatgatgtagatgcgctgcggtagacatctcaggctggccatgtctgcatgcgcaaccggttccacgatttcgtgttgaactggaaagcatctaaccctgcccctgacaatcgagagtgagacagtacaagcttgaaggatgtgctctggcacgttaccgctgtacacaccgtcaatcgtgcccagctttgaagtattgatgcgcatgagttcacgactgactccaccgactccaggtcgaaatgcgtgctgtcctggatgtgtaactctaagcatgaaatgttgagcaagctgctcctcgatctaaagccctacttctaagaggatcgctgccctccagat

SEQ ID NO: 47050 - DNA, 1479 bp, Zea mays
  Clone ID: MRT4577_142918C.1
atggatcgacacccaactaccgacatctccaatctaagccgaactttggaccatgtacttcgatgggtagctgatgaaaaccggagcgggtgctggcttgctcttcatctcacccctcaggaaacatcatcaaacaatgtggccgagtacgagactttggttaatgggttgcgcatcgccgtcgagctaggggttcggcgcctcgacgctcggggcgactcgcagctcgtcattgaccaagtcatgaagaactcccactgccgtgataaaaaaatggaggcctattgcgacgaagttctgcgcttggaagataagttccacgagctggaactcaaccatgttgctcgacggtacaacgagactgcggatgagttggctaaaatagcttcggggcggacgacggttcccccgaacgtcttctccagggacatatatcaaccatttgtcaacttcgacgaagcgcccgagcccgacgagacctcggcccagcctgaggtaccctcggccgctgagggtgaggccttgcgcgtcgagggagagcggaatggggttgcaccaaaccaagactggcagaccccgtacctgcaatatctcctccgaggagagctgcccctcgacaaggccgaagctcggcgactggctcggcgcgccacgtcgttcgttttattaggtgatgaaaaagagttgtaccaccgcagcccctcaggcattctccaacgatgcatatccgacgcccaaggacaagagctattacaagaaatacactcgggagcttgcggtcaccatgcaacacctcggaccctcatgggaaacgctttccgacaatggcacgcagttcactgggaagaagttcctggacttctgcgaaaaccaccacatccatgtggactaggccaccgtagctcacccaatgacaaatgggcaggtggagcgcgccaacggtatgattttgcagggactaaagccgaggatctacaacgacctcaacaagttcggcaagcggtggataaaagagctaccctcaatggtttggagtctgaggacgacgtcgagccaggccacgggtttctcgccgttctttctagtctatggggccgaggccatcttacccacggacttagaatacagttccccgaggaaaaaggcttacgacgaccaaagcaaccagaccagccgagaagattcattggaccagctggaagaggctcaggacatagccttactacactcagcgcgatatcagcagtctctacgacgctaccacgcccgaagggttcggccccgaggcttccaggtgggagatctggtacttcggctgcgacaagacgcccgagggcgccacaagcttactcccccctgggaagggcccttcatcatcgccaagattttgaagctcggacatacaagctggccaacaatcaaggcgaggtctacaacaacgcttggaacatccaacagctacgtcgcttttacccttaa

SEQ ID NO: 47051 - DNA, 2538 bp, Zea mays
  Clone ID: MRT4577_142919C.1
atgtcgttcggtttgaggaatgcgggcgcgacgtaccagcggtgcatgaaccatgtgttcggcgaacacatcggtcgcacagtcgaggcctacgttgatgacattgtagtcaagacaaggaaggcttccaacctcctctccgaccttgaagtgacattccggtgtctcaaggcaaaaggcgtcaagctcaatcccgagaagtgtgtcttcggggtgccccggggcatgctcttggggttcatcgtctccgagcgaggcatcgaagccaacccggagaagatcgcagccatcaccaacatggggcccatcaaggacttaaaaggtgtacagagggtcatgggatgtctcgcggccctgagccggttcatctcacgcctcggcgaaagaggtctgcctctataccgcctcttaaggaaggccgagtgcttcacttggacccctgaggccgaggaagctctcggggacctgaaggcgctcctcaccaaggcgcctatcttggtgcccccagccgatggagaagccctcttggtctacgtcgccgcgaccactcaggtggttagcgccgcgattgtggtcgagaggcaagaagaggggcatgcattgcccgttcagaggccagtttacttcgtcagcgaggtactgtccgaaaccaagatccgctacccacaagtacagaagctgttgtacgcagtgatcctgacgaggcggaagttgcgacactacttcgagtctcacccggccatcaagtcccaggtattggcggacttcgtagccgaaggggtcgacacccagctgccgacggctccgatccaaccggagctctggaccatgtttttcgacgggacgctgatgaagacgggagccggcgcgggcctgctcttcatctcgcccctcgggaaacacctacgctaccttctacgcctccatttcccggcatccaacaatgtggctgagtacgaagctctgatcaacggattgcgaatcgccatcgagataggggttcgacgcctcgacgctcacggcgactcgcagctcgtcatcgaccaagtcatgaagaactcccactgccgcgacccaaagatggaggcctactgcgatgaggttcggtgcctggaagacaagttctacgggctcgagcttaaccacatcgctcggcgctacaacgagactgcggacgagctggcaaaaatagcctcggggcgaacaacggttccctcggacgtcttctcccgggatctgcatcagccctccgtcaagatcaacgacacgcccgagcccgaggcaccctcggtccagcccgaggcatcctcggtccagcccgaggcgtcctcggttcagcccgaggtaccctcggcccccgagggcgaggcgctgcacatcaaggaggagcggagcggggccacgcctgatcgagattggcagaccccgtacctgcaatatctccgccaaggggagctgcccctcgaccgagccgaggctcggcggatagcgcgacgcgccaagtcgttcgtcctgctgggcgatgggaaggagctctaccaccgcagtccctcgggcatcctccagcgatgcatctccatcgccgaaggtcaggaactcctgcaagagatacactcgggggcttgcggccatcacgcagcgccccgagccctcgtcgggaatgctttccggcaaggcttctactggccaacggcggtggctgacgctactagaattgtccgcacctgcgaagggtgtcaattctatgcgaagcagacccacctgcccgctcaggctctacagacgatacccatcacctggccctttgttgtgtggggtctggacctcgtcggtcccttgcagaaggcgcccgggggctacacgcacctgctggtcgccatcgacaaattctccaagtggatcgaggtccgacccctgaacagcatcaggtccgagcaggcggtggcgttcttcaccaacatcatccatcgcttcagggtcccaaactccatcatcacccacaacggcacccagttcaccggcagaaaattcttggatttttgcgaggatcaccacatccgggtggactgggccgccgtggctcatcccatgtcgaatgggcaagtagagtgtgccaacggcatgattctacaagggctcaagcctcggatttacaacgacctcaacaagttcggcaagcgatggatgaaggaactcccctcggtggtctggagcctgaggacaacgccgagccgagccacgggtttcacgccgttcttcctggtctacggggccgaggccgtcttgcccactgacctggaatatggctccccgaggacgagggcctacgacgatcaaagcaaccaagctagtcgagaagactcgctggaccagctggaagaggctcgggacagggccttactacactcggcgcggtatcagcagtccctgcgacgctaccacgcccgaggggtccgaccccgggacctccaggtgggcgacctggtacttcggctgcggcaagacacccgagggaggcacaagctcacgcccccctag

SEQ ID NO: 47052 - DNA, 560 bp, Zea mays
  unsure (1)..(560): unsure at all n locations
  Clone ID: MRT4577_14291C.1
ccggtcgcccagcgtcttcttctccagtnnggaagggtgggggcggtggggccgccgcgccaagtcgggccttttcgttggcgtcaactgggtcctgtcgtcnccaagcgcgagctgcctccccgcccgtgccccgcnggggaatcacggagaggtgtcttggtcggggcctgatcaggggggggggtgggtttgctccttntgagaagcgtctcactgagcttctgaaggtgggcaaggacaagcgtgccctggggcttgcttagagaaagcttgggtctcacatgagggcttcgaagaagaagaggagatggcgggcgtcctcaggaggatgaggtcggctggtncgcacactggctttnngaacttgagagcatttcatgttcatggggctggctgccngagattatgttccagtgtctgattttccatccgtgtggaccctagtcgacctgtcaaagtgttttgtttcggaaccagctcatggggattttgctccttcccgtgcatcctggggttctggtttcggaccgttttatggggatcttgctcttattcta

SEQ ID NO: 47053 - DNA, 395 bp, Zea mays
  Clone ID: MRT4577_142920C.1
tggcaccacatctttgctaagaacgacacaattctcaggcggcgccgtagagcgacctcccactcaatgcttggcaccctggctggaggatggaagaagcacttgacgaggctcagtgcgcccaagcatgggttgctcccacaagcttggcgagccttatggtcccaagcatcttctggcaccttacaagtccagcgggggccttcctctgaatcctcatgatgaggaacaggctcaagtgtgctctgaactaccgcgaggtcatttctatcctcatgcacccccatgtactcgaggatggcaacgttatgattgacaagacctaccctgctgcgttcatggatgtaatttccatccccaagacgtggagaactacaggctgatttatgacacca

SEQ ID NO: 47054 - DNA, 2523 bp, Zea mays
  Clone ID: MRT4577_142921C.1
atggggcccatcaaggacttgaaaggcgtacagagggtcatgggatgtctcgcggctctgagccgcttcatctcacgcctcggcgaaagaggtctacctctgtaccgcctcttaaggaaggccgagtgcttcacttggacccctgaggccgaggaagccctcgggaacctgaaggcgctcctcacgaaggcgcctatcttggtgcccccagctgccggagaagccctcttggtctacgtcgccgcgaccactcaggtggttagcgccgcgattgtggtcgagaggcaagaagaggggcatgcattgcccgttcagaggcctgtctacttcgtcagcgaggtactgtccgaaaccaagatccgctacccacaagttcagaagctgctgtacgcggtgatcctgacgcggtggaagctgcgacactacttcgagtcccatccggtaactgtggtgtcatccttccccctgggggagatcatccagtgccgggaggcctcggggaggatcgcaaagtgggcggtggaaatcatgggcgagacaatctcgttcgcccctcggaaggccatcaagtcccaggtcctggcggacttcgtggccgaatgggtcgacacccagctcccaacagctccgatccagccggagctctggaccatgttcttcgacgggtcgctgatgaagacaggagccggcgcaggcctactcttcatctcgcccctcgggaagcacctacgctacgtgctacgcctccatttcccggcgtccaacaatgtggccgagtacgaggctctggtcaacgggttgcggatcgccatcgagctaggggtccgacgcctcgacgctcgcggtgactcgcagctcgtcatcgaccaagtcatgaagaactcccactgccgcgacccgaagatggaggcctactgcgatgaggttcggcgcctggaagacatgttctacgggctcgagctcaaccacatcgcccggcgctacaacgagacggcggacgagctggctaaaatagcctcggggcggacaacggttcccccggacgtcttctcccgggacctgcacccaccctccgtcaagatcgacgacacgcccgagcccgaggcaccctcggcccagcccgaggtaccctcggctcggtccgaggcaccctcggctcggcccgaggcaccctcggctcggcccgaggcgccctcggttcggcccgaggtaccctcggcccccgagggcgagacgcttcgcgtcgagggggagcaaagcggggtcgcgcctgatcaaaactggcaggccccgtacctgcaatatctccaccgaggagagctaccctccgaccgagccgaagctcggcgggtggcgcggcgcgccaagtcgttcgtcttgctgggagatgagaaggagctctaccaccgcagcccctccggcatcctccagcgatgcatctccatcgccgaaggtcaggaactcctgcgagagatacactcgggggcttgcggccatcacgcggcgcctcgagcccttgtcgggaatgccttccgacaaggcttctactggccgacggcggtggccgacgccactagaattgtccgcacctgcgaagggtgtcagttctacgcaaggcagacccacctgcccgctcaggctctacagacgatacccatcacctggccttttgctgtgtggggtctggacctcgtcggccccttgcagaaggcacccgggggctacacgcacctgttggtcgccatcgacaaattctccaagtggatcgaggtccgacccctaaacagcatcaggtccgagcaggcgctggcgttcttcaccaacatcatccatcgcttcggggtcccgaactccatcatcaccgacaacggcacccagttcaccggcagaaagttcctggacttctgcgaggatcaccacatccgggtggactgggccgccgtggctcatcccatgtcgaatgggcaagtagagcgtgccaacggcatgattctacaagggctcaagcctcggatctacaacgacctcaacaagttcggcaagcggtggatgaaggaactcccctcggtggtctggagcctgaggacaacaccgagccgagccacgggcttcacgccgttcttcctggtctatggggccgaagccatcttgcccacagacttagaatacggctccccgaggacgagggcctacaccgaccaaagcaaccaagctagccgagaagactcgctggaccagctggaggaggctcgggacaaggccttactacactcgacgcggtaccagcagtccctgcgacgctaccacgcccgaggggtccggtcccgagacctccaggtgggcgacctggtgcttcggctgcgacaagacgcccgagggcggcacaagctcacgcccccctgggaggggccgttcgtcatcgccaaagttctgaagcccagaacgtacaagctggccaacagtcaaggcgaggtctacagcaacgcttggaacatccaacagctacgtcgcttctacccttaa

SEQ ID NO: 47055 - DNA, 300 bp, Zea mays
  Clone ID: MRT4577_142922C.1
ttagcaccggacattgtggagacatgatgggctgaaacgactgtaacactggagatgtacactggaatgacgtggcttgcacattctaagagagatcactgcccaagcaacaggaatccaaaatgcaaaggaagctcactggcagatgcactaagggcttgattgggcctagtgataaacggcatcagaaagtattgcattcgagggaaggaggccattgccgctctttggcactggaccgtccgtgaaaagactccctgagcttgtgcagagaatggagagacttgccaacagcaccac

SEQ ID NO: 47056 - DNA, 2178 bp, Zea mays
  Clone ID: MRT4577_142923C.1
atgccgttcggcttgaggaatgtgggtgcgacgtaccagcggtgcatgaaccatgtgttcggcgaacacattggccgcatggtcgaggcctacgtcgatgacatcgtagtcaagacgaggaaagcttccgacctcctttccgaccttgaagtgacattccgatgtctcaaggcgaaaggcgtcaagctcaatcccgagaagtgtgtcttcggggtcccccgaggcatgctcttggggtttatcgtctccgagcggggcatcgaagccaacccggagaagatcgcagccatcaccagtgtggggcccatcaaggacttaaaaggcgtacagagggtcatgggatgtctcgcggctctaagccgcttcatctcacgcctcggcgaaagaggtctgcctttgtaccgcctcttaaggaaggccgagtgcttcacttggacccctgaggccgaggaagctctcgggaacctaaaggcgctcctcacaaaggtgcctatcttggtgcctccagctgtcggagaagccctcttggtctacgtcgccgcgaccactcaggtggttagcgccgcgattgtggtcgagaggcaagaagaggggcatgcattgcccgttcagaggccagtttacttcgtcagcgaagtactgtccgaaaccaagatccactacccacaagttcagaagctgttgtatgcgctcgtcatcgaccaagtcatgaagaactcccactgccgcgacccgaagatggaggcctactgcgatgaggtttggcgcctggaagacaagttctacgggctcgagctcaaccacatcgctcggcgctacaacgagactgtggacgatctggcaaaaatagcctcggggcgaacaacggttcccccggacgtcttctcccgggatctgcatcaacccttcgtcaagatcgacgacacgcccgagcctgaggcgccctcggcccagtccgaggtaccctcggtccagcccgaggtaccctcggcacagcccgaggcaccctcggcctccgagggagagctacccctcgaccgagccgaggctcggcgggtagcgcgacgcgccaagtcgttcgtcttgctgggcgatgaggaggagctctaccaccgcagcccctcaggcgtcctccagcgatgcatctccgtcgctgaagcacctcgagcccttgtcgggaatgctttccgacaaggattctactggccgacggcggtggccgacgccactagaatcgtccgcacctgcgaagggtgtcaattctatgcgaagcagacccacctgcccgctcaggctctgcagacgatacgcatcacctggccctttgctgtgtggggtctggacctcgtcggccccttgcagaaggcgcccgggggctacacgcacctgctggttgccatcgacaaattctccaaatggatcgaggtccgacctctgaacagcatcaggtccgagcaggcggtggcgttcttcaccaacatcatccatcgcttcggggtcccgaactccatcatcaccgacaacggcacccagttcactggcagaaaattcttggacttctgcgaggatcaccacatccgggtggactgggccgccgtggctcatcccatgtcaaatgggcaagtagagcgtgccaacggcatgattctacaagggctcaagcctcggatttacaacgacctcaacaagttcggcaagcgatggatgaaggaactcccctcggtggtctggagcctgaggaccacgccgagccgagccacgggtttcacgccgttcttcctagtctacggggccaaggccgtcttgcccacagacctggaatacggctccccgaggacgagggcctacagcgatcaaagcaaccaagccagccgagaagactcgctggaccagctggaagaggctcgggacaaggccttactacactcggcgcggtaccagcagtccctgcgacgctaccacgcccgaggggtccggccccgagacctccaggtgggcgacctggtgcttcggctgcgacaagacccccgagggaggcacaagctcacgcccccctgggagggaccgttcgtcatcgccaaggttctgaagcccggaacgtacaagctggccaacagccaaggcgaggtctacggcaacgcttggaacatccaacaactacgtcgcttctacccttaa

SEQ ID NO: 47057 - DNA, 3000 bp, Zea mays
  Clone ID: MRT4577_142924C.1
atgaaccatgtgttcggcgaacacattggccgcacggtcgaggcctacgtcgatgacatcgtagtcaagacgaggaaagcttccgacctcctttccgaccttgaagtgacattccggtgtctcaaggcgaaaggggtccagctcaatcccaagaagtgtgtcttcggggttccccgaggcatgctcttggggttcatcgtctccgagcggggcatcgaagccaacccggagaagattgcagccatcaccagcatggggcccatcaaggacttgaaaggtgtacagagggtcatgggatgcctcgcggccctgagccgcttcatctcacgcctcggcgaaagaggtctgcctctgtaccgcctcttaaggaaggccgagtgcttcacttggacccctgaggccgaggaagctctcgggaacttgaaggtgctcctcacaaaggcgcctatcttagtgcctccagctgccggagaagccctcttggtctacgtcgccgcgaccactcaggtggtcagcgccgcgattgtggtcgagaggcaagaagaggggcatgcattgcccgttcagagtccagtttacttcgtcagcgaggtactgtccgaaaccaagatccgctacccacaagttcagaagctgctgtatgcggtgatcctgacgcggcggaagttgcgacactacttcgagtctcatccggtaactgtggtgtcatccttttccctgggggagatcatccagtgccgagaggcctcggacaggattgcaaagtgggcggtggaaatcatgggcgagacaatctcgttcgcccctcggaaggccatcaagtctcaggtctcggcggacttcgtagccgaatgggtcgatacccagctaccgacggctccgatccaaccggagctctggaccatgtttttcgacgggtcgctgatgaagacgggagccggcgcgggcctactcttcatctcgcccctcgggaaacacctacgctatgtgctacgcctccatttcccggcgtccaacaatgtggctgagtatgaggctctggtcaacgggttgcggatcgcgatcgagctaggggtccggcgcctcgacgcccgcggtgactcgcagctcgtcatcgaccaagtcatgaagaactcccactgccgcgacccaaagatggaggcctactgcgatgaggttcggcgcctggaagacaagttctacgggctcgagctcaaccacatcgctcggcgctacaacgagactgcggacgagctggctaaaatagcatcggggcgaacaacggttcccccggacgtcttctcccgggatctgcatcaaccctccgtcaagatcgacaacccgctcgagcctgaggcgccctcgacccagtccgaggtaccctcggtccagcccgaggtaccctcggcacagcccgaggcaccctcagctcggcccgaggcgccttcagttcagcccgaagtaccctcggcctccgagggtgaggcgctgcacattgaggaggagcaaagcggggccacgcctgatcgaaactggcagaccccgtacctgcaatatctccaacaaggagagctacccctcgaccgggccgaggctcgccgggtggcacggcgtgccaagtcgttcgtcttgctgggcgatgagaaggagctctaccaccgcagcccctcaggcatcctccagcgatgcatctccgtcgccgaaggtcaggaactcctgtgggagatacactcgggggcttgcggccatcacgcagcacctcgagcccttgtcgggaatgctttccgacaaggattctactggccgacggcggtggccgacgccactagaatcgtccgcacctgcgaagggtgtcaattctatgcgaagcagacccacctgcccgctcaggctctgcagacgatacccatcacctggccctttgctgtgtggggtctggaccttgtcggccccttgcagaaggcgcccgggggctacacgcacctgctggtcgccatcgacaaattctccaagtggatcgaggtccgacctctgaacaacatcaggtccgagcaggcggtggcgttcttcaccaacatcatccatcgcttcggggtcccgaactccatcatcaccgacaacggcacccagttcaccggcagaaagttcttggacttctgcgaggatcaccacatccgggtggactgggccgccgtggctcatcccatgtcaaatgggcaagtagagcgtgccaacggcatgattctacaagggctcaagcctcggatttacaatgacctcaacaagttcggcaagcgatggatgaaggaactcccctcggtggtctggagcctgaggaccacgctgagccgagccacgggtttcacgccgttcttcctagtctacggggccgaggccgtcttgcccacagacctggaatacggctccccgaggacgatggcctacaacgatcaaagcaaccaagccagccgagaagactcgctggaccagctggaagaggctcgggacaaggccttactacactcggcgcggtaccagcagtccctgcgacgctaccacgcccgaggggtccggtcccgagacctccaggtaggcgacctggtgcttcggctgcgacaagacccccgagggaagcacaagctcacgcccccctgggagggaccgttcgtcatcgccaaggttctgaagcccagaacgtacaagctggccaacagccaaggcaaggtctacggcaacgcttggaacatccaacagctacgtcgcttctaccctcaaaatattttcaagtcgttcatatacctcgcacccacgcaaagtttagtcatcaaggaagggtcggcctcgcctcggcaaagcccgaccctccctcgggggctaaaaggggggcaaccccctctgcgtcgaaattttcctcgaaaaaatatctcttctgtcagaatatctttcgtgctttttgactacttcgaaaagtggatcctgaaaacgacggagtacacgtaa

SEQ ID NO: 47058 - DNA, 396 bp, Zea mays
  Clone ID: MRT4577_142925C.1
cctttgttttgttgggtctgcatagacccctattccttcccattgtcctatgcgacaactgaacggtcgcccagaatgggtccaacgaacaagatcataccggtgctgggatcacactcggaagaggaagaccgtttatacctactagttctgtagacggcgacttggttcatagcatgtgcaaaggagagaacaacatgacctgtgtttggcatggcacgtatcctactggatgaacctttgctcgccgggccaaaacgtcaactccgatggatggatcctgcatatgcttaatgaagagctcccttatcgggggtctgcttacagttagagcttctgagctctctaccaaatgcagaaacggtgcctaagcggaagagggcacaggatccctcc

SEQ ID NO: 47059 - DNA, 2778 bp, Zea mays
  Clone ID: MRT4577_142926C.1
atgccgttcggtttgaggaatgcgggcgcgacgtaccagcggtgcatgaaccatgtgttcggcgaacacatcggtcgcacagtcgaggcctacgtcgatgacatcgtagtcaagacaaggaaggcttccgacctcctctccgaccttgaagtgacattccgatgtctcaaggcgaaaggagtcaagctcaatcccgagaagtgtgtcttcggggtgccccgaggcatgctcctggggttcatcgtctccgagcgaggcatcgaagccaacccggagaagatcgcagccatcaccagcatggggcccatcaaggacttaaaaggcgtacagagggtcatgggatgcctcgcggccctgagccgcttcatctcacgcctcggcgaaagaggtctgcctctgtaccgcctcttaaggaaggccgagtgtttcgcttggacccctgaggccgaggaagccctcgggaacctgaaggcgctccttacaaaggcgcctatcttggtgcccccagctgacggagaagccctcttggtctacgtcgccgcgaccactcaggtggttagcgccgcgattgtggtcgagaggcaagaagaagggcatgcattgcccgttcagaggccagtctacttcgtcagcgaagtactgtccgagaccaagatccgctacccacaagttcagaagctgctgtatgctgtgatcctgacgaggcggaagctgcgacactacttcgagtctcatccggtaactgtggtgtcatccttccccctgggggagatcatccagtgccgagaggcctcgggcaggatcgcaaagtgggcggtggaaatcatgggcgaaacaatctcgttcgcccctcggaaggccatcaagtcccaggtgttggcggacttcgtggccgaatgggtcgacacccagctgccgacggctccgatccaaccggagctctggaccatgtttttcgacgggtcgctgatgaagacgggagccggcgcgggcctgctcttcatctcgcccctcgggaagcacctgcgctacgtgctgcgcctccatttcccggcgtccaacaatgtggccgagtacgaggctctggtcaacgggttgcggatcgccatcgagctaggggtcagacgcctcgacgcccgcggtgactcgcagctcgtcatcgaccaagtcatgaagaactcccactgccgcgacccgaagatggaggcctactgcgacgaggttcggcgcctggaagacaagttctacgggctcgagctcaaccacatcgctcggcgctacaacgagactgcggacgagctggctaaaatagcctcggggcgaacgacggttcccccggacgtcttctcccgggatctgcatcaaccctccgtcaagatcgacgacgcgcccgagcccgaggcaccctcggctcagcccgaggtaccctcggctcagcccgaggcaccctcggctcagcccgaggtaccctcggcccccgagggcggggcactgaacgtcgaggaggggcagagcggggccacgcctgatcgagattggcaggccccgtacctgcaatatctccgccgaggagagctacccctcgaccaagccgaggctcggcgggtagcgcgacgcgccaagtcgttcgtcttgctgggcgacgaggaggagctctaccaccgcagcccctcgggcatcctccagcgatgcatctccatcgccgaaggtcgggaactcctgcaagaagtacactcgggggcttgcggccaccacgcagcgccccgagcccttgtcgggaatgctttccggcaaggcttctactggccaacggcggtggctgacgccactagaattgtccgcacctgcgaagggtgccaattctatgcgaagcggacccacctgcccgctcaggctctgcagacgatacccatcacctggcccttcgctgtatggggtctggacctcgtcggtcccttgcagaaggcgcccgggggctacacgcacctgctggtcgccatcgacaaattctccaagtggatcgaggtccgacccctgaacagcatcaggtccgagcaggcggtggcattcttcaccaacatcatccatcgcttcggggtcccgaactccatcatcaccgacaacggcacccagttcaccggcagaaaattcttggatttttgcgaggatcaccacatccgggtggactgggccgccgtggctcatcccatgtcgaatgggcaagtagagcgtgccaacggcatgattctacaagggctcaagcctcggatttacaacgacctcaacaagttcggcaagcgatggatgaaggaactcccctcggtggtctggagcctgaggacgacgccgagccgtgccacgggcttcacgccgtttttcctggtctacggggccgaggccatcttgcccactgacctggaatacggctccccgagggcgagggcctacaccgatcaaagcaaccaagctagccgagaggaatcgctggaccagctggaggaggctcgggacagggccttactacactcggcgcggtaccagcagtccctgcgacgctaccacgcccgaggggtccggtcccgagaactccaggtgggcgacctggtgcttcggctgcgacaagacgcccgagggaggcacaagctcacgcccccctgggaagggccattcgtcatcgccaaagttctgaagcccggaacatacaagctggccaacaatcaaggcgagatctacggcaacgcttggaacatcaaacagctacgtcgcttctacccttaa

SEQ ID NO: 47060 - DNA, 2439 bp, Zea mays
  Clone ID: MRT4577_142927C.1
atggggcccatcaaggacttgaaaggcgtacagagggtcatgggatgcctcgcggccctgagccgcttcatctcgcgcctcggcgaaagaggcctgcctctgtaccgcctcttaaggaaggccgagtgcttcgcttggacccctgaggccgaggaagccctcgggaacctgaaggcgctcctcacgaacgcgcccatcttggtgccccccgctgccggagaagccctcttggtctacgtcgccgcgaccactcaggtggtcagcgccgcgatcgtggtcgagaggcgagaagaggggcatgcattgcccgtccagaggccagtctacttcgtcagcgaggtactgtccgagaccaagatccgctacccacaagttcagaagctgctgtacgcggtgatcctgacgcggcggaagttgcgacactacttcgagtctcatccggtgactgtggtgtcatccttccccctgggggagatcatccagtgccgagaggcctcgggcaggatcgcaaagtgggcggtggaaatcatgggcgagacaatctcgttcgcccctcggaaggccatcaagtcccaggtcttggcggacttcgtggccgaatgggtcgacacccagctcccgacggctccgatccaaccggagctctggaccatgtttttcgacgggtcgctgatgaagacgggggccggcgcgggcctgctcttcgtctcgcccctcgggaagcacctacgctacgtgctacgcctccacttcccggcgtccaacaatgtggccgagtacgaggctctggtcaacgggttgcgcatcgccatcgagctaggggtccgacgcctcgacgctcgcggcgactcgcagctcgtcatcgaccaagtcatgaagaactcccactgccgcgacccgaagatggaggcctactgcgatgaggttcggcgcctggaggacaagttctacgggctcgagctcaaccacatcgcccggcgctacaacgagactgcggacgagctggctaagatagcctcggggcgaacggcggttcccccggacgtcttctcccgggacctgcaccaaccctccgtcaagaccgacgacacgcccgagcccgaggcgccctcggcccagcccgaggcaccctcggcccccgagggcgaggcgctgcgcgtcgaggaggagcggagcggggccacgcctgatcgagactggcagaccccgtacctgcaatatctccgccgaggagagctacccctcgaccgagtcgaggctcggcggctcgcgcggcgcgccaagtcgttcgtcctgctgggcgacgggaaggagctctaccaccgcagcccctcgggcatcctccagcgatgcatctccatcgccgaaggccaggaactcctgcaagaaatacactcgggggcttgcggccatcatgcagcgcctcgagccctcgtcgggaatgctttccgacaaggcttctactggccaacggcggtggctgacgccactagaattgtccgcacctgcgaagggtgtcaattctatgcgaagcagacccacctgcccgctcaggctctgcagacgatacccataacctggcccttcgctgtgtggggtctagacctcgtcggccctttgcagaaggcgcccgggggctacacgcacctgctggtcaccatcgacaaattctccaagtggatcgaggtccgacctctgaacagcatcaggtccgagcaggcggtgacgttcttcaccaacatcatccatcgcttcggggtcccgaactccatcatcaccgacaacggcacccagttcaccggcaaaaaattcttggacttctgcgaggatcaccacatccgggtggactgggccgtcgtggctcatcccatgtcgaatgggcaagtagagcgtgccaacggcatgattctacaagggctcaagcctcggatttacaacgacctcaacaagtttggcaagcgatggatgaaggaactcccctcggtggtctggagcctgaggacaacgccgagccgagccacgggtttcacgccgttcttcctggtctacggggccgaggccgtcttgcccactgacctggaatacggctccccgaggacaagggtctacgacaatcaaagcaaccaagctagccgagaagactcgctggaccagctggaagaggctcgggacagggccttactacacttggcgcggtatcagcaatccctgcgacgctaccacgcccgaggggtccgaccccgggacctccaggtgggcgacctggtacttcggctgcggcaagacacccgagggaggcacaaactcacgcccccctgggaggggccattcgtcatcgccaaagttctgaagcccgaaacgtacaagctggccaacagtcaaggcgaggtctacggcaacacttggaacatccaacagctacgtcgcttctacccttaa

SEQ ID NO: 47061 - DNA, 316 bp, Zea mays
  unsure (1)..(316): unsure at all n locations
  Clone ID: MRT4577_142928C.1
gccgccaccaggtgcagagtctttcgtcatctcttctccggcgaagaacccncagtcgcccaccagatcactagttaaactttgttgaggggtgatggcggtttcttcgcgacctcacaccgggcagggctaaaagctgatagtcctctactccagtcatactgctccaacttcaagtactgctgctcctcgttctgtcctgcaagttacgacaggggaaaatgtcctggagtacgatctgaggcagggagtatctaagtctagccatcaatgtgtaccagcacttggaggcatatatgtacttgagacaataaag

SEQ ID NO: 47062 - DNA, 2007 bp, Zea mays
  Clone ID: MRT4577_142929C.1
atggggcccatcaaggacttgaaatgcgtacagagggtcatgggatgccttgcggctctgagccgcttcatctcgcgcctcggcgaaagaggcctacctctataccgcctcttaagaaagaccgagcgcttcacttggacccccaaggccgaggaagccctcaggaacctaaaagcgctccttaccagcgcgcccatcttggtgccctccgctgccggagaagccctcttgatctacgtcgccgctaccactcaggtggtcagcgccgcgatcgtggttgagagacgagaagaagggcatgcattgcccgtccagaggccggtctacttcatcagtgaggtactgtctgagaccaagatccgctacccacaaattcagaagatgctatacgcggtgattctgacgcggcggaagttgcgacactacttcgagtctcatccggtgactgtggtgtcatccttccccctgggggagatcatccagtaccgagaggcctcgggtaggattgcaaagtgggcggtggaaatcatgggcgagacaatctcgttcgcccctcggaaggccatcaagtcccaagtcttggcggactttgtggctgaatgggtcgacacccaactcccggcggctgcgatccagccggaactctggactatgtttttcaacgggtcgctgatgaaaacaggggcaagcgcgggcctgctcttcatctcgcccctcgggaagcacctccgctacatgtcgcgcttccatttcccggcgtccaacaacgtggctgagtacgaggctctggtcaacgggttgcgcatcgccatcgagcttggggtccgacgcctcgacgctcgcggtgactcacagcttgtcatcgaccaagtcatgaagaactcccactgtcgcgacccgaagatggaagcctactgcgacgaggttcggcgcctggaggacaagttctacgggctcgaggtcaaccacgtcgcccggcggtacaacgagactgcgaacaagctagcgaagatagcttcggcgcgaacaacggttcccccggacgtcttctcccgagacctacatcaaccctcagtcaagaccgacgacacgcccgagcccgagaaggcctcggcccggctcgaggcaccctcggctaccgagggtttctactggccgaccgcggtggccgacgccactagaattgtccgcacctgccaagggtgtcaattctacgcaaggcagacgcacctacccgctcaagctctgcaaacaatacccatcacctggccgtttgctgggtggggtctggacctcgtcggtcccttgcagaaggcacccgggggctacacacacctgctggtcgccatcgacaaattctccaagtggatcgaggtccaacccctaaacaacattaggtccaaacaggcggtggcgttcttcaccaacatcatccatcgctttggggtcccgaactccatcatcaccgacaatggcacccagttcaccggcagaaagttcctggacttctgtgaggatcaccacatccgggtggactgggccgccgtggctcgccccatgacgaatgggcaagtagaacgtgccaacgacatgattctgcaaggactcaagccgaggatctacaacgacctccacaagttcggcaggcgatggatgaaggaactccccttggtggtctggagcctgaggacgacgccaagtcgagccacgggtttcacgccgttctttctagtctatggagccgaggccatcttgcccacagacttagaatacggttccccaagggcgagggcctacgacgaccgacgcaaccgaaccaaccgagaagactcactagaccagctggaagaggctcgggacatggccttactacactcggcgcggtatcagcagtccctgcgacgctaccacgcccgaggggttcggtcccgagacctccaggtgggcgacttggtgcttcgactacgacaagacgcccgagggcggcacaagatcacgcctccctag

SEQ ID NO: 47063 - DNA, 500 bp, Zea mays
  Clone ID: MRT4577_14292C.1
ggttgatatacttggtgatgaggttgacacccttctaagtgtgctgggaaaaatttatattgcactcgaccattattcgccagttttgaagcattaccctggggctacagagattttgatgcttgtgcagaaggtgttgaaaggagaaagcgtttaacaccgaaccaccatgtgaaaatcttgacagatttcatgtccatattacaaacagtagcgcaagaccctaagaagagttagggtaatgtgctgtgggagaatatttacacgtacttactgcaaaggagcttcctagattatattttttttacgaacagtcgaagtagccatgatggtgtagagtaaccggttttcagcttgctagctagcttcatttgtattacctccgttcttgaatatttgtcgccggcgagttcatttttgaactaaaacgcgacaaataaaaaagaacgcagggagtattagtgtgcagttatagttgagttcagactaggaattcaaag

SEQ ID NO: 47064 - DNA, 489 bp, Zea mays
  Clone ID: MRT4577_142930C.1
gctctatcctataggaattacactataggaatccataggaaggaattcgatgggattggacttgatcgctatggtaagttaacacgggacgtaattaaaccgtgaatccgattcaccaaatccatcattattgtatcactctatgatagatataacgcaacccataccctaatctatattttacagtgattaaagatcttccccttggatattttgaatctaaatacctaaatactaacaaaattctctgttgacagcgatctatgcttcgcagtagtatatactttggatatcgaagtcctagacaggacagaagagtatgcacagattcttcgcattaggcgctatttatatgatcaaaatggactgaactttccaacggattcattccatatgtctacgagtgagtgggatccgctagggcaacgaaatcaagtgcgagtccccttgtcttttttatatgagataactaacacattaccttctgac

SEQ ID NO: 47065 - DNA, 441 bp, Zea mays
  Clone ID: MRT4577_142931C.1
atgccgttcggcttgaggaatgcgggcgcgacgtaccagcggtgcatgaatcatgtgttcggcgaacacattggccggatggtcggggcctacatcgatgacaacgtagtcaagacgaggaaagcctctgacctcctttccgaccttgaagtgacattccgatgtctcaaggcgaaaggtgtcaagctcaatcccgaaaagtgtgtcttcggggtgccccgaggcatgctcttggggttcattgtctccaagcggggcatcgaagccaacccggagaagatcgcagccatcacgcagcaccccaagcccttattggagacacccgggggctacacgcacccctgggaagggccgcttgtcatcgccaaagttctgaagccctggacaaacgaactggccgacagtcaaggcgaggcctacaccaacacttcgaaagtctaa

SEQ ID NO: 47066 - DNA, 454 bp, Zea mays
  Clone ID: MRT4577_142932C.1
aagcagtggtaacaacgcagagtacttttttttttttttttttttttttttttttttcttttttttttttttttttttttttttttttttttttttttttttttttttttttttttttttttttttttttgggaagggaaggattttttttggggggggattaagaaaatttggggggggggaggggggtttaaaaattagttggccccaaaaataatatttgccgggattttattggggggggggaaaattggcacccaaaatcttttttttaaccggttaggcagggtttcccccaaaattaacaacggaggggagggttctgccgggttgccttccgggggggaagactttgttggcccccgggaactttgggttgttaccactgtttaggggcgatttttggcaatttgctccccgcggggggccgccgtggattcgttcaagggggccc

SEQ ID NO: 47067 - DNA, 141 bp, Zea mays
  Clone ID: MRT4577_142933C.1
cccacgcgtccgagttgatcgatgtactaagaacaggatgtcaggacagctagattgattgtgtaatttgtaaccatatatgtatcgtctgatgacattatgggcgtgtttgtttgctgtctgcgaggcagcttttcatct

SEQ ID NO: 47068 - DNA, 381 bp, Zea mays
  Clone ID: MRT4577_142934C.1
cccactcatactcacatacactgatatccttaactgcctcatgagataggtctagggggggtgcttatctcaggggactggcgatgtatacaatcatacctatccatccgaccaagctggtgacgttgcaatctcttacgacacaatcgtgaaggtgattcacatcgcttacacattacaggtacaggagcaacctgctttcgacccagagtcaatgtgatattacataaaaagatacatcatgaatttgactgctgagtgctacacttatactgcacatgtcatgtcattggacatcgtcggtctaaactaatgcttaactagcaagctgttggaccttgaatccgtcgatcccgatagcttgaatgacgatacgctcga

SEQ ID NO: 47069 - DNA, 388 bp, Zea mays
  Clone ID: MRT4577_142935C.1
gttatacatcgcgagcgagcgtcctattttttttctgcagcctaaaatagagtgctgtccaaaaacctgtggttgtgaaagctcacaaaccaacatacgcgtgtgtcccgcttctacttgatttgagttagatcaatgaagcactaatctttcctttgagacaaggtaacaccaactgaggctgaggcagttttgcattgctgagatcgaatgtgggcaggcatatacattcgctaggtgttctttgtacattagttaccatattatctgaaagcatattgcctggcatatttatatcactatattatgatgtcatctgtagccacactaagcaattacgacttatccaccgtgagatatgggccgaacattcaatggtgggaggaaa

SEQ ID NO: 47070 - DNA, 132 bp, Zea mays
  Clone ID: MRT4577_142936C.1
ctcgctctccattctcaagtaatcaggaggcatgactgctcatatatgaattgtatttatgtcgtcacttattaggactacctgagccggaagatatgagatcggcatctctgagcgaataccaatttcaca

SEQ ID NO: 47071 - DNA, 435 bp, Zea mays
  Clone ID: MRT4577_142937C.1
atgtcgagctattgtgatagactatttgtcggtataagtatcactggtgcttctttatgtgtcattatttttggatgtatttttcttatgtgcgtttttgacgggtatgatgagttggctagcaacaacaatgttgaatatattgctggaggagccacccagaactctatcagggttgcccaatatgaactgtttgtttcatccctgaaatatttttgtgccgcagcaacttcagcaaaagcttacaatcgtgaagctgcacgcaagagcctgctgcgaaagaaggcttacattcagcagcttgagagctgtaggctgaagctttcgcagatggaacaggacatgcagcgagcccgttcgcaggctcgctttctaccacttctgtttttctgcttgctgaactgtaaccggacatctgagggcagctctatttag

SEQ ID NO: 47072 - DNA, 130 bp, Zea mays
  Clone ID: MRT4577_142938C.1
tactgggactggccctgtagaggtttattaaccgcggttaccgaggtggttacgcacagagcgaccgctacaatagccagcacagtagagcgagtgcattggctgtttggaaaaccgttctcgctcaggt

SEQ ID NO: 47073 - DNA, 2097 bp, Zea mays
  Clone ID: MRT4577_142939C.1
caaggggtgttcaattaccattaccattacggcagccccccccccgccctcccccccctgtttttttttttttgaccggtcacaatgcagatccccggcgcccccgttatccctcctggagcgacacgatgaaggtgccaaatcacaagcaaactactccaaccaaaccatcactgccaccaccagcagccaaattaggtacaacaaggctaataatcattcgaaaatgacgttctcgcccgtttctgcaccactacaacaacaataacaacaactggaaggggtgggctgcaacccaaggggtgttcaattaccattaccattacggcattaccattaccgatcctgcgcgagaagagggagcaggagcgcaggcacacgaccacaccctaccgcctcagcactggcttgtaaagcacgacggtcacgaacttagccttgaaccggtgcgtgatccccagagcaaccatggacctcgtgttctctttctcgatgtaaaggtggttcagaaccacggtctggggctggggcagcgggctcgactcgtcttggcttggtgggaagctcagcagcgtgtgctgcagatgaggtggcatcagtgggggctcccggccttcgtcttcattcccaggaacagggttgtcgtagctggaatccggtgaaggcgggacttcaaatccaacaacgtggaccccttcatggtcatgcatgccttgttggtccatattccaacagcctgttgccttgtcctggagggagataatacaacatgctcatgttagtaaagaatttaacgacaaaaaaggaatctggactatcatgcttagtaggctcttgagggtcctcattggttttttacagaaacatctactgcagattgcatgtgttgcacacgttcactaaatgtttggatgtcatttgtatgtaactggaagtagatgtcctttgtgctactcatccatagatttggaaatctattgattctattcctcatcattacgaagtcagacacactctatttgtccctgtattgtggtgattactttcctttgcagttaactggaatggaatttatatctggtgtaggttgagacggtctcactttaagattatctggctttgctgtgtactgcaacaagtcttgaaagcttttaagattataccttgttagtgcttgggttctatgtactcccgcgacctcttgcagtatgtgttcatgagacctttttcgttacatgagtagtagttacttcaagtctatgttcagctgtgcgttctttgttttaggttttggaatcgtcagagacaatctgtgataaggtttatcaggttttggaatcgtcagagacaatctatgataagatttctctgagagacaaacatacaccacatgtttataattcgaaaaggtcagtccatttatttcttgttgtactgaaacaaatccgataacagggtcaggttggtaatagctctctatgttgttggacagtgatagtagctgatttacccctgcaggcccccaccgtcaatcagcgtccctccccctaacaccgcaatcagcacacctttcctgatgcagacagtttccaatcgaagtctcttttccatctttcctgagacagttctggttgattttccatttctcttttttttccagtctgaaacgaaccgaactaatgctgcaacgtaccttacctttagaattggtgtcaagtagagtaaaactatataggataccaaaactatctttcattgtgcatttttctcaagcagagtaaatatcagcattttctacttgttagcagtgggtaggggatgcacatgtttgcgtgtaggactgtgaataacaccgatgtttcacatatccctaataaccatcacccttatgcagtttgattctgatgcaattagttcatggatggatatgtttttgcgctgtccatctctagaatgagttaaaacatatttcttgctcatgggagtactgcaactgtaggccattatctggatatctgcagtattatctcaggcaatactactttgtttgtaggaaccaccgccagcaaccatgtcccactcgttgagccttggcgc

SEQ ID NO: 47074 - DNA, 358 bp, Zea mays
  Clone ID: MRT4577_14293C.1
acctttaccttttacctcaaattgccaagcgcgggggcggctttttgaaaaacagagaggggtgtgcatgaatctctatttggcttacctgatgcaccatcatcgaacttggagaccactctgccgcactatgaaccttcagatgttccttccgacatttcatctgtgccaaaggagacaaaatcccaaccccttgcagagaaaatgtctacacgccagctttcatcaggtccagcatctgccggcagagaccctgcttctacatttaaagcctcgcatgaaaagcttctttcgaacaattcggaaattccctaattttggaaagcttttaaagacatcttcacctgtagaactgact

SEQ ID NO: 47075 - DNA, 299 bp, Zea mays
  Clone ID: MRT4577_142940C.1
tttactagaacgagattaattgccaaactgagctttacatcgatatctacgaatactagatcacgaacatgatcttcatcatcgacaggcacatcagcatgaagaacttagtccttatcaacttcattcagactatagctatgtacgatactaactagttcatgttagaattacatgcaatctctaatttctctattatcaaacacttgccagagctgttgaactaaggatacctcgatgatgctagaatggtcgataccacgatccacatcgatgataaccagtacacctgtgaactc

SEQ ID NO: 47076 - DNA, 369 bp, Zea mays
  Clone ID: MRT4577_142941C.1
gccgcggcggaattactgggtggacgagctgttctgtcggcggccgccctcctttggcgcggtgacggtgagggcccctttgacgagagaacggcccacagagacctttgatttgtaacgtgatgggctttgacagatttagtgtggagaccaaggctccctggggacaatatgagaaacagcagattacatgctggtacctggcgcactaaaggctcgttcgagtagtctagcgttggggtccagctatatgggctgggctggactgaggtctaactcaaactaacttgcacctgaacctatctcaacacacggataggggtcaattactgagaccccaaacaaagccttgaggatctttagacacta

SEQ ID NO: 47077 - DNA, 338 bp, Zea mays
  Clone ID: MRT4577_142942C.1
cttacgcgttcccccaaacttcattgatccaaacctcccaccccctcgatgagctctacaccagtcttgggcgaccccaaagaccacatcacacaccactgcctctacaagctcccgacacctacctactaggagcgatacgaactcacccgcgcgtccaggaaccgacagctcaacaaacacgcgcgcctgggctgacacttcggcccaactccccagactactgacatgaacatcgctgtcacccaacctaaaacttctcacaaaccccaatgtcctgacaatactaatttcaaagtgcaaaaactttactcttaaagcacttcaacattttccct

SEQ ID NO: 47078 - DNA, 132 bp, Zea mays
  unsure (1)..(132): unsure at all n locations
  Clone ID: MRT4577_142943C.1
cataggcgcccgcatggactctggccggatcatctacttcatctaacagaaggacgatgggggacgctacnagtcgcacctggcgtaactccagccttacagttccactaacgacaccgtgcacgcccatgt

SEQ ID NO: 47079 - DNA, 424 bp, Zea mays
  Clone ID: MRT4577_142944C.1
aattcggcacgaggttccgccgcctctgtggcgcgcgcggcgcccgccgtctccgacgacctcgtcctccgtatcgccgagcagctcgaggactcggtaacctcgacctccccgctcctcgcccccctccactccgcctccgcgctctccctcctctccacgctctggcccacccgccgctccagcgagaccttccgcttcactgacatctcctacctccgctcccgccccatctctctcccctcccgtgagcctgacctcgcgctgccgttctcccctctctcttccctatggccgtccccgggaccacgccgccgctgcgctggccgctgccgctgaattcgcccacaagaacctcttctacgacttcaacgccgatggggcgagggacgctgtattcgagcacgttcctgaggggggcaat

SEQ ID NO: 47080 - DNA, 599 bp, Zea mays
  Clone ID: MRT4577_142945C.1
gggaaggaaccaaaacaaaacaccttttgggttcatttggaccaaatccccttctggggatccaaaaaaagaaaaaaaaaaaccgaacccaaaaaaaaaaaattcctaaagggtttgggggcctgggaaaatttttatccgggcggtgggaagggggggatcccccggggatgggaacggggaggcagcgcgagcaaccggccaagggggggtttactaatacggttcccccggggggggggggaacccgtccccccccccgaacccggggggaaacggaattttgccccccccccccggagggggctccccgggcccgggcccccccccctgagtcggccccgggggggccccgccccccggggcgtgcgggtgcgggggaaggccttacccggggtcctcccccggggccggcaacggcttgggggaaggggggggcccgaagaacaacggggcctttccccccgggggggggggcaacggcaccccggggaacctggggggcggggcgacccgcacgtttggtctctccggggccgtcggcggggggggcggcttttgttttttctttcctggggggtttggggaccccccccggg

SEQ ID NO: 47081 - DNA, 3168 bp, Zea mays
  Clone ID: MRT4577_142946C.1
atgggcagtcttcagcaacctctccggcccgagacggtgctccgtctcgggagtcttgagttcatgtccttcgacggcagctacgacatgatactccttccaccgccgtgcgacaacgacaatggcggccgacaacccgcccgccggcggcggaatcgacgacatcttccccgcgtggtggaagaacaacattcgagctcgctccgtcctctcccccgccaacggaggaggaggcggggcaaccaaggccaagcaggaggccgcgcttcgtcggccgtcgagcgaatcgacgcccccgacgccccgacggaaggcacgccgggcgtcgacctcgcgttcgagacgaaggcaagcgccgtccccccgcgacacgccgatcccgagcgagaagacgacgccagcgcgctcgcggagagcttgcagggcgtcgcccttgtacctgagatgacggcgcaaccagtccccgatgtgactacgtcgctccgcgtcgaccaaaaggtactgactaattcccatcttacgtcatttcgactcggcctcaacccgcctagcaaccttgctttggcgggcgctctcattgaggcgagtgcaaccccactggggtttcatatgcggttgccttgggaccggttgacggacgtctcgacctacgggccctctgggtccgaggaagatgacgatcccagcgtctgttgggatttctctggacttggcaaccccagtgccatgcgggacttcatgaccgcatgtgactactgcctctccgactgttccaacggtagccgcagccttgacgacgagggctgcggcccaagccgcgaatgtttccacatcgagctaggggatccctccgaaggcaaccatctcggcatgccggtggacggtgatcttcctaggccggtgcctcacgccgacatcccgcgggagctagctgtggtccccgtttcggcggggggtcacgacccacagctcgagcaagtccgcggggcgcaggccaggctcgacgagggaacaggagcgcttgagccgatccgacgggacgtcgggcaggtgtgggcgggccaacccccggccggagaaatacgtcacctgccccaaggtctccagcaccgcgtcgccaacgatgtcagggtcaggccgccgcccgcatccagcggggttggtcagaacctggcagccgcagcgatgctcctccgcgcgatgccggagccatcaactgccgagggtcggcggatccagggagagctcaagaatctcctggaaggcgctgcggtccgacgggccgagagcactgcctcccgaaggcagggatacacctcggaacctcatgccgcgacttcccgattcatgcaggaagcctcggtctacaccgaacgcacgcgcaacaccgcgcctgcggccccgggccacctcggcaacgagcaccatcgacgcgaccgtcgggcccacctcgacgaaagggtgcgccgaggctaccaccccaggcgtggggggcgctacgacagcggggaggatcggagtccctcgcccgaaccacccggtccgcaggccttcagtcgggccatccgacgggcgccgttcccgacccggttccgacccccgactactatcacaaagtactcgggggaaacgagaccgaaactgtggctcgcggactaccgcctgacctgccaactgggtggaacggacgacgacaacctcatcatccgtaacctccccctgttcctctccgacactgctcgcgcctggttggagcacctgcctccggggcagatctccaactgggacgacttgccgggagagtcgctccgggactatatccggcgattctcgaagcagcgcatcgagctgcccaacatcaccgactcggatgtcatcggcgcgttccttgccggcactacctgccgtgacctggtgagcaagttgggtcgtaaaacccccaccagggcgagcgagctgatggacatcgccaccaagttcgcctctggccaggaggcggtcgaggctatcttccgaaaggacaagcagccccagggccgcccatcggaagaggctcccgaggcgtctactccgcgcggcgccaagaagaagggcaagaagaagtcgcaatcgaaacgcgacgccgctgacgcggaccttgtcgccgccgccgagtacaagaaccctcggaagccccccggaggtgcaaacctcttcgacaagatgctcaaggagccgtgcccctaccatcagggacccgtcaagcacactcttgaggagtgcgtcatgcttcggcgccacttccacagggccgggccacccgcggagggtggcagggcccacgacgacgacaagaaagaagatcaccaagcaggagggtaccccgaggtccgcgactgcttcatgatctacggtgggcatgcggcgaatgcctcggctcggcatcgcaagcaagagcgccgggaggtctgctcggtgaaggtggcggcgccagtctgcctagactggtccgacaagcccatcaccttcgaccaggctgaccaccccgaccacgtgccgagcccagggaaatacccgctcgtcgtcgaccccgtcatcggcgacgtcaggctcaccaaggtcctgatggatgggggcagctgcctcaacatcatctacgccgagaccctcaagctcctgcgcgtcgatctgtcctccgtccgagcaggcgctgcgcccttccacgggatcatccctgggaagcgcgtccagcccctcggacgactcgacctccccgtctgcttcggaacgccctccaacttccgaagggagaccttgacgttcgaggtggtcgggtttcgaggaacctaccacgcggtactgggaaggccatgctacgcgaagttcatggtcgtccccaactacacctaccagaagctcaagatgccgggccccaacggggtcatcaccgttggccccacgtacaaacacgcgttcgaatgcgacgtggagtgcgtggagtacgccgaggccctcgccgagtccgaggccctcatcgccgacctggagaacctctccaaagaggtgccagatgtgaagcgtcatgccggcaacttcgagccagcggagacggttaaggccgtccctctcgacaccagcggcgacgcctccaggcagatccggatcggttccgggctcgaccccaaatag

SEQ ID NO: 47082 - DNA, 1614 bp, Zea mays
  Clone ID: MRT4577_142947C.1
cccacgcgtccggcctcaagctgggattggcccgtcggcagaacaagtgcacgcgggaccgggcaacatttcccgctgcagccaacaagcagagggggcgacgatatatagccacgggcggccgttgctggatccggcatcttcctcgatcggcaagacgataggatggggttccacctgctggcgttcgtggcggcgaggggcctcatgcaggcgttcaacctgtcggcgccgctcagcctccggctgccgatcgcgcgccatctgtcggagggactcagggctcgcgcgctcgaactcctccgggcgattgggtgcctcgagcccggccgggatcgccagctgcactgcactgcacaacgcaacctcctcccctcaactacagggaaatcagccatgagtgcgtcgtcggcgaagccagccaccggcggcaagacgtcgtggccggaggtggtcgggctgagcgtcgaggaagccaagaaggtgattctggcggacaagccgaacgccgacatcgtggtgctgcccaccaccacgcaggcggtgacctccgactttgggttcgaccgtgtccgcgtcttcgtcgggaccgtcgcccagacgccccatgttggctaggctagagcctcagcctagaggtcgtcggcaccgccggccatgaccacctgctatatgtcactactagtaataaagtataaataacagggaggatgcatgctcatccttggaatctgtacgcttgttggactactacttggctacttgaaacgactacttggctatttctggattcacaagtaataacactgatatgttccaaaaaaaaaaaaaaaaaagcggccgcaaaaaaaaaaaaaaaaaaaaaaagatcttgactttatcgtgcttcggaatctgagtattgatgggatccgaacaattggaagtgtcctgggtcaaagtattgctcttgactactatatccgtcaagtggatggaatggtagctgagttcacagatatcaaccggggaatggaaaaaactggtaccttcactatggagaggaagaagcttttccagcttgtagggaaggccaactctaacttggctgatgttattcttaagcttggactctttgagaggtcaaacatagcatggaagaatgcaaactatgctcaaatctgggaataccttcgagatgaatacgagctaactcagagatttggaaaccttgattttaagttgaaatttgttgagcacaacatcaggtttcttcaggagatccttcagaacaggaagtcagattttctggaatggcttatcatcatcctgatcagtgttgagatcttgatatctgtttataacataatacaggagcagatgtaggcctttgttccatcctgaacacgagttgcatatgtcttgactctggattttgtgccaccctgccgttggcacagcctcagtttgtaaagaaacatacgtactagagagcctggacccgactcgaaatggtaaacgatggtcgcacacaacatataatttgattgttctcctctgacttgatttggtaatcgcacagcacaaacgctattgtaaagcaggatgtaggagttgtacttttggtggtaagtc

SEQ ID NO: 47083 - DNA, 3039 bp, Zea mays
  Clone ID: MRT4577_142948C.1
atgggcagtctccagcaacctcttcggcccgggacggtgctccgtttcgggagtcttgagttcatgtccttcgacggcagctacgacatgatactccttccaccgccgcgcgacaacgataatggcggccgacaacccgcccgccggcggcggaatcgacgacatcttccccgcgtggtggaagaacaacattcgagctcgccccgtcctctcccccgccaacggagggggaggcggagcaaccaaggccaagcgggaggccgcgcttcgtcggctgtcgagcgaatcgacgtccccagcgccccaacggaaggcacgccgggcgttgacctcgcgttcgagatgaaggcgagcgccgtccccccgcgacacgccaatcctgagcaagtggacgacgccagcgcgctcgcggagagcttgcaggacgtcgccctcgtacctgagacgacggtgcaatcagtccccgacgcgactatgacgctcctcgtcgaccaaaaggtaccgaccgattcccatcctacgtcatttcgactcggcctcaacccgcctagcgacctcgctttggcgggcgctctcgttgaggcgagtgcaaccccactggggtttcgtatgcggtcgccttgggaccggctgacggacgtctcgacctacgggccctctgggtccgaggaagatgacgatcccagcatctgttgggatttctctggatttggcaaccccagtgccatgcgggactttatgatcgcatgtgactactgcctctccgactgttccgacggtagccgcagcctcgacgacgaggactgcggcccaagccgcgaatgtttccacgtcgagctaggggatccctccgaaggcaaccgtctcggcatgccagaggacggtgatctccctaggccagcgcctcgcgctgacatcccgcgggagctagctgtggtccccgttctggcggggggtcacgacccacagctcgagcaagtccgcggggcgcaggccaggctcgacgagggagcaggagcgcttgagccgatccgccgggacgtcgggcaggtatgggcgggccaacccctggccggagaaatacgtcacctgccccagggcttccagcatcgcgtcgccaccaacgacgtcagggttagaccaccacccgcatccagtggggtcgcctcggtctacaccgggcgcacgcgcaacactgcgcctgcggccccaggccacctcggcaacgagcaccatcatcgcgaccgtcgggcccacctcgacgaaagggtgcgccgaggctaccaccccaggcgtgggggacgctacgacagcggggaggatcggagtccctcgcccgaaccacccggtccgcaggccttcaatcgggccatccgacgggcgtcgttcccgacccggttccgacccccgactactatcacaaagtactcgggggaaacgagaccggaactgtggctcgcggactaccgcctggcctgccaactaggtggaacggatgatgacaacctcatcatccgcaacctccccctgttcctctccgacactgctcgcgcctggttggagcacctgcctccggggcagatctccaactgggatgacttggtccaagccttcgccggcaacttccagggcacgtacgtgcgccctgggaattcctgggacctccgaagctgccggcagcagccgggagagtctcttcgggaatacatccggcgattctcgaagcagcgcaccgagctgcccaacatcaccgactcggatgtcatcggcgcgttccttgccggcaccacctgccgcgacctggtgagtaagttgggtcgcaagacccccaccagggcgagcgagctgatggacatcgccaccaagttcgcctctggccaggaggcggtcgaggctatcttccgaaaggacaagcagccccagggccgcccatcggaagaggctcccgaggcgtctactccgcgcggcgccaagaagaaaggcaagaagaagtcgcaagcgaaacgcgacgccgccgacgcggaccttgtcgccgccgccgagtacaagaaccctcggaagccccccggaggtgctaacctcttcgacaagatgctcaaggagccatgcccctatcatcaggggcccgtcaagcacaccctcgaggagtgcatcatgcttcggcgccacttccatagggccgggccacccgcagagggtggcagggcccacgacgacgacaaaaaggaagatcaccaagcaggagagttccccgaggtccgcgactgcttcatgatctacggtgggcatgcggcgaatgcctcggctcggcatcgcaggcaagagcgccgagaggtctgctcggtgaaggtggtggcgccagtctacctggactggtccgataagcccatcaccttcgaccaagctgaccaccccgaccacgtgccgagcccagggaaatacccactcgtcgtcgaccccgtcgtcggcgacgtcaggctcaccaaggtcttgatggatgggggcagctgcctcaacatcatctacgccgagaccctcaggctcctgcgcgtcgatctatcctccgtccgagcaggcgctgcgcccttccacgggatcattcccgggaagcgtgtccagcccctcggacggctcgaccttcccgtctgcttcggaacgccctccaacttccgaagggagactttgacattcgaggtggtcgggttacgaggaacctaccacgcggtactgaggaggccatgctacacgaagttcatggccgtccccaactacacctacctgaagctcaagatgccgggccccaatggggtcatcaccgtcggccccacgtacaaacacgcgttcgaatgcaacgtggagtgcgtggagtacgccgaggccctcatcgccgacctggagaacctctccaaagaggtgccggacgtgaagcgtcatgccggcaatttcgagccagcggagacggttaaggccgtccctctcgaccccagtggcgacacctccaagcagatccggatcagttccgggctcgaccccaaatag

SEQ ID NO: 47084 - DNA, 2529 bp, Zea mays
  Clone ID: MRT4577_142949C.1
atggcgacagggttcatcaaagaggtattccgtcccaaatggcttgccaaccctgtgcttgtgagaaagaaaggagggaaatggcggatgtgtgtagactacactggtctaaacaaagcatgtccgaaggttccctaccctctgcctcgcatcgatcaaatcgtggattccactaccgggtgcgaaaccctgtctttcctcgatgcctactcagggtatcaccaaattaggatgaaagagtccgaccagcttgcgacttctttcatcacacctttcggcatgtactgctatgtcaccatgccgtttggtttgaggaatgcggtcaagacgaggaaagcctccgacctcctttccgaccttgaagcgacattccgatgtctcaaggcgaaaggcgtgaagctcaatcccgagaagtgtgtcttcggggttccccaaggcatgctcttggggttcatcgtctccgagcggggcatcaaggccaacccggagaagatcgcggccatcaccagcattgtgtccatcaaggacttgaaaggcgtacagagagtcatgggatgccttgcggctctgagccgcttcatctcgcgcctcggcgaaagaggcctacctctgtaccgcctcttaaggaaggccgagtgcttcacttggacccctgaggccgaggaagccctcaggaacctgaaggcgctcctcacgaacgcgcccatcttggtgccccccgctgccggagaagccctcttgatctacgtcgtcgcgaccactcagctggttagcgccgcgatcgtagttgagagacgagaagaggggcatgcattgcccgtccagaggccagtctacttcatcagcgaagtactgtccgagaccaagatctgctacccacaaattcagaagctgctgtacgcggtgatcctgacgcggcggaagctgcgacactacttcaagtctcatccggtaactgtggtgtcatccttccccctgggggagatcattcagtgccgagaggcctcgggtagaattgcaaagtgggcggtgaaaatcatgggcgaaacgatctcgttcgcccctcggaaggccatcaagtcccaggtcttggcggacttcgtggctgaatgggtcgacacccagctcccaacagctccgatccaaccggaactctggaccatgttcttcgacgggtcgctgatgaagacaggagcaggcgcagacctgctcttcatctcgcccctcgggaagcacctacgctacgtgctacgcctccacttcccgacgtccaacaatgtggctgagtacgaggctctggtcaacgggttgcgcatcgccatcgacctggggaactcccactgccgcgacccaaagatggaagcctactgcgatgaggctcagcgcctggaagacaaattctacgggcatgagctcaaccacatcgcccgacgctacaacgagactgcgggcgagctggctaaaatagcctcggggcgaacaacggttcccccggacgccttctcccgagacctgcatcaaccctccgtcaagaccgacgacacgcccgagcccgagaaggcctcggcccagcccgaggcaccctcggctcagtccgagataccctcggctcggcccgaggcaccctcggctcaacccgaggcaccctcgattcggcccgagacaccctcgggccccgagggtgaggcactgcgcatagaggaggagcggagcggggtcatgcctaatcgaaactggcagaccccgtacctgcaatatctccaccgaggaaagctacccctcgaccgagccaaagctcggcggttggcgcggcgcgccaagtcgttcgtcttgctgggagacgagaaggagctctaccaccgcagcccctcgggcatcctccagcgatgcattttcatcgccgaaggccaggagctcctacaagagatacactcgggggcttgcggccatcacgcagcacctcgagcccttgttggaaacgccttccgacaaggtttctactggccgacggcggtggccgacgccactagaattgtccgcacctgcgaagggtgtcagttctacgcaaggcagacccacctgcccgctcaggccctgcagactatacccatcacctggccgtttgctgtgtggggtctggacctagtcggccccttgcagaaggcacccgggggctacacgcacctgttggtcgtcatcgacaaattctccaagtggatcgaggtccgacccctaaacagcatcaggtccgaacaggcggtggcgttcttcaccaacatcatccatcgctttggggtcccaaactccatcatcaccgactacggcacccagttcaccggcagaaagttcctagacttctgcgaggatcaccacatccgggtggactgggccgccgtggctcaccccatgacgaatgggcaagtagagcgtgccaacggcatgattctacaaggactcaagcctcggatctacaacgacctcaacaagttcggcaagcggtggatgaaggaactcccctcgacggtctag

SEQ ID NO: 47085 - DNA, 288 bp, Zea mays
  unsure (1)..(288): unsure at all n locations
  Clone ID: MRT4577_14294C.1
gccgatctnatgctnnactgttgntgnncatnangccgngcactgcnattgcgacgcnctnccgcttaccagattcacttagaacnttctnggtaggnaagnctgcagaagtggcattcntgcnatatatgtacatgcctggactttgatanaataccggtngnaacactactcctcaggcntnccttctcacgaagnatgganatagagctgaccacatcggctcctgctgctcnctgntntggttcganccnntngngccccttcggctatgagaaagtnggaaag

SEQ ID NO: 47086 - DNA, 2766 bp, Zea mays
  Clone ID: MRT4577_142950C.1
atgccgttcggcctgaggaatgcaggcgcaacgtaccagcggtgcatgaaccatgtgttcggcgaacacatcggtcgcacagtcgaggcctacgtcgatgacatcgtggtcaagacacggaaggctcccaacctcctctccgaccttgaagtgacattccggtgtctcaaggcgaaaggagtcaagcttaatcctgagaagtgtgtcttcggggtgccccgaggcatgctcctagggttcatcgtctctgagcgaggcatcgaggccaacccggagaagattgcggccatcaccagcatgggacccatcaaggacttaaaaggggtacagagggtcatgggatgcctcgcggccctgagccgcttcatctcacgcctcggcgaaagaggtctgcctctgtaccgcctcttaaggaaggccgagtgtttcgtttggacccctgaggccgaggaagccctcggcaacctgaaggcgctccttacaaaggcgccagtcttggtgccgtcggcggacggagaaaccctcttggtctacgtcgccgcgaccactcaggtggttagcgccgcgattgtggtcgaaaggcaggaggaagggcatacattgcccgttcagaggccggtctacttcatcagcgaagtgctgtccgagactaagatccgctacccacaagttcaaaagctgttgtatgctgtgatcctgacgaggcggaagctacgacactacttcgagtcccatccgatcatccagtgccgagaggcctcgggcaggatcgcaaagtgggcagtggagatcatgggcgaaacgatctcgttcgcccctcggaaggccatcaagtcccaagtgttggcggatttcgtggctgaatgggtcgacacccaactaccaacgactccgatccaaccggagctctggaccatgtttttcgacgggtcgctgatgaagacgggggccggtgcgggccttctcttcatctcgcccctcggaaagcacttgcgctacgtgctgcgcctccacttcccggcgtccaacaatgtggccgagtacgaagctctggtcaacggattgcggatcgtcatcgagctaggggtcagacgcctcgacgcccgcggtgattcgcggctcatcatcgaccaagtcatgaagaactcccactgccgcgacccgaagatggaggcctactgcgacgaggttcggcgcctggaagacaagttcttcgggctcgagctcaaccacatcgctcggcgctacaacgaaaccgcagacgagctggccaagatagtctcggggcgaacgacagtccccccggacgtcttctcccgggatttgcatcaaccctccgtcaagctcgacgacgcgcccgagcctgaggtaccctcagctcagcccgaggtaccctcggctcagcccgaggtatcctcggctcagcccaaggtaccctcggctcagcccgaggtaccctcggcccccgagggcggggcgttgaacgtcgaggaagggcagagcggagccacgccagaccaagattggcaggccccatacctgcaatatctccgtcgaggagagctacccctcgaccaagtcgaggctcggcgggtagcgcgacgcgccaagtcattcgtcttgctgggcgacgaagaggaactctaccatcgcagcccctcgggcatcctccagcgatgcatccccatcgccgaaggtcgggaactgctgcaagaagtacactcgggggcttgcggccaccacgcagcaccccgagcccttgttggaaatgccttccggcaaggcttctactggccaacggcggtggctgacgccactagaattgtccgcacatgcgaagggtgccaattctatgcgaagcggacacacctgcccgctcaggctctgcagacaatacccatcacctggcccttcgctgtatggggtctggacctcgtcggtcccttgcagaaggcgcccgggggctacacgcacctgctggtcgccatcgacaaattctccaagtggatcgaggtccgacccctgaacagcatcaggtccgagcaggcggtggcattcttcaccaacatcatccatcgcttcggggtcccgaactccatcatcaccgacaacggcacccagttcaccggcaaaaaattcttggatttttgcgaagatcaccatatccgggtggactgggccgccgtggctcatcccatgtcgaatgggcaggtagagcgtgccaacggcatgattctacaagggctcaagcctcggatctacaacgacctcaacaagttcggcaggcgatggatgaaggaactcccctcggtggtctggagcctaaggacgacgccgagtcgtgccacgggcttcacgccgtttttcctggtctacggggctgaagctatcttgcccactgacctggaatacggctccccaagggcgagggcctacaccgaacaaagcaaccaagccagccgagaggaatcgctggaccagttggaggaagctcgggacagggccttgctacactcggcgcggtaccaacagtccctgcgacgctaccacgcccgaggggtccggtcccgagaactccaggtgggcgacctggtgcttcggctgcgacaagacgcccgagggaggcacaagctcacgcccccctgggaagggccattcgtcatcgccaaagttctgaagcccggaacatacaagctggccagcaatcaaggcgagatctacggcaacgcttggaacatcaaacagctacgtcgcttttatccttaa

SEQ ID NO: 47087 - DNA, 552 bp, Zea mays
  unsure (1)..(552): unsure at all n locations
  Clone ID: MRT4577_142951C.1
gccggccggngtgcgaaaagcagatatcactcatcagctacctgtatccactctggagtctggaactcccatcatactccacatctccaccggatcagaactacgaaggagaactacgaaggggcggagcggcgcgtcacgcatggagtgatggctgcggcccctactactgcgacggagctggagcacttaagaaatagaaagatgctggacggctgcaatgtccgcttgcgccacctgagtagccacccttggatgcaccatgactttctccatcgacgctggctcgtcctgggggtctaacctttccgagctgcactggctctcgaggctcacctgcagcgacgagaatttcatcataaagtccggtgtccagtgcggcgacgctgcccacggtatcgacctcgtggtatctgatgcctccgcatgtgggataaatattgaaggagagccacacagctatgatcttggttggtgcgccgcgatatatgtgaatgccgcaaatgaaaagtggaaaaactggcgcatgcatgactacattgtgaaggaaca

SEQ ID NO: 47088 - DNA, 3015 bp, Zea mays
  Clone ID: MRT4577_142952C.1
atgggcagtctccaacaacctctccaacccgggacggtgctccgtttcgggagtctggagtttatgtccctcgacggcagctacgacatgatactccttccaccgccgcgcgacaacgacaatggcggtcgacaacccgcccgccggcggcagaatcgacgacatcttccccgcgtggtggaagaacgacattcgagctcgccccgtcctctcccccgccaacagaggaggaggcggggcaaccaaggccaagcgggaggccgcgcttcgtcagctgtcgagcgaatcgacgtccccagcgccccaacggggggcgcgtcgggcgtcgacctcgcgtttgagacgaaggcgagcgccgtccccccgcgacacgccaatcccgagcaagtggacgacgccagcgcgctcgcggagggcctgcaggacgtcgccctcgtacctaagacgacggcgcaatcagtccccgacgtgactatgtcgctcctcgtcgaccaaaaggtactgactgattcccatcctacgtcatttcgacgcggcctcaacccgcctagcgacctcgctttggcgggcgctctcgttgaggcgagtgcaacccctctggggtttcgtatgcggtcgtcttgggaccgattgacggacgtctcgacctacgggccctctgggtccgaggaagatgacgatccccgcgtctgctgggatttctctggatttggcaaccccagtgccatgcgggactttatgaccgcatgtgactactgcctctccgactgtttcgacggtagccgcagccttgacgacaaggactgcggcccaagccgcgaatgtttgcacgtcgagctagggaatccctccgaaggcaaccatctcggcatgccggaggacggtgatctccctaggccggtgcctcgcgccgacatcccgcgggagctagctgtggtccccgttccggcggggggtcacgacccacagctcgagcaagtccgcggggcgcaggccaggctcgacgagggagcaggagcgctcgagtcgatccgccgggacgtcgggcaggtatgggcgggccagcccccggccggagaaatacgtcacctgcaccagggtttccagcaccgcgtcgccaacgacgtcagggtcaggccgccacccgcatccagcgaggtcggtcagaacctggcagccgcggcgatgctcctccgcgtgatgccggagccatcaaccaccgagggtcggcgaatccagggagagctcaagaatcttctggaaggcgctgcggcccgatgggccgagagctctgcctcccgaaggcagggatacccctcggaacctcatgccgcgacttcccgattcatgcgggaagcctcgatctacaccgggcgcacgcgcaacaccgcgcctgcggccccgggccacctcggcaacgagcaccatcgtcgcgaccgtcgggctcacctcgatgaaagggtgcgccgaggctaccatcccaggcgtgggggacgctacgacagtggggaggatcggagtccctcgcccgaaccacccggtccgcaggccttcagtcgggccatccgacgggcgccgttcccggcccggttccgacccccgactactatcacaaagtactcgggggaaacgagaccggaactgtggctcgcagactaccgcctggcctgccaactgggtggaacggacgacgacaacctcatcatctgcaacctccccctgttcctctccgacactgctcgcgcctggttggagcacctgcctccggggcagatctccaactgggatgatttggtccaagccttcgccggcaatttccagggcacgtacgtgcgccccgggaattcctgggaccttcgaagctgccggcaacagccgggagagtctcttcgggactacatccggcgattctcgaagcagcgcaccgagctgcccaacatcaccgactcagatgtcatcggcgcgttccttgccggcaccacctgccgcgacctggtgagcaagttgggtcgcaagacccccaccagggcgagcgagctgatggacatcgccaccaagttcgcctctggccaggaggcggggcccgtcaagcacaccctcgaggagtgcgtcatgcttcggcgccacttccacagggccgggccacctgcagagagtggcagggcccgcgacgacgacaaaagggaagatcaccaagcaggagagttccctgaggtccgcgactgcttcatgatctacggagggcatgcggcgaatgcctcggctcggcatcgcaagcaagagcgccgggaggcctgctcggtgaaggtggcggcgccagtctacctagactggtccgacaagcccatcaccttcgaccaagctgaccaccccgaccacgtgccgagcccggggaaatacccgctcgtcgtcgaccccatcgtcggcgacgtcaggctcaccaaggtcctgatggatgggggcagctgcctcaacatcatctacgccgagaccctcagactcctgcgcgtcgatctgtcctccgtccgagcaggcgctgcgcccttccacgggatcattcctgggaagcgcgtccagcccctcggacggctcgaccttcccgtctgctttggaacgccctccaacttccgaagggagattttgacgttcgaggtggtcgggttccgaggaacctaccacgcagtgttggggaggccatgctacgcgaagttcatggccgtccccaactacacctacctgaagctcaagatgccgggccccaacggggtcatcaccgtcggccccacgtacaaacacgcgttcaaatgcgacgtggagtgcgtggagtacgccgaggccctcgccgagtccgaggccctcatcgccgacctggagaacctctccaaagaggtgccggacgtgaagcgacatgccggcaacttcgagccagcggagacggttaaggtcgtccctctcgaccccagtggcgacacctccaagcagatccggatcagttccgggctcgaccccaaatag

SEQ ID NO: 47089 - DNA, 2616 bp, Zea mays
  Clone ID: MRT4577_142953C.1
atgccgttcggcctgaggaatgcgggcgcgacgtaccagcggtgcatgaaccatgtgttcggcgaacacatcggccgcacggtcgaggcctacgtcgatgacatcgtggtcaagacgtggaaggctcctgacctcctctccgaccttgaagtgacattccggtgtctcaaggcgaaaggcgtcaagctcaatcccgagaagtgtgtcttcggggtgccccgaggcatgctcctggggttcatcgtctccgagcggggcatcgaggccaacccggagaagatcgcggccatcaccagcatggggcccatcaaggacttgaaaggcgtacagagggtcatgggatgcctcgcggccctgagccgcttcatctcacgcctcggcgaaagaggtctgcctctgtaccgcctcttgaggaaggccgagtgcttcgcttggacccctgaggccgaggaagccctcggcaacctgaaggcgctcctcacaaaggcgcctgtcttggtgccgccggcggccggagaagccctcttggtctacgtcgccgcgaccactcaggtggttagcgccgcgattgtggtcgagaggcaggaggaggggcatgcattgcccgttcagaggccggtctacttcgtcagcgaggtgctgtccgagaccaagatccgctacccacaagttcagaagctgctgtatgcggtgatcctgacgcggcggaagctgcgacactacttcgagtcccatccggccatcaagtcccaggtcttggcggacttcgtggccgaatgggtcgacacccagctaccgacggctccgatccaaccggagctctggaccatgtttttcgacgggtcgctgatgaagacgggggccggcgcgggccttctcttcatctcgcccctcgggaagcacttgcgctacgtgctgcgcctccacttcccggcgtccaacaatgtggccgagtacgaagctctggtcaacggattgcggatcgccatcgagctaggggtccgacgcctcgacgcccgcggtgactcgcggctcgtcatcgaccaagtcatgaagaactcccactgccgcgacccgaagatggaggcctactgcgacgaggttcggcgcctggaagacaagttcttcgggctcgagctcaaccacatcgctcggcgctacaacgagaccgcggacgagctggccaagatagcctcggggcgaacgacggtccccccggacgtcttctcccgggatctgcatcaaccctccgtcaagctcgacgacgcgcccgagcctgaggcaccctcggcccagcccgaggtaccctcggccccccccggcgggccctcggccctccccgaggggcagagcggggccacgccagaccaagattggcaggccccatacctgcaatatctccgtcgaggagagctacccctcgaccaagtcgaggctcggcgggtagcgcgacgcgccaagtcattcgtcttgctgggcgacgaagaggaactctaccatcgcagcccctcgggcatcctccagcgatgcatccccatcgccgaaggtcgggaactgctgcaagaagtacactcgggggcttgcggccaccacgcagcaccccgagcccttgttggaaatgccttccggcaaggcttctactggccaacggcggtggctgacgccactagaattgtccgcacctgcgaagggtgccaattctatgcgaagcggacacacctgcccgctcaggctctgcagacaatacccatcacctggcccttcgctgtatggggtctggacctcgtcggtcccttgcagaaggcgcccgggggctacacgcacctgctggtcgccatcgacaaattctccaagtggatcgaggtccgacccctgaacagcatcaggtccgagcaggcggtggcattcttcaccaatatcatccatcgcttcggggtcccgaactccatcatcaccgacaacggcacccagttcaccggcaaaaaattcttggatttttgcgaagatcaccatatccgggtggactgggccgccgtggctcatcccatgtcgaatgggcaggtagagcgtgccaacggcatgattctacaagggctcaagcctcggatctacaacgacctcaacaagttcggcaggcgatggatgaaggaactcccctcggtggtctggagcctaaggacgacgccgagtcgtgccacgggcttcacgccgtttttcctggtctacggggctgaagctatcttgcccactgacctggaatacggctccccaagggcgagggcctacaccgaacaaagcaaccaagctagccgagaggaatcgctggaccagttggaggaagctcgggacagggccttactacactcggcgcggtaccaacagtccctgcgacgctaccacgcccgaggggtccggtcccgagaactccaggtgggcgacctggtgcttcggctgcgacaagacacccgagggaggcacaagctcacgcccccctgggaagggccattcgtcatcgccaaagttctgaagcccggaacatacaagctggccagtaatcaaggcgagatctacggcaacgcttggaacatcaaacagctacgtcgcttctatccttaa

SEQ ID NO: 47090 - DNA, 309 bp, Zea mays
  Clone ID: MRT4577_142954C.1
tggtggactgcgccgcgggcctcggggcctgcaatgtaggatcccggcctgtcggagagctgcggcgcgttcggcgctggcgctggcgctgcgccgtagccggccctggcgtccaagaataagagggtcgaggggaagccgtccatgaacctgatggccgatcgctgctgccgtaagcgcctcaacgaccgcctctccattctacgctccgtcgtgccctagattagcaagatggaccggacttcgattctgggcttcacgatctactacattaaggagctgctggtgagtatcaatctgctttaggaa

SEQ ID NO: 47091 - DNA, 2976 bp, Zea mays
  Clone ID: MRT4577_142955C.1
atgtcgttcggcttaaggaatgcgggtgcgacgtaccagcggtgcatgaaccatgtgttcggcgaacacattggccggacggtcgaggcctacgtcgatgacatcatagtcaagacgaggaaagcctccgacctcctttctgaccttgaagtgacattccgatgtctcaaggcgaaaggcgtgaagcttaatcccgagaagtgtgtctttggggttccccgaggcatgctcttggggttcattgtctctgagcggggcatcgaggccaacccggagaagatcgtggccatcaccagcatgggacccatcaaggacttgaaaggcgtacagagagtcatgggatgtcttgtggctctgagccgcctcatctcacgcctcggcgaaagaggcctgcctttgtaccgcctcttaaggaaggtcgagtgcttcacttggacccctgaggccgaggaagcccttgggaacctgaaggcgctcctcacgaacgcgcccatcttggtgccccccgctggcggagaagccctcttgatttacgtcgccgcaaccactcaggtggttagcgccgcgatcgtggttgagagacgagaagaaggacatgcattgcccgtccagaggccagtctacttcatctgcgaggtactgtccgagaccaagatccgctacccacaagttcagaagctgttgtacgcggtgatcctgacgcggcggaagttgcgacactacttcgagtctcatctggtaactgtggtgtcatccttccccctgggggagatcatccagtgccgagaggcctcgagtagaatcgcaaagtgggcggtggaaattatgggcgaaacgatctcgttcgcccctcagaaggccatcaagtcccaggtcttggcggatttcgtggctgaatgggtcgacacccagctcccaacagttccgatccaaccggaactctggaccatgttcttcgatgggtcgctgatgaagacaggagcaggcgcaggcctgctcttcatctcgcccctcagaaagcatctacgctacgtgctacgcctccacttcccggcgtccaacaacgtggctgagtacgaggctctggtcaatgggttccggatcgccatcgagctaggggtccgacgcctcgacgctcgcggtgactcgcagctcgtcatcgaccaagtcatgaagaactcccactgccgcgacccgaagatggaggcctactgcgatgaggtttggcgcctggaagacaagttctacgggctcgagttcaaccacatcgcccggcactacaacgagactgcggacgagctggctaaaatagcctcggggcgaacaacggttcccccggacgtcttctcccgagacctgcatcaaccctccgtcaagatcgacgacatgcccgagcctgaggcaccctcggcccagtccgaggtaccctcggctcagtccgaggcaccctcggctcggtccgaggcaccctcggctcggcccgaggcaccctcagctcggctcgaggcaccctcggttcagcccgaggtaccctcggcccccgagggtgaggcactgcgcgtcgagggggagcagagcggggtcgcgcctaatcgaaactggcagaccccgtacctgcaatatctccaccgaggagagctacccctcgaccgagccgaagctcggcggttggcgcgacgcgccaagtcgttcgtcttgctgggagatgggaaggagctctaccaccgcagccccacaggcatcctccagcgatgcatttccatcgccgaaggccaggagctcctacgagagatacactcgggggcttgcggccatcacgcagcacctcgagcccttgttggaaacgccttccaacaaggtttctactggccgacggcggtggccgacgccactagaattaaggcacccgggggctacacacacctgttggtcgccaccgacaaattctccaagtggatcgaggtccgacccctaaacagcatcaggtccgaacaggcggtggcgttcttcaccaacatcatccatcattttggggtcccgaactccatcatcaccgacaacggcacccagttcaccggcagaaagttcctggacttctgcgaggatcaccacatccgggtggactgggcagccgtggctcaccccatgacgaatgggcaagtagagtgtgccaacgacatgattctacaaggactcaagcctcggatctacaacgacctcaacaagttcggcaagcgatggatgaaggaactcccctcggtggtctggagcctgaggacaacgccgagccgagccacgggcttcacgccgttctttctagtctatggggccgaggccatcctgcccacagacttagaatacggctccccgaggacaagggcctacgccgaccaaagcaaccaagctagtcgagaagactcgctggaccagctggaagaggctcgggacatggccttactacactcggcgcggtaccagcagtccctgcgacgctaccatgcccgaggggttcggtcccgagacctccaggctcggatcttgacggttgaagggagcagcagcaccctcggcgtcaactacgccttcggcgaggccccgacagccacaatgaataaaacaccggcattcaaggtgccattacaaacggaactccggttccacctccgcaggtacgaacaaccccacatgattggggggcctgcggagcaacagaaggccgacggacggctcgccgtcgcccgctccagcagcagcgacgacgacaacttctgctctggggggccgaatagcagcagcgatgacctcagggtggatgctgctgccataaggccctcgcccatgccctcactcgagaggcaaggacgagcagaaggccgtagagttggaggtcagtccgtgggcggcaccggctatctcgtcggcggagaaacctcttccggctgccgtggcggaaggcggtgccggaagcggctctga

SEQ ID NO: 47092 - DNA, 345 bp, Zea mays
  unsure (1)..(345): unsure at all n locations
  Clone ID: MRT4577_142956C.1
gagtctgtttgagttttggagangatggtgtcgggatgncaggtattgggggtcatcacaagaaagtagtcgaaaaaggctgacaacttgttgtgtaaagttgtttcctatcgtgtctaaagcattttgaaagctgatgttgctgctacttgggcaatctttccttattaatataggtttggcttcgtcgatgctccggtttctaccatataccttatttccttcgagcggtagttcgacgcctttgagtactaacagcattttcggattcctgggtaaagccagaccgactatttgtattaagaaaatattaatggagaatgacatgactctcacagtcatagt

SEQ ID NO: 47093 - DNA, 2523 bp, Zea mays
  Clone ID: MRT4577_142957C.1
atgccgttcggcttgaggaatgcgggcgcgacgtaccagcggtgcatgaaccatgtgttcggcgaacacattggccggacggtcgaggcctacgtcgatgacatcgtagtcaagacgaggaaagcctacgacctcctttccgaccttgaagtgacattccgatgtctcaaggcgaaaggcgtgaagctcaatcccgaaaagtgtgtcttcggggtgccccgaggcatgctcttggggttcatcgtctccgagcggggcatggaagccaacccggagaagatcgcagccatcaccagcatggggcccatcaaggacttgaagggcgtacagagggtcatgggatgtcttgcggctctaagccgcttcatctcacgcctcggcgaaagaggtctgcctctgtaccgcctcttaaggaaggccgagtgcttcacttggacccctgagaccgaggaagccctcgggaacctgaaggcgctcctcatgaatgcgcctatcttggtgccctcagctgccggagaagccctcctgatctacgtcgccgcaaccactcaggtggttagcgccgtgattgtggtcgagaggcaagaagaggggaatgcattgcccgttcagaggccagtctacttcgtcagcgaggtactgtccgaaaccaagatccgctacccacaagttcagaagctgctgtacgtggtgatcctgacatggcggaagctgcggcactacttcgagtctcatccggtaactgtggtgtcatccttccccctgggggagatcatccagtgccgagaggcctcgggtaggattgcaaagtgggcggtggaaattatgggcgaagcaatctcgttcgcccctcggaaggccatcaagtcccaggtcttggcggacttcgtggctgaatgggccgacacccagctcccaacaactccgatccaaccggagctctggaccatgttcttcgacgggtcgttgatgaagacaggagccggcgcaggcctactcttcatctcgcccctcgggaagcacctacgctacgtgctacgcctccatttcccggcgtccaacaatgtggctgagtacgaggctctggtcaacgggttgcggatcgccatcgagctaggggtccgacgcctcgacgctcgcggtgactcacagctcgtcatcgaccaagtcatgaagaactcccactgccgcgacccgaagatggaggcctactgcgatgaggttcggcgcctggaagacaagttctacgggctcgagctcaatcacatcgcccggcgctacaacgagactgcggatgagctggctaaaatagcctcggggcgaacaatggttcccccggacgtcttctcccgagacctgcatcaaccctccgtcaagatcgacgacacgcccgagtccgaggcaccctcggcccagtccgaggcaccctcggctcggcccgaggcaccctcggttcagcccgaggtacccttggcccccgagggcgagacactgcacgtcgggggggagcgaagcggggtcacgcctgatcaaaactggcagaccccgtacctgcaatatctccaccaaggagagctacccccgaccgagccgaagctcgacggttggcgcggagcgccaagtcgttcgtcttgctgggagatgggaaggagctctaccaccgcagcccctcaggcatcctccaacgatgcatctccatcgccgaagaaggcacccgggggctacacgcacctattggtcgccatcgacaaattctccaagtggatcgaggttcgacccctaaacagcatctggtccgagcaggcggtggcgttcttcaccaacatcatccatcgtttcggggtcccgaactccatcatcaccgacaacggcacccagttcaccggcagaaagttcctggacttctgcgaggatcaccacatccgggtggactgggccgccgtggctcaccccatgacgaatgggcaagtagagcgtgctaacgacatgattctacaaggactcaagcctcggatctacaatgacctcaacaacttcggcaagcgatggatgaaggaactcccctcggtggtctggagcctgaggacaacgccgagccgagccacgggcttcacgccgttctttctagtctatggggccgaggccatcttgcccacagacttagaatacggttccccgaggacgagggcctatgctgaccaaagcaaccaagttaatcgagaagactcgctggaccagctgaaagaggctcgggacaaggccttgctgcactcggcgcggtaccagcagtccctgcgacgctaccacgcccgaggggtccggtcccgagacctccaggtggacgacctggtgctttggctgcgacaagacgcccgagggcggcacaagctcacgcccccctgggaggggccgttcgtcatcgccaaagttctgaagcccagaacgtacaagctggccaacagccaaggcgaggtctacagcaacgcttggaacatccaacagctacgtcgcttctacccttaa

SEQ ID NO: 47094 - DNA, 3084 bp, Zea mays
  Clone ID: MRT4577_142958C.1
atgggcagtctccagcaatctttccagcctgggacggtgctctgtttcgggagtcttgagttcatgtccctcaacggcagctacgacatgatactcctgcccccgccgcgcgacagcgataatggcggccgacaacccgcccgccggcggcggaatcgacgacgtcttccccacgtggtggaagaacaacattcaggcttgtcccgtcccctcccccgccgacggaggaggaggcggggcaaccaaggccaagcaggaggcggcacctcgtcggctgtcgagcgagtcgacagcgccggcgccccaacggggggtacgtcgggcatcgacctcgcgtctgagacgaagacgagcgccgtctccccgcaacacgccaaccccaagcaaacggacgacgccagcacgctcgcaaatgacttgctgggcgtcaccctcgtacctgagacgacggtgcagtctgctccggacgtgacttcctcaccgcccgtcgaccaagaggtaccgaccgattcccatctcgtgccttttggattcggcctcgacccaccaagcgacttcgcttcggtggacgccctcatagaggcgagtccaaaccctctggggtatcgtatgcggtcaccctgggaccgactgacggccgtctcgacctacgggccctcggggtccgaggaagatgacgagcccgacttctgttgggatttctccggacttggtaaccccaatgccatgcgggacttcatgaccgcacgcgactattgcctttccgactgttccgacggtagcctcagcctcggcgacgagggctgtggcccaagtcgtgaatgtttccacgtcgatctagggggtcctggcgaaggcaaccatcttggtatgccggagaacggcgatccccctaggcctgtgcctcgcgttgacatccttcgagagctagctgtggtccccgtcccggcggggggtcatgacccacaactcgagcaaatcagcgagatgcaggccaggctcgacgagggagcaggaacacttgagccaatccgctgggacatcgggcaggaatgggcgggccaacctccggccggagaagtacgtcatctcccccagggcttccagcaccgcatcgccgacgatgtcagggtaaggccaccaccgacttccagtggagtcggccagaacctagctgcagcgacaatacttctccgcgcaatgccggagccatcaaccaccgaggggcggcgtatccagggagagctcaagaatctcctggaggatgccgcggtccgacgggccgaaagctccgcctcccaaaggaaggggtgcccctcggaacatcgcgccgcgacttcccgattcatgcgggagcctcggtacacacagggcgcacacgcaacacagcgcctgcggccccgggtcgcctcggcaacgagcaccatcaccgcaaccgtcgggcgcacctcgacgagaggccgcgccatacgacgggcgccgttcccgacccggttccgaaccctgactactatcacaaagtactcgggggagacgagaccggaactgtggctcgcgaactatcggctggcctgccacctgggtggaacggacgatgataacctcatcatccgcaacctccccctgttcctctctgataccgctcgagcctggctggagcacctgcctccggggcagatctccaattgggacgacctggtccaaaccttcaccggcaatttccagggcacatacgtgtgccctggaaactcctgggatctccgaagctgccgacagcagccgggagagtctctccgggactacatccggcgattctcgaagcagcgcaccgagctgcccaacatcaccgattcggatgtcatcggcgcgttcctcgccggcaccacctgccgcgacctggtgagcaagctgggtcgcaagacccccaccagggcgagcaagctgatggacattgccaccaagttcgcctctggccaggaggcagttgaggccatcttccagaaggacaagcagccccagggccgcccaccggaagatgtccccgaggcgtcaactcagtacggcgccaagaagaaaggcaagaagaagtcgcaagcaaaacgcgacgccgccgacgcggaccttgtcgccgcagccgagtacaagaaccctcggaaacctcccggaggtgtcaacctctttgacaagatgctcaaggagtcgtgcccctatcatcaggggcccgtcaaacacacccttgaggagtgcgccatgcttcggcgccactttcacaaggccgggccacccgcggagggtgacagggctcgcgacgatgataagaaggaagatcacaaggcaggagagttccccgaggtccacgactgctacatgatctatggtgggcgagtggcgaacgcctcggctcggcaccgcaagcaagaacgtcgggagggcgaccatcccgaccgcgtgccgagcccggggaaatactcgctcgttgtcgaccccgtcatcagcaacgtcaggctcaccaaggtcctcatggacggaggcagcggcctcaacatcatctacgccgagaccctcgggctcctgcgtatcgatctgtcctcggtccggacgggcgctgcgccttttcacgggatcatccccgggaagcgcgtccaacccctcggacaacttgatctacccgtctgcttcgggacaccctccaacttccgaagggagaccctcacggtcgaagtggtcaggtttcgaggaacctaccacgcagtgctggggaggccatgctacgccaagttcatggccgtccccaactacacctacctcaagctcaagatgccgggccccaacggggtcatcaccgtcggccccacataccgacacgcgtacgaatgcgacgtggagtgcgtggagtacgctgaggccctcgccgaatccgaggccctcatcgccgacctggagagcctctctaaggaggcgccagacgtgaagtgccacgctggcaacttcgagccagcggagacggttaaatccgtccctctcgaccccagcaacgacgcctccaagcagatccggatcggctccgagctcgatcccaaatag

SEQ ID NO: 47095 - DNA, 921 bp, Zea mays
  Clone ID: MRT4577_142959C.1
atggaggcctactgcgacgaagttcggcacctagaagacaagttctacgggctggagctcaacaatatcgctcggcggtacaacgagactgcggatgagctggcaaaaatagcctcggggcggacaacggttccccagacgtcttctccagagacatacatcaaccctccgtcaagatcgacgacacactcgagctcgaggaggcctcggcccagcccgaggtaccctcggccaccgaaggtgaggccctgcgcgtcgaggaagagcggaatggggttgcgccaaaccaaaactggcagaccccgtacctgcaatatctccaccgaggggagctacccctcgacaaggctgaagctcggcaactggctcggcacgccaagtcgttcgtcttactgggtgatgaaaaggagctctaccaccgcagcccctcgggcatcctccaatgatgcatatccgtcgccgaaggacaagagctgttgcaagagatacactcgggggcttgcggtcaccacgcagcacctcgagccctcgtgggaaatgccttccgacaagaaggcacttgggggcttctcgcacctgctggtcgccatcgacaaattatccaagtggatcgaggtccgacccttaaccagcatcaggtccgagcaggcggtggcgttcttcacaaacatcattcatcgctttggggtcccgaactccatcatcgccgacaatggcacgcagttcactaggaagaagttcctagacttctgcgaggaccaccacatccgtgtggactgggccgccgtagctcaccccatgacgaatgggcaggtggagcgtgccaatggtatgattttgcagggacttaaactgtggatctacaacgacctcaacaagtttggcaagtggtggatgaaagagctaccctcggtggtctag

SEQ ID NO: 47096 - DNA, 364 bp, Zea mays
  Clone ID: MRT4577_14295C.1
ttctattttttttttttggggaagatatcatttttgaggacatggaccggggtattacctccctgcgtacaagtcctggtcctactagagcaataagctgttactaaacgagggacactaaaacatgggggcagatattggtaaaaggcatgacctaaacaaattccacaaaactcggatgcatgtaataaaatgtatatttataacaaattctaaatttaccagactgggaaaaatcatattcgaccaaatcaaacatgacaatacaggcgcaccctggattgtgccagaacttatcgttatgcaccttccctataagtggctcaacagatgaatcctgcacattgattacaaaagtttgctt

SEQ ID NO: 47097 - DNA, 444 bp, Zea mays
  Clone ID: MRT4577_142960C.1
cgtcgcgtcagtctggtgcgacctctgcccgccgggagggtcgtcctgtctgcgcccgagtcacagccatggcggcctcgcttctgctgcggcaaggacgagccggggcgctgaagactgtgcttctggaagcaggcgtgtttcgaggagttgctcctgcagtttctctctctgcagaatcaggaaagaatgaaaagggattaccaccgaaccccaagaagcagagcccaccaaagaatgtagtggaaccaaaggagaggggccagcagctcgcccccccaacagcagatgcagtgtccaaaaccttatctgcacccacttcctccccatcagttgtgagccaaagcaggacgctagcgagccctaaccccgatgccagtgtgctgcacacagaccaaaggcttccgaagcttttgtcaagaaagactttggtagagtttcctc

SEQ ID NO: 47098 - DNA, 450 bp, Zea mays
  Clone ID: MRT4577_142961C.1
ggccgcttttttttttttttttttattttttttttttttttttttttttttttttttttttttttttttaatttttttttttttttttggaaaaaaaaaaaacccgtatatttattttgggttggggaacccctaatattgcttggttcaaaaccgccgcccaggtcaacgttttacatggggtgaccgaacatttttattggttggttcccttccattcaactggggggctttaaatcacttgagtggtgccaggcattattttttaaatggggaccccccaacaagaacctcccccccttaaggccccccacaacccccgccctggggggccccccccccctgaattccttgaaggattgggcggcccaaatggcaatcatgtcgaagcaacccttggtgcatcaaaaatggacatcccccccacatgaaaaatacagtttggtatta

SEQ ID NO: 47099 - DNA, 380 bp, Zea mays
  Clone ID: MRT4577_142962C.1
catgtatacatcagatgattccaaatctgctgaaatgtgtttactagccttctgcgactataattgtatcacattggagtcccagaggatcgggctccttttatagccccaaggtgccctctcctggtatgcaagcatcacatgtgctcactacaactccgagactccacgaccacactgtttagtgatttgagagagattcgagcgcatttatgaactgtgactctatcgtcctattattgagctcttgtatttgctttcatgtgtgttgctgatgtgttatatacttgcgtgcgttctactgcctcccttactctgattttggattgtgatcatatcgtgtacggcgtgagagacttcgacttattaagatttctcac

SEQ ID NO: 47100 - DNA, 1540 bp, Zea mays
  Clone ID: MRT4577_142963C.1
agcagtccgggtgaacctaacaaaatggtaccgattccccctccctcagtttctaaacatatcgacaatccctcctccctcgtgccatcgcttgcccctcgctcccctccctctccgcgccgccccctctcgaatcgaaatccctctccgccatgccgaagggcgccaagaagcgcgccaagctcaagaagcagcagcagcagggccaccccgacgatgccggcaacaccaacgccagcaacggcaactgtaacggctgcgatgacaacaacagcgcctcgagcggccgcgacggcgaccaccacctgcggatcccacccaaagtttctcgtgtggatgcgaacgaggactccatggagagctctgaggagatggtcaccccccgagctgccgcgtcggagccggatgaggaggagactaaggccactgcggccgaggtgcccgtggagcgcaccgtcgacgcggacgtcgccggttctggggaggtcatagtggacgcgtttccgccggaaaccgttggacaggaacgtgagggcaaagtggatgaggcagaggtggaggtgcacgccgtggtggcgcaggaaccggaggtaaaggatgtgttggtggccgaggaatccgtggttcaggagccagtgtctgacgcaccggtggcagaggcttcagaggtgaaggagttggccaaggtgcattcggtgcttgaatctgagccgagggttgatgaagggcgtgatgaagtggtggtggtcgacgaaacacctgtagtgcctgaggtacaggaaccagaggtgaaaggcgttgatgctaccgttgtgttgaaggaacaagagaagaatagtggcaatgtggtggccaaggactctgctgaggtttcgcgatctcaggaggctgctggtgtgcatattacagaggtggagcggggacctgcagtggcagtgattgcttcagggcagcgggcaatatggtggaatttctgcggcctttttgatgcctttactggttcagggagatagatgaagggttggaacttgaagccaagaagacaaatgtggtgacgttcagtttaaagctgatgagcagttgtaactagactttttgtttgcatagtcacatgaatgtatgatgaagcagcaggatttcggataacatcgcgctgatgtttacttcctccctgtgtctctgcatgcgtgcaaagctacacccccctggtcgtggactcatggttaatatccttaatttccttagtatccccaacgcctagtgccctttgtctagtgtcgtctaggtactgcctggtcttgtagcataagagttgaggtgggtcgaccgtaaagaaaattttgttgtttctgcctttatacttattttttctggggtgtcgtctgctatgccccttcctctcatggttgtcacttgtaagatatttattcaaacaatttgagatggttctttgaaaagcctcaattcgagattgctgagtgtcagccaggtttgtcataaaaaaaaaaaaaaaaaagggcggccgctcgcgatctagaac

SEQ ID NO: 47101 - DNA, 734 bp, Zea mays
  Clone ID: MRT4577_142964C.1
gccggccggtccgggatctccggactaaatctgagctgattcccgtcgcactgctctgattgcggattcgctcccggtgctggactcgctgctggtaccgctcgccgcgtggctctcctaccgggagcaagatcccgacgaggcactcgttgagggcggggtcaccctccaagcggacagataccattaggacggagccaagcaccccttcatggtcctcgagctctacgccccaatggagtcggacattgctcataaccttggtccacaatacacaaaatgcggcacgaagaacttaccaagcatgacccaccgattgttctcgctacaggatgatgctaacgaggagaagaacaggacactggcataccaagtacgagacaccagggttccctatcctcaagatgttaaggaaccgatggaagaacattccagaatacaagggacctagggaggatgatgacatagcgcatcactggaacatataggtatggccctgcagtgctggagatcaagtcggcagaacgagcgagacggcatttgatgcacaagaatatctatatcgatgaaatcttcagagaattcacagaggctgaagttacgaacttcatgcagattgctgagaagatgatgactgattatgactttggacacattttgtatggaagtcacctcccacgtgccgatgtatctgagaagaatgcattgatctggctgcttgaagcttttgatga

SEQ ID NO: 47102 - DNA, 378 bp, Zea mays
  Clone ID: MRT4577_142965C.1
cccacactctgcctgacacgtgggttatgcccctgtttactcctaccgaacttaccaccagggaagatcttatgcagattccgtcagcacccctgttgaaggcctaccacactgtgtacgaggactacctgtcggagcttgacaaggtcatcaaggttctccatgaccttgtcgacgagcagaattacgcctcgctcatgctcctgcatccatggtacttcatacacacactcgatgtgcgcaccaaaaccggacgccccttctgcgcctttattaacccagtctaactggcgcccggagactacggcggactggcaagtgccattaggctgctatgacacatcaacgacgagtttctcatcctatcatactctgact

SEQ ID NO: 47103 - DNA, 339 bp, Zea mays
  Clone ID: MRT4577_142966C.1
cccatgcgtacccaattagatctggctgtcattaaaacagcttactataggcaggaatccttgcacgatgttgacctgacttaaatccatctcccgagccaaacgcgcctacagcacacgttatcaccttgccataggcgggggaaccgatgagcaaataagctatgcgcagttacatgctagaaactcgagcacacttccgacatctatacacatgaaatgtgcacggcccaataatattgcatccagtctggtggttagaagctacctaaaacaaagaaactcttctggtatgtctatggcgtcctatgctacatcattctactatacaaaaaacac

SEQ ID NO: 47104 - DNA, 319 bp, Zea mays
  unsure (1)..(319): unsure at all n locations
  Clone ID: MRT4577_142967C.1
attgaccctttcccccntttttggggacaacaaccgattcaattcatttttttccaaaagaaaaaatgacccggctcgtgggcccctttagcttttattcggcaactaacacattacacgatggtactggtttttttgggcggggggtgcattaaactaccaggctggtaacaaccgccggggatgtaaacccccctcatcccccgccgatgaaactattctaatttttcctttgaaaataccctaaactggcgcgggcaaaaagctttccctaaccaaccacaaattccccttggaagaagagaaatttttttctttt

SEQ ID NO: 47105 - DNA, 226 bp, Zea mays
  Clone ID: MRT4577_142968C.1
gactgtgcaaagcgagctattcctgcttctctcaagcagagagtcatactgaatttttgagggtccgtaacaagaaagcgcatggcaacttaaaaggccttgtctacttcattaacaccttctattccctggggtcaggcattaaggccaggtaacggcttccggcattcccaaagtcctaaacactattggtattcttcaatcaacggtgtactttcaggaccac

SEQ ID NO: 47106 - DNA, 273 bp, Zea mays
  Clone ID: MRT4577_142969C.1
acatgataaacttattggggaggataacccggagccaagaactcttccttgcggaacaaaggcaccttcataaagtccagatacaagctgatgtggggggggaacactgggggtgggtgcaacaccaacaacagcaaggcactggggtttaataggcgccaccgccgttgaaaccaaaccgtacccttgaaggagcactaaatgtaacttttttacactatactcacggcccgtcaggtgtaaaacggcaagagtgggcttatgcataaccaa

SEQ ID NO: 47107 - DNA, 246 bp, Zea mays
  Clone ID: MRT4577_14296C.1
cctccgccgaaggaatgatacaggatgacctttttcacttaacaaggctgatgctttctattttgaagagggaaacgaccagctgaacactaagattgatcgcaaggactccaccagaatgcatttacctgacgatggtgcggattcaatcactggcatcattcgacaagacgaggctgcagatcagtattgtgtcgaggaaccacacttaaatttatgtgcagcaacctaaaaggaccttgggcg

SEQ ID NO: 47108 - DNA, 267 bp, Zea mays
  Clone ID: MRT4577_142970C.1
ccgctacctcttaagcatctcccgtgatcggtgtctcgactccgctcctcacctcgccaggcatggggaagcatcggaccggaaccaccggtttcagaaggatcggcatgctcgtgcccagcagtcgtcctgcacaccgaggatgtagaggtcagcagcggaaacgagcccttgatcaccacggattacatgacctacatgttcaagtaagacaccgtggacggccaatgtaatcacagcgacctcgccctcaaggacgtcgagacg

SEQ ID NO: 47109 - DNA, 767 bp, Zea mays
  Clone ID: MRT4577_142971C.1
cggccgctcgaggcggcgggcggatttcttaagaacggacatttcttcttccccgaggtcgcggccggcgcccccaaaaccctcgagatctcgctagtccgcacacccctccacagacaccccaacctccagctctcgatcccagcccggcggagccaccagcaccggaggcgcgcccgagatgcgccccaacatcatcacggaggctggggtttcaactaggctgaaccagtggtggggcagcaccccattcattacttccggcgttaccataatatgtgcggcgatatatctggtgtgcctgttggttggatatgactcctacgctgagatatgcttcttgccttctgcagtggcctcacattttcaagtgtacaggttctacacatctgttctgtttcatggctctttgcttcatgtgctattcaacatgctgacctttgtacccttggggaccgagttggagagaattatgggatcagtccgtctcttgttcctgatgttccttcttgcaacaaccaatgcaattttccatctcatcatcgccttcttggtggattataatcctttataccatgtctcatatcttgtggatgaatgttcgattggcttttctggagttatattctcaatgatagtcattgagacaagcctgagtggagtgcaatatcgaagtgtcttcggtctcttcaatgtccctgcaaatggtatgcatggattttgctgatactgtttcagtttctcgctaggaatgtttcattactggg

SEQ ID NO: 47110 - DNA, 526 bp, Zea mays
  Clone ID: MRT4577_142972C.1
aactaaaaagcttcagggttcagaaactaaaacaaccccacaacagcccataaataaacggggcaaacaaaaagaaagggcccaaagggacaacaaatatccataccccgtttttatggggcgcaaattaacacaaggggaagggcccaaccaaactttaggggtacaacaacagttgggccccaaaatgggttccaagcaaactttaagggtactaaaacagctgggggccgaaaaaatgggttactccaagaaggtttttttcaaaaacaaaaaaaaaagaggggacccccccttgatgcccggggggctgggaaatctctaaaaaaaggcttatggggggggaaacttaagggggggaggaaaaaatttccggccaaataatttcccggataatttttgagcggaggttttcgtctatgcccaaaacgaggggcccttgggcggggggatttgcccttggataatacaaaggggacatgtaagggggctcaaaagcttcggggacactgatccttttgggggg

SEQ ID NO: 47111 - DNA, 322 bp, Zea mays
  unsure (1)..(322): unsure at all n locations
  Clone ID: MRT4577_142973C.1
cgcggcggtgctccccggctcctgcgggtggcgccgtggggcgctcggncgcctggctggtggttctcgcgcgggcgtccgccgccgtgcgggcgctccgccggttcttccccgttttttctcggggcggggggctcaatggctcctgcgctcctttccgtgggcgtggtgcgggggggggccgctgagtgggccctctgcggcgggcccggngggcttgctctggcgcggggtgtcgtccggtgctggttccttgccgtttgggctggcgccggggccgctggcgcgctccgcctgccggttttctgcccggtgtttggct

SEQ ID NO: 47112 - DNA, 866 bp, Zea mays
  unsure (1)..(866): unsure at all n locations
  Clone ID: MRT4577_142974C.1
cgcatacatgatcctattcggcttgagccggaatgctgtcttcgttctaatgcttttctggtatatcctatatacggcttattctgcaactctggcattaacagattggagcagtgttttctattcccttatatacacatcagttccaacggtagtagttggcattctcgacaagaacttaagtcataatacccttctttgttacccgagactatatgaggcagggcttcgaaatgagggctacaacttgacactcttctggatcacaatgctcgatacattgtggcaaagccttgttcttttctatgtcccttttttcacatacaatatcagtacaatggacatatggagtctgggaagtttgtggacaattgctgtggttataattgtcaatatccatttagccatggacattcaacgttgggtgcttataacccatcttgctgtatggggttctatagctgctacgtttttgtgcatggtgttaattgactctataccaattttccctaactatgggacaatttacaacatggctgcttcaaggacttactggcttagcgtttgtcttataatagtccttgggttgcttcctcgtctcctttgtaaagtggtatatcagaccttttggccatctgatattcaaatagcaagagaagctgagctttttaaaaagctgccccaacagttggggtccaaggcctgcaagtgaccatcagctaaccaaccagcttcacaccagttaattttgtccaattctaaatttgaggctgtgttgattccattggttggaaccggattttggtccgaaatttggattaataccgccgggagggccaaacttccggtaaanggggtanccaaat

SEQ ID NO: 47113 - DNA, 382 bp, Zea mays
  Clone ID: MRT4577_142975C.1
cggacgcgtggggtcaactctcgtttccccccttgcgccgtcagctatcccggtccattatcggtacgaattcgggagatctccgaattcgggatagataaatttgttgtgctcgcgcaagggagtttggcaaatgagggccgtgcaaatctagaagccccagcctgggggcgggtggttggcctctgactctggggatgtcgcggacccaaagacggatttttgttctggtttcgatccccattgcccccccgcgaggcttcatttttcttcccctttgtcttgacggccttaagttaagcgggtgtgtttcagtgattattattagtatacatctgcactgacatggtacgtttcttgatccgcagttccttgtgaattg

SEQ ID NO: 47114 - DNA, 5151 bp, Zea mays
  Clone ID: MRT4577_142976C.1
atgggcagtctccagcgacctttccagcccggaaccccaacgagggaaacgtcgggcatcgacctcgcatctgagacgaagacgagcgccatttccctgcaacacgccaactccaagcggacggacgatgccagcacgctcgcgaaagacttgccgggcgtcaccctcgtacctaagacgacggtgcagtctacccccgacgtgacttcgtcatcgcccgtcgaccaagaggtaccgaccgattcccatctcgtgccttttggattcggcctcgacccaccaagcgacttcgcttcggtggacgctttcatagaggcaagtccaaaccctctggggtatcgtatgcggtcaccctgggaccggatgacagccgtctcgacctacgggccctcgggctccgaggaagatgacgagcccgactttagttgggatttctccggacttggtaaccccagtgccatgcgggacttcatgaccgcatgcgactactgcctttccgactgttccgacggtagccgcagcttcggcgatgaggactgcggcccaagtcgtgaatgtttccacgtcgatctagggggtcccggcgaaggcaaccatcttggtacaccggaaaacgacgatgtcagggcaaggccgccaccggcttctagtggggtcggccagaacctggctgcagcggcattacttctccgcgcgatgccggagccatcaaccaccgaggggcggcgtatccagggagagctcaagaatctcctggaggatgccgcggtccgacgggccgaaagctctgcctcccgaaggcaggggtacccctcagaacatcgtgccgcgacttcccgattcatgcgggaagcctcggtccacaccgggcgcacgcgcaacacagcgcctgcggccccgggtcgcctcggcaacgaacaccctcaccgcaaccgtcgaacccacctcgacgagagggctttcagccgggccatacgacgggcatcgttcccgacccggttccgaaccccgactactatcacaaagtactcgggggagacaaggccggaactgtggctcgcggactaccggctggcctgccacctgggtggaacggacgatgacaacctcatcatccgcaacctccccttgttcctctccgataccgctcgagcctggctggagcacctgcctccggggcagatctccaactgggacgacctggtccaagccttcgtcggcaacttccagggccagtacgtgcgccctgggaactcctgggatctccgaagctgccgccagcagccgggagagtctctccgggactacatccggcgattctcgaagcagcgcaccgagctgcccaacgtcaccgactcggatgtcatcgacgcgttcctcgccggcaccacctgccgcgacctggtgagcaagctgggtcgcaagacccccaccagggcgagcgagctgatggacatcgccaccaagttctcctctggccaggagaagatgtccccgaggcgtcaactcagcgcggcaccaagaagaaaggcaagaataagtcgcaagccctcggacgtggaccttgtcgccgctgctgagtacaagaaccctcgaaaacctcccgggggcgccaacctcttcgataagatgctcaaggaaccatgcccctatcatcaggggcccgtcaagcacacccttgaggagtgcgccatgcttcggcgccactttcacaaggccgggccaccagcggagggtggcagggctcgcgacgacgataagaaggaagatcacaaggcaggagagttccccgaggtccacgactgctacatgatctacagtgggcgagtggcgaacgcctcggctcgacaccgcaagcaagagcgtcgggaggtctgctcggtaaaggtggcggcgccagtctacctagactggtctgacaagcccatcaccttcgaccaggatgaccaccccgaccgcgtgccgagcctggggaaatacccgctcgttgtcgaccctgtcatcggcaatgtcaggctcaccaaggtcctcatggacggaggcagcagcctcaacatcttctacgccgagaccctcgggctcctgcggatcgatctgtcctcggtctgggcaggcgctgcgccttttcacgggatcatccccgggaagcgcgtccaacccctcggacaactcgatctacccgtctgctttgggacaccctccaacttccgaagggagaccctcacgttcgaggtggtcgggtttcgaggaacctaccacgcagtactggggaggccatgctacgccaagttcatggccgtccccaactacacctacctcaagctcaagatgccgggccccaatggggtcatcaccgtcggccccacatatcgacatgcgtacgaatgcaacgtggagtgcgtggagtacgccgaggccctcgccgaatccgaggccctcatcaccgacctggagagcctctccaaggaggcaccagacgtgaagcgccacgccggcaacttcgagccagcggagacggaagcagtgctcgtcgactttctccgtgcaaacgccgacgtattcgcgtggagtccctcggacatgcccggcataccgagggatgtcgccgagcactcgctggatatccgagctggagcccgacccgtcaagcagcccctgcgccgattcgacgaagaaaagcgcagagccataggcgaggagatccacaagctaatggcggcagggttcatcaaagaggcaaaaggcgtaaagctcaatcccgagaagtgtgtcttcggggtcccccgaggcatgctcttggggttcatcgtctccgagcggggcatcgaggccaacccggagaagatcgcggccatcaccagcatggggcccatcaaggacttgaaagtcgtacagagggtcacgggatgccttgcggctctgagccgtttcatctcgtgcctcggcgaaagaggcctgcctctgtaccgcctcttaagaaaggccgagtgcttcacttggacccctgaggccgaggaagccctcgggaacctgaaagcgctcctcacgaacgcgcccatcttggtgccccccgctgccggagaagccctcttggtctacgtcgccgctaccactcaggtggttagcgccgcgatcgtggttgagagacgagaaatggggcatgcattgcccgtccagaggccagtctacttcatcagtgaggtactatccgagaccaagatctgctacccacaaattcagaagctgctgtacgcggtgatcctaacgcgacagaagttgcgacactactttgagtctcatccggtgactgtggtgtcatccttccccctgggggagatcatccagtgccgagaggcctcgggggcaggcgcgggcctgctcttcatctcgcccctcgggaagcacctacgctacgtgctacgcctccacttcccggcgtccaacaatgtggccgagtacgaggctctggtcaacgggttgcgcatcaccatcgagctgggggtccgacgcctcgacgctcgcggtgactcgcagctcgtcatcgaccaagtcatgaagaactcccactgccgcgacccgaagatggaagcctactgcgatgaggttcggcgcctggaaggcaagttctacaggctcgagctcaaccacatcgcccgacgttacaacgagactgcggacgagctggctaagatagcttcggggcgaacaacggttcccccggacgtcttctcccgagacctgcatcaaccctctgtcaagaccgacgacgcgcccgagcctgaggcaccctcggcccagcccgaggcaccctcggcccccgagggtgaggcactgcgcgtcaaggaggagcggagcggggtcacgcccaatcgaaactggcagaccctgtacctacaatatctccaccgaggagagctacccctcgaccgagccgaagctcagcggttggcgcggcgcagcccctcaggcatcctccagcggttgggggacgggaaggagctcagcggttgggggacgggaaggagctctaccaccgcagcccctcaggcatcctccagcggtgcatatccattgccgaaggccaggagctctttcaagaaatacactcggggccttgcggtcatcacgcagcacctcgagcccttgttggaaacgctttccgacaaggtttctactggccgacagcggtggccgacgccactagaattgtccgcacctgcgaagggtgttagttctatgcgaggcagacacacttgcccgctcaggctctgcagaccatacccatcacccggccgtttgctgtgtgggggtctggacctcgttggccccttgcagaaggcaccagggggctacacgcacctgctggtcgccatcgacaaattctccaagtggatcgaggtccgacccctaaacagcatcaggtccgaacaggcggtggcgttcttcaccaacatcatccatcgctttggggtcccgaactccatcatcaccgacaacggcacccagttcaccggcagaaagttcctggacttctgcgaggatcatcacatccgggtggactgggccgccgtggctcaccccatgacgaatgggcaagtagagcgtgccaacgacatgatcctgcaaggactcaagtcgcggatctacaacgacctcaacaagttcgacaagcgatggatgaaggagctcccctctgtggtctggagtctgaggacaacaccgagccgagccacgggcttcgcaccgttctttctagtctatggggccgaggccatcttgcccacagacttagaatacggttccccgaggacgagggcctacgccgaccaaagcaatcgagctaatcgagaagactcactggaccagctggaagaggctcgggacatggccttactacactcggcgcggtaccagcagtccctgcgacgctaccacacccgaggggttcggtcccgagacctccaggtgggcgacctggtgcttcggctgcgacaagacgcccgagggcggcacaagctcacgcctccctgggaagggccgttcgtcatcgccaaggttctgaagcccggaacgtacaagctggccaacagtcaaggcgaggtctacagcaacgcttggaacatccgacagctacgtcgcttctatccttaa

SEQ ID NO: 47115 - DNA, 2474 bp, Zea mays
  Clone ID: MRT4577_142977C.1
aattcggcacgaggggaagctgggccacaccctctcccgcatcgtcacgtccaagccgcgcttcgccttctcccagcccaggcctaggcccaggcccaggcccgcacaacccggtctgccttcctcacaacccgtctcgatcccgccgcagccgccggagcttccccccttcgtccccaccgccatgccgcaccacggcagccaccgcccgccggcgccgccgccgggtggccccgtgttcccgcgcgcaacgtccacggtggttcccgacccgtcccgcttcttcgcgccgccgctcctcgccgcgccgctccccaccaactccttcttccagaacttcgtgctcaagaacggggaccagccggagtacgtccacccgtactccgtccgctcccccggaggcgccgcactcgacatctgctacccttcgcggaaccactcgccgtccttcgtcatccagaccttcgtccccgacctcaccgtctccgacgccgccgggagcgcgcagcgccactgcgtctcggctttcgacgacctctccgtcacgctcgacgtctccccttccctccgcgcgcacctcgtccgcggatgcccgtacgtcaccgtcaccaccacggccggcgccgtcgacatctccgtcgcgtccgtccatgccttcctcgacgtcgcctcctgcgacgactccggcaccaagtggcgcctcgggatgaacagcggccagaccttcctcctctacgcgtcggccccgatccgcctcgcgcagaccaccaccacgcagctctccgcgcctggcttcgccggagccatccgggtcgcctacctccccgacgcgtccatggagcctgtcctcgaccgctacagccgctgcttcccgaccgccggccacgcggccctgaacaggcccttctgtgtcgactacgcctggcgcaaggacgggcctggggagctgctcatgctcgcccacccgctccacctccgcctgctcgccgaggactgccccgtgcgggtgctcgacgacttccggtaccggagcatcgacggcgatatggtcggcgtggtcggcgacgcctgggtcctgcgcaccgacccggtttccccgacgtggcactcgacccgcggtgttagcgaggacggcgtcgccgaggtggtggccgcgctgcgagtcgacgtggccggcctcgcgtccaccgcgataacaaccacctcgtcctacttctacgggaaggcgatcgcgcgggcggcgcggctggcgctgatcgcggaggaggtcgggtgccccgacgtgatcccggcggtgcagcagttcctcaaggccgctgtgacgccgtggctggacggcagcttccaggggaacggcttcttctacgacgccaaatggggcgggctggtgacgctgcaggggctcaaggactccggcgccgacttcgggttcggcatctacaacgaccaccactaccacctcggctacttcctgtacgccatcgccgtgctgtccaagatcgacccgtgctggggccgcaagtacatgccgcaggcctactccatggtggccgacttcatgacgctgtcgcgcaacaaggccggcgccagcttcacccgcctgcggatgttcgacctctggaagctgcactcgtgggccggggggctgacggagttcgccgacgggcgcaaccaggagagcaccagcgaggccgtgaacgcctactactcggcggcgcttgtggggctcagctacggggacgcgcacctcgtctccgtgggctcgacgctcaccgcgctggagatgctggcggcgcagacgtggtggcacgtccgggaaggggagggcatctacgaggacgacttcagcgggaacaaccgcgtggtcggggtgctgtgggccaacaagcgcgacagcgggctgtggttcgcgccgcccgagtggaaggagtgccggctggggatccagctgctgcccgtgctgcccatcagcgaggcgctgttcccggacgtggcgttcgtcaaggacctggtggcgtggacgctgccggcgctagcgagggacggcgtgggcgaagggtggaaggggttcgtgtacgcgctggaggggatctacgacagggaggcagcgctgaccaagacccgcgccctcaaggggcatgatgatggcaactcgctgaccaacctgctgtggtggctccacagccgaggcagcgtcgtctgtgacggcgacgctgggttcggccgctgctgctggtaccgccagtactgccactgacgaaagtgtggtgaccagcacgagtgtggttgttcatgtctgcttgcggagcagagcacgtagatcagtgaagggatggagttgatacgttgcaaagtcattgtggttgttattcgttgatactacacacttctatacagttgaataaagtcagtcctttatgtgaaaaaaaaaaaaaaaaaaaaaaacagaaaaaactcgaaaggggggcccggtc

SEQ ID NO: 47116 - DNA, 1593 bp, Zea mays
  Clone ID: MRT4577_142978C.1
atgacttctcgactcatgcgggaggcctcggtctacaccgggcgcacgcgggacatgacgcctgcagccccgggtcgcctcggcaacgagcaccaccgccgcgaccgtcgagcccgacttgacgagaaggacgacctagtcaaggctttcgctagaaacttccagggcatgtacgtgcgccctaggaactcttgggatcttcgaagctaccgccagcagccaggggaatccctgcgagaatacatccgacggttttcgaagcaacgcaccgagctgcccaacatcaccgactcagatgtcatcggagcgttcctcgccgacaccacctaccgagacctggtgagcaaactgggccgtaagactcccaccaaggcgagcgagttgatggacatcgccaccaagttcgcctctggtcaggaggtggttgaagccatcttccggaaggacaagcactctcaggggcgccagcaggaagaagtccccgaggcgttcgcccagcggggcacgaagaagaaggcgaaaaagaagtcgcaagcgaagcgcaacgccgccgacgtagatcttgtcgctgctgtcaaacataggaaccctcggaagcctcccagaggggccaacctgttcgacaagatgctcaaagagtcgtgcccctatcaccagggtcccgtcaagcatacccttgaggaatgcgtcatgcttcggcgctacttccataaggctgggctcccgacggaaggtggcaaaggccaagacaacgacaagaaggagggcgacaaggcagaggagttccccgaggtccacggctgtttcatgatctatggtgggcaagtggcaaacgcctcggctcggcaccgcaagcaggagcgccaggaggtctgctcggtaaaggtggcggtgccagtctacctagtctggtccgacaagcccatcaccttcgaccaaggcgaccgccccgactgcgtgccgagcccaggaaaatacccgcttgtcgtcgaccccgtcatcggcaacaccaggatcaccaaggtcctcatggatggaggcagcagcctcaacatcatctatgatgagaccctcgggctcttggaaatcgatctgtccacgatccgggccggtgcagcgccctttcacgggatcatccccgggaagcgcgtcctgccccttggacaactcgacctgcccgtctgctttggaactccctccaacttccgaaaggaaaccctcacgttcgaggtggtcgggttccgaggaacctaccacgcggtgctggggagaccgtgctacgccaagttcatggccgtccccaactacacctacctcaagctcaagatgtcaggccccaacggggtcatcaccgtcggatccacgtaccgacacgcgtacgaatgcgacgtggagtgcgtggagtacgctgaggccctcgccgagtccgaggccctcatcgccgacctggagtgcctctccaaggaggtgcctgatgcgaagcgccacgccggcaacttcgagccgaccgaggcggttaagaccgtcgccctcgaccccagcaacgatgcctgcaagcaagtccggatcggctctgagcttgaccctaaatag

SEQ ID NO: 47117 - DNA, 2148 bp, Zea mays
  Clone ID: MRT4577_142979C.1
atgccgtgcttgaggaatgcgggcgcaacgtaccagcggtgcatgaaccatgtgttcggcgaacacattggccgctcggtcgaggcctacgtcgatgacatcgtagtcaagacgaggaaagcttccaacctcctttctgaccttgaagtgacattccgatgtctcaaggcgaaagacgtcaagctcaatcccgagaagtgtgtcatcggggtgccccgaggcatgctcttggggttcatcgtctccgagcggggcatcgaagccaacccggagaagatcgcagctgtcaccagcatggggcccatcaaggacttgaaaggcgtacagagggtcatgggatgtctcgcggctctgagccatttcatctcacgcctcggcgaaagaggtctacctctgtaccgcctcttaaggaaggccgagtgcttcacttggacccctgaggccgaggaagctctcgggaacttgaaggcgctcctcacaaaggcgcctatcttggtgcctccagctgccggagaagccctcttggtctacgtcgccgcgaccactcaggtggttagcgccgcgattgtggtcgagaggcaagaagaggggcatgcattgcctgttcagaggccagtttacttcgtcagcgagatcatccagtgccgagaggcctcgggtaggattgcaaagtgggcggtggaaatcatgggcgagacaatctcgttcgcccctcggaaggccatcaagtcccaggttttggcagacttcgtggccgaatgggtcgacacccagctaccgacggctccgatccaaccggagctctggatcatgtttttcgacgggtcgttgatgaagacgggggccggtgcaggcctactcttcatctctcccttcgggaaacacatacgctatgtgctacgcctccatttcccggcgtccaacaatgtggctgaggatgaggctctggtcaacgggttgcggatcgccatcgagctaggggtccggcgcctcgacgcccacggtgactcgcagctcgtcatcgaccaagtcatgaagaactcccactgccgcgacccgaagatggaggcctactgcgacgaggttcggcgcttggaggacaagttctacgggctcgagctcaaccacatcgctcggcgctacaacgagactgcggacgagctggctaaaatagcctcggggcgaacaacggttcccccgggcgtcttctcccgggatctgcatcaaccttccgtcaagatcgacgacacgcccgagcctgaggcgccctcggcccagtccgaggtaccctcggcccagcccgaggtaccctcagcacagcccgaggcaccctcagctcggcccgaggcgccctcggttcagcccgaggtaccctcgacccccgagggtgaggcactgcgcgtcgaggaggagcgaagcggggccacgcctgatcgaaactggcagaccccgtacctgcaatatctccaccgaggagagctacccctcgaccgagccgaggctcggcgggtggcgcggcgcgccaagtcgttcgtcttgctgggcgatgagaaggagctctaccaccgcagccccttaggcatcctccagcgatgcatctccgtcgtcgaaggcttctactggccgacgacggtggccgacgccactggaattgtccgcacctgcgaagggtgtcaattctatgtgaagcagacccacctgcccgctcaggctctacagacgatacccatcacctggcccttcgctgtgtggggtctggacctcgttggccccttgcagaaggcacccgggggctacacgcacctgctggtcgccatcgacaaattctccaagtggatcgaggtccgacctctgaacagcatcaggtccgagcaggcggtggcgttcttcaccaacatcatccatcgcttcggggtcccgaactccatcatcaccgacaacggcacccagttcaccggcagaaagttcttggacttctgcgaggatcaccacatctgggtggactggtccgccatggctcatcccatgtcaaatgggcaagtagagcgtgccaacgacatgattctacaagggctcaagcctcggatctataacgacctcaacaagttcggcaagcgatggatgaaggaactcccctcggtggtctag

SEQ ID NO: 47118 - DNA, 224 bp, Zea mays
  Clone ID: MRT4577_14297C.1
aggttcacaggattcctactctgcgcagggtgttgtaactgaacctgtcattgctatggtgccctttatgagttattttctcagttctatggtactgtcatgctgaaatgtggtgccgatcccaactttgaaacctgtcgagttgtatcaggaaggtctgaactgaacagacatatcgaaccgaaacctgtgctaatctgaaataaagcaattaagacgtttag

SEQ ID NO: 47119 - DNA, 444 bp, Zea mays
  unsure (1)..(444): unsure at all n locations
  Clone ID: MRT4577_142980C.1
ccggccgggacttctatctgttgaaattgaccatatgtacccaatgaaactacaatgtcttgtattattgtaaatagaccgatctgacaataacatgtctgcctaaaacaatatgtctcgtggaaccgcacatgcatatacattatgtcagtcaacctctccctgctgcatagtgtgaacttgcgtagaagagtattctcgagcgtcgtcaggtatttnggactggatgcacggatcttagccatgtgcgcgcgtgccaaaaacacatgccgttgctgctttacagcggcttgcgtttccgtgtacttttcaactacttgaacatgggggccatgattctttgttcatcttgcatgtaactaactgctggtgctccaaccatgatgaattggcggaaccagtcttacctttttaaatcactaccactcctcctcgaacaagaac

SEQ ID NO: 47120 - DNA, 1962 bp, Zea mays
  Clone ID: MRT4577_142981C.1
atggtgctcggtttcgggagccttgagttcatgtccctcgatggcggctacgacatgatactcattccaccgccgggcgacagcggcaatggcggccgacagtccgcccgccggcggcggaatcgacgacgtcttccccgcgtggtggaagaacaaccttcgagctcgccccgccctcttccccgccgacggagaggaaggcggggcaaccaaggccaagcaggaggcagcgcctcgtcggctgtcgagcgagtcgacagcgccagcacctcaacggggggcgcgccgggcatcgacctcgcgcttgagacgaagacgagcgctatctctccgcgacacgccaatcccgagcaagcggacgacgccagcacgctcgcggaaggcttgctgggtgtcaccctcgtacctgagacgacggtgcagtcagtccccgacgtgacttcatcaccgcccgtcgaccaagaggtaccgaccgattcccatcccacgtctttcggattcagcctcgacccgcctagcggcttcgctttggcgggcgctctcgtagaggcgagtccaaaccctccggggtttcgtatgcggtcaccttgggaccggctgacagacgtctcgacctacgggccctctgggtccgaggaagacgacgagcccagcttctgttgggatttctatggacttggcaaccccagtgccatgcgggacttcatgaccgcatgcgactactgcatttccgactgttccgacggtagccgtagcctcggtgacgaggactgcggcccaagccgcgaatgtttccacgtcgatctagggggtccctccgaaggcaaccatctcgacatgccggaggacagtgatctccctaggccagtgcctcgcgttgacatcccacgggagctagctgtggtccccgttcaggcggggggccatgacccacagctcgagcaaatccgcggggtgcaggccaggctcgacgagggagcaggagcgcttgagccgatccgccgggacgtcgggcaggcatgggcggcccaacctccagccggagaaatacgtcatctaccccagggcttccagcaccgcatcgccgacgacgtcagggtcaggccgccacccgcatctagtggggtcggccagaacctggctgcagcagcaatgctcctccgcgcgatgccggagccatcaaccaccgcggggcggcgaatccagggagagctcaagaatctcctggaaggcgccacggtccgacgggccgagagctccgcctcccgaaggcaggggtacccctcggaacctcatgctgcgacttcccgattcatgcgggaagcctcagtctacaccgggcgcacgcgcaacacagcgcctgcggccccgggtcgcctcggcaacgagcaccatcaccgcgaccgtcgggcccacctcgacgagagggtgcgccgaggctaccaccccaggcgtgggggacgctacaacagcggggaggatcggagcccctcgcccgaaccacccggtccgcaggccttcagccgggccatacgacgggcgccgttcccgacccggttccgacccccgactactatcacaaagtactcgggggagacgagaccggaactgtggctcgcggactaccgtctggcctgccaactgggtggaacggacgatgacaaccccatcatccgtaacctccccctgtttctctccgacaccgcccacgcctggttggagcacctgcctccggggcagatctccaactgggacgacctagtccaagctttcgccgattacatccggcgattctcgaagcagcgcaccgagctgcccaacatcaccgactcggatgtcattggcgtgttcctcgctggcaccacctgccgcgacctggtgagcaagctgggtcacaagacccccaccagggcgagcgagctgatggacatcgccaccaagttcgcctccggccaggaggcg

SEQ ID NO: 47121 - DNA, 168 bp, Zea mays
  Clone ID: MRT4577_142982C.1
ggccggccgagttcccgggtcggaccacagcgtccgcccatgcgtgcgcccacgcggccggttcaacgtacgcttgcgatgcgcgccgctagctctctcttttaccactctcgagcactgcctcacacaggacccttctcactggcacagtatcggtgatccagacac

SEQ ID NO: 47122 - DNA, 2577 bp, Zea mays
  Clone ID: MRT4577_142983C.1
atgccgttcggcttgaggaatgcgggcgcgacgtaccagcggtgcatgaaccatgtgttcgacgaacacattggccgcacggtcgaggcctacgtcgatgacatcgtagtcaagacgaggaaagcctccgacctcctttccgaccttgaagtgacattccgatgtctcaaggcgaaaggcgtcaagctcaatcccgagaagtgtgtcttcggggtgccccgaggcatgctcttggggttcatcgtctccgagcggggtatcgaagccaaccctgagaagatcgcagccatcaccagcatggggcccatcaaggacttgaaaggcgtacagagggtcatgggatgtctcgcggctctgagccgcttcatctcacgcctcggcgaaagaggtctacctctgtactgcctcttaaggaaggccgagtgcttcacttggacccctgaggccgaggaagcccttgggaacctgaaggcgctcctcatgaaggcgcctatcttggtgcccccagctgccggagaagccctcttggtctacgtcgccgcaaccactcaggtggttagcgccgcgattgtggtcgagaggcaagaagaggggaatgcattgcccgttcagaggccagtctacttcgtcagcgaggtactgtccgaaaccaagatccgctacccacaagttcagaagctgctgtatgcggtgatcctgacacagcggaagttgcgacactacttcgagtctcatccggtaactgtggtgtcctccttccccctgggggagatcatccagtgccgggaggccacgggtagaatcgcaaagtgggcggtggagatcatgggcgaagcaatctcgttcgcccctcggaaggccatcaagtcccaggtcttagcggacttcgtagccgaatgggtcgacactcagctaccgacaattccgatccaaccggaactctggaccatgttcttcgacgggtcactgatgaagacaggagccggcgcaggcctactcttcatctcgcccctcgggaagcacctacgctatgtgctacgcctccatttcccggcgtccaacaatgtggccgagtatgaggctctggtcaacggattgcggatcgccattgagctaggggtccgacgcctcgacgctcgcggtgactcgcagctcgtcatcgaccaagtcatgaagaactcccactgcggcgacccgaagatggaggcctactgcgatgaggttcggcgcctggaagacaagttctacgggctcgagctcaaccacatcgcctggcgctacaacgagactgcggatgagctggctaaaatagcctcggggcgaacaacggttcccccggacgtcttctcccaggatctgcatcaaccctccgtcaagatcgacgacacgctcgagcttgaggcaccctcggcccagcccgaggtaccctcggcacagatcgaggcaccctcggcacagcccgaggcaccctcggcccccgagggcgagacgctgcgcatcgagggggagcaaagcggggtcaagcctgatcaaaactggcagaccccgtatctgcaatatctccaccgaggagagctacccctcgaccgagccgaagctcggtggttggcgcggcgcgccaagtcgttcgtcttgttgggagatgggaaggagctctaccaccacagcccctcaggcatcctccagcgatgcatctccatcaccgaaggtcaggaactccttcgagagatacactcgggggcttgtggccatcacgcagcacctcgagccctcatcgggaatgctttccgacaaggcttctactggccgacggtggtggccgacgccactagaattgtccgcacctgcgaagggtgtcagttctacgcaaggcagacccacctgctcgctcaggctctgcagacgatacccatcacctggcctttcgctatgtggggtctggacctcgtcggccccttgcagaaagcacccgggagctacacgcacctgttggtcgccatcgacaaattctccaagtggatcgaggcggtggtgttcttcgccaacatcatccatcgtttcggggtcccgaactccatcatcaccgacaacggcacccagttcaccggcagaaagttcctggacttctgcgaggatcaccacatccgggtggactgggccgccgtagctcaccccatgtcaaatgggaaagtagagcgtgccaacggcatgattctacaagggctcaagcctcggatctacaatgacctcaacaagttcggcaagcgatggatgaaggaactcccctcggtggtctggagtctgaggacaacgccgagccgagccacgggcttcacgccgttcttcctagtctacggggccgaggccgtcttgcccacagacctggaatacggctccccgaggacgagggcctacaccgaccaaagcaaccaagctagtcgagaggactcgttggacaaggccttactacactcggcgcggtaccagcagtccctgcgacgctaccacgcccgaggggtccggtcccgagacctccaggtgggcgacctggtgcttcggctgcgacaagacgcctga

SEQ ID NO: 47123 - DNA, 585 bp, Zea mays
  Clone ID: MRT4577_142984C.1
atgctcaaggagtcgtgcccctatcatcagggtcccgtcaagcacacccttgaggagtgcgtcatgcttcggcgctacttcaacaagtccgggccactggcggaaggtggcaaagcccacgacaacaacaagaaggaaggccacaaggcggaggagttccccgaggtggcgaacgcctcggctcggcaccacaagcaggagcgccgggaggtctgctcggtgaaggtggcggcgccagtctacctagactggtccgacaagcccatcaccttcgaccaaggcgaccaccccgaccgcgtgccaagcccggggaagtacccgctcgttgtcgatcccttcatcggcaacgtcaggcttaccaaggtcctcatggacggaggcaacagcctcaacatcatctacgccgagaccctcgggctcttgcagatcgatttgtccacgatccaggccggtgcggcgccctttcacgggatcatccccgggaagcgtgtccagccccttggacaacttgatctgcccatctgcttcgggactccctccaacttccgaaaggaaaccctcacgttcgaggtggtcgggttctga

SEQ ID NO: 47124 - DNA, 2841 bp, Zea mays
  Clone ID: MRT4577_142985C.1
atgccgttcggtttgaggaatgcgggtgcgacataccagcggtgcatgaaccatgtgttcggcgaacacatcggtcgcacagtcgaggcctacgtcgatgacatcgtagtcaagacaaggaaggcttccgacctcctctccgaccttgaagtgacattccgatgtctcaaggcgaaaggagtcaggctcaatccggaaaagtgtgtcttcggggtgccccgaggcatgctcctagggttcatcgtctccgagcgaggcattgaagccaacccggagaagatcgcggccatcaccagcatggggcccatcaaggacttaaaaggtgtacagagggtcatgggatgtctcgcggccctgagccgcttcatctcacgcctcggcgaaagaggtctgcctctgtaccgcctcttgaggaaggccgagtgtttcgcttggacccccgaggccgaggaggccctcggcaacctgaaggcgcttcttacgaaggcacctgtcttggtacccccggcagatggagaagccctcttggtctacgtcgccgcgaccactcaggtggttagcgccgcgattgtggtcgagaggcaagaagaagggcatgcattgcccgttcagaggccggtctacttcgtcagcgaagtactgtccgagaccaagatccgctacccacaagttcagaagctgctgtatgctgtgatcctgacaaggcggaagctgcgacattacttcgagtctcatccggtaactgtggtgtcatccttccccctgggggagatcatccagtgccgagaggcctcgggcaggatcgcaaagtgggcagtggaaatcatgggcgaaacgatctcgttcgcccctcggaaagccatcaagtcccaggtcttggcggacttcgtggccgaatgggtcgacacccagttgccgacggctccgatccaaccggagctctggaccatgtttttcgacgggtcgctgatgaagacaggagccggcgcgggcctgctcttcatctcgcccctcggaaagcacttgcgctacgtgctgcgcctccatttcccggcgtccaacaatgtggccgagtacgaagctctggtcaacgggttgcggatcgccatcgagctaggggtcagacgcctcgacgcccgcggtgattcgcagctcgtcatcgaccaagtcatgaagaactcccactgccgcgacccgaagatggaggcctactgcgacgaggttcggcgcctggaagacaagttcttcgggctcgagctcaaccacatcgctcggcgctacaacgaaaccgcagacgagctggctaaaatagcctcggggcgaacgacggtccccccggacgtcttctcccgggatctgcatcaaccctctgtcaagatcgacgacgcgcccgagcccgaggtaccctcggctcagcccgagataccctcggcacatcccgaggtaccctcggttcagcccgaggtaccctcggcacatcccgaggtaccctcggttcagcccgaggtaccctcggcacggcccgaggtaccctcggcccccaagggcgaggcactgggcgtcgaggaagagcagaacggggccacgccagatcgagattggcaggccccgtacctgcgatatctccgtcgaggagagctaccccccgaccaagtcgaggctcggcgggtagcgcgacgcgccaagtcgttcgtcctgctgggcgatgaagaggagctctaccatcgcagcccctcgggcatcctccagcgatgcatctccatcgccgaaggtcgggaactcctgcaagaaatacactcgggggcttgcggccatcacgcagcaccccgagcccttgtcgggaatgccttccgacaaggcttctactggccaacggcggtgactgacgccactagaattgtccgcacctgcgaagggtgccaattctatgcgaagcgaacccacctgcccgctcaggctctgcagacgatacccatcacctggcccttcgctgtatggggtctggacctcgtcggtcccttgcaaaaggcgcccgggggctacacgcacctgctggtcgccatcgacaaattctccaagtggatcgaggtccgacctctgaacagcatcaggtccgagcaggcggtggcgttcttcaccaacatcatccatcgcttcggagtcccgaactccattatcaccgacaacggaacccagttcaccggcaaaaaattcttggatttttgcgaggatcaccatatccgggtggactgggcagccgtggctcatcccatgtcgaatgggcaagtagagcgtgccaatggcatgattctacaggggctcaagcctcggatctacaacgacctcaacaagttcggcaagcggtggatgaaggaactcccctcggtggtctggagcctaaggacgacgccgagtcgtgccacgggtttcacaccattcttcctggtctacggggctgaagctatcttgcccactgacctggaatacggctccccgaggacgagggcctacaccgatcaaggcaaccaagctagccgagaagaatcgctggaccagctggaggaggctcgggacagggccttactacactcggcgcggtaccagcagtccctgcgacgctaccacgcccgaggggtccggtcccgagacctccaggtgggcgatctggtgcttcggctacgacaagacgcccgagggaggcacaagctcacgcccccctgggaagggccattcgtcatcgccaaagttctgaagcccggaacatacaagctggccaacaatcaaggcgagatctacggcaacgcttggaacatcaaacagctacgtcgcttctacccttaa

SEQ ID NO: 47125 - DNA, 1020 bp, Zea mays
  Clone ID: MRT4577_142986C.1
atggggttgcgccaaatcgaaactggcagaccccgtacctgcaatatctccaccgcggagagctacctctcgacaaggccgaagctcggcgactggcgcggcgcgccaagtcgttcgtcttactgggtgatgaaaaggagctataccaccgcagcccctcaggcattctccaacgatgcatatccgtcgtcgaaggacagaagctattacaagaaatacactcgggggcttgcggtcaccacgcagcacctcgagccctcgtgggaaacgccttccgacaaggcttctactggccgaccgcggtggccgacgccactaggattgtatgctcctgccaaggaaggcaccgggggcttctcgcacctgctggtcgccatcgacaaattctccaagtggatcgaggtccgacccgtaaccagcatcaggtccgagcaggcagtggcgttcttcaccaacatcatccatcgctttggggtcctgaactccatcatcaccgacaatggcacacatttcactgggaagatgttcctggacttctgcgaggaccaccacatccgtgtggactgggccgccgtagctcaccccatgacgaatgggcaggtggagcatgcaaacgttcggcaagcggtggatgaaggagctaccctcggtggtctagagtctgaggacgacgccgagccgagccacgagtttctcgccgttctttctagtctatggggccgaggctgtcttgcccacagacttagaatacggttccccgaggacaaaggcgtacgacgaccgaagcaaccagaccagccgagaagactcactggaccagctcgaagaggctcgggacgtggccttgctacactcggcgcgcaagacacccgagggcgccacaagcttactcctccctgggaagggccgttcatcatcgccaagattttgaagcccggaacatacaagctggccaacgatcaaggcgaggtctacatcaacgcttggaacatccgacagctacgtcgcttttacccttaa

SEQ ID NO: 47126 - DNA, 2658 bp, Zea mays
  Clone ID: MRT4577_142987C.1
atgccgttcggtttgaggaatgcgggcgcgacgtaccagcggtgcatgaaccatgtgttcggcgaacacatcggtcgcacagtcgaggcctacgtcgatgacatcgtagtcaagacaaggaaggtttccaacctcctctccgaccttgaagtgacattccgatgtctcaaagcgaaaggcgtcaagctcaatcccgagaagtgtgtcttcggggtgccccggggcatgctcttggggttcatcgtctccgagcgaggcatcgaagccaacccggagaagatcacagctatcactagcatggggcccatcaaggacttaaaaggcgtacagagggtcatgggatgtctcgcggccctgagccgcttcatctcacgcctcggcgaaagaggcctgcctctgtaccgcctgttaaggaaggccgagtgtttcgcttggacccctgaggccgaggaagctctcaggaacctgaaggcgcttcttacaaaggcgcctatcttggtacccccagctgatggagaagccctcttggtctacgtcgccgcgaccactcaggtggttagcgccgcgattgtggtcgagaggcaagaagaggggcatgcattgcccgttcagaggccagtttacttcatcagcgaggtactgtccgaaaccaagatccgctacccacaagttcagaagctactgtatgcagtgatcctgacaaggcaaaagttgcgacattacttcgagtctcatccggtaactgtggtgtcatccttccccctgggggagatcatccagtgccgggaggcttcgggcaggatcgcaaagtgggcggtggaaatcatgggcgagacaatctcgttcgcccctcggaaggccatcaagtcccaggtattggcggacttcgtagccgaatgggtcgacacccagctgccgacggctccgatccaaccggagctctggaccatgtttttcgacgggtcgctgatgaagacgggagccggcgcgggcctactcttcgtctcacccctcggaaaacacctacgctacgtgctacgcctccatttcccggcgtccaacagtgtggctgagtacgaagctctgatcaacggattgcggatcgccatcgagctaggggtccgacgcctcgacgctcgcggcgactcgcagctcgtcatcgaccaagtcatgaagaactcccactgccgcgacccgaagatggaggcctactgcgatgaggttcggcgcctggaagacaagttctacgggctcgagcttaaccacatcgctcggcgctacaacgagactgcggacgagctggcaaaaatagcctcggggcgaacgacggttcccccggacgtcttctcccgggatctgcatcagccctccgtcaatatcaacgacacgcccgagcccgaggcaccctcggaccagcccgaggtaccctcggcccagcctgaggtaccctcggcccggcccgaggattcctcggttcagcccgaggtaccctcggcccccgagggcgaggcgctgcgcatcgaggaggagcggagcggggccacgcctgatcgagattggcagaccccgtacctgcaatatctccgccaaggagagctacccctcgaccaagtcgaggctcggcgggtagcgcgacgcgccaagtcattcgtcttgctgggcgatgagcaggagctctaccactgcagtccctcgggcatcctccagcgatgcagctccatcgccgaaggtcaggaactcctgcaagaaatacactcgggggcttgcggccatcatgcagcacctcgagccctcgtcgggaatgctttccggcaaggcttctactggtcgacggcggtggctgacgccactagaattgtccgcacctgcgaaggatgtcagttctatgcgaagcagacccacctgcccgctcaggctcttcagacgatacccatcacatggcccttcgctgtgtggggtctggacctcgtcggccctttgcagaaggcgcccgggggctacacgcacctgctggtcgccatcgacaaattatccaagtggatcgaggatcaccacatccgggtggactgggccgccgtggctcatcccatgtcgaatgggcaagtagagcgtgccaacggcatgattctacaagggctcaagcctcggatttacaacgacctcaacaagttcggcaagcgatggatgaaggaactcccctcggtggtctggagcctgaggacaacgctgagccgagccacgggtttcacgccgttcttcctggtctacggggccgaggccgtcttgcccactgacctagaatacggctccccgaggacgagggcctacgacgatcaaagcaaccaagctagccgagaagactcgctggaccagttggaagaggctcgggacagggccttactacactcggcgcggtatcagcagtccctgcggcgctaccacgcccgaggggtccgaccccgagacctccaggtgggcgacctggtgcttcggctgcggcaagacgcccgagggaggcacaagctcacgcccccctgggaggggccattcgtcattgccaaagttctgaagcccggaacgtacaagctggccaacagtcaagacgaggtctacggcaacgcttggaacatccaacagctacgtcgcttctacccttaa

SEQ ID NO: 47127 - DNA, 378 bp, Zea mays
  Clone ID: MRT4577_142988C.1
tcgagcatacctacttttacctgttgatccaggttgttcttttccaggcaacgcttacattatgctgtccataagggaattccattccacaaatgatgttaagcaaatattccatcatatgttagaatggctgaaacacatccccaaatttgattcttcattcgctcattatgatgttaaacctggtaatggtcctattacctggcgttaaagacaagcacctgttgcaactttaatggattttggaagggcaaagccctccaaaaaggaaattcggtctcgttttaaggaatacaagttcaagaattggccacttagcaattctctttttcttaacgggccccttaattattggacttgcccaagccttcccatttt

SEQ ID NO: 47128 - DNA, 451 bp, Zea mays
  Clone ID: MRT4577_142989C.1
ttctttcgttgggctacccgttcgaacagggcgggctgtacgtccatcctccgcatggggccatacgtgtgcgcgatgtggaacttgagcgggtcacccgtgtggctcaggtacgtaccaggaatcagtttacatgccgacatcggactcttaaaggacgcaatgcaggcgttggtggagaagatcgcattcatgaagaattccaacgggcttttcgagtggcgatgcgggaccatcatactggcgcaagaggagaacgaggacgggcccatggagctcggcatgggcgctggcgctcaatcctactgcaactgggcagcaaggatggccggtgacaccaacatcgcgtgtgccctgcgtcatgtgactgtactacgacgctttgggcccggtgatcgacacgtggaacgggttctactgtgactacttgggtgggaactttaacagtgag

SEQ ID NO: 47129 - DNA, 342 bp, Zea mays
  Clone ID: MRT4577_14298C.1
gtccttccccaccggttcgtgttcaggttctggttcctgggccaaaaggaagagattgcggcgtccgacctttaattcccgttgtttgtttgggggcctggcttgggccaccgacaaccactccttaaacaacgctttaagaccttccgggagggccctgaggtcgaaaaccatcctggaccgggagacccaaaggtcccggggtttcggtttcgtaaccttttcaacggaggacccattccccacggccatcaagggcttgaacggaaggagcttgaacggcccaacataaacggttacaagggccaatcccccggccgcccttgaagccgccgttgccga

SEQ ID NO: 47130 - DNA, 2751 bp, Zea mays
  Clone ID: MRT4577_142990C.1
atgtcgttcggcttgaggaatgcgggcgcgacgtaccagcgatgcatgaaccacgtgttcggtgaacacatcagccgcacggtcgaggcctacgtcgatgacatcgtggtcaagacgaggaaagcctctgacctcctttccgaccttgaagtgacattccgatgtctcaaggcgaagggcgtcaagctcaatcccgaaaagtgtgttttcggggtgccccgtgacatgctcttggggttcatcgtctccgagcggggcatcgaagccaacccggagaagatcgcagctatcaccagcatggggcccatcaaggacttgaaaggcgtacagagggtcatgggatgcctcgcggctctgagccgcttcatctcacgcctcggcgaaagaggtctacctctgtaccgcctcttaaggaaggccgagtgcttcacttggacccctgaggccgaggaagccctcgggaacctgaaggcgctcctcacgaaggcgcctatcttggtacccccagctgccggagaagccctcttggtctacgtcgccgcgaccactcaggtggttagcactgcgattgtggtcgagaggcaagaagaggggcatgcattgcccgttcagaggccagtctacttcgtcagcgaggtactgtccgaaaccaagatccgctacccacaagttcagaagttgctgtacacggtgatcctaacgcggcggaagctgcgacactacttcgagtctcacccggtaactgtggtgtcatccttccccctgggggagatcatccagtgccgggaggcttcgggaaggattgcaaagtgggcggtggaaatcatgggcgagacgatctcgttcgctcctcggaaggccatcaagtcccaggtcttggcggacttcgtagctgaatgggtcgacactcagctcccaatagctccgatccagccggagctctggaccatgttcttcgacgggtcgctgatgaagacaggagtcggcgcaggcctactcttcatctcgcccctcgggaagcacctacgctacgtgctacgcctccatttcccggcgtccaacaatgtggccgagtatgaggctctggtcaacgggttgccgatcgccatcaagctagggatccgacgcctcgacgctcgcggtgactcgcagcttgtcatcgaccaagtcatgaagaactcccactgccgcgacccgaagatggaggcctactgcgatgaggttcggcgcctggaagacaagttctacgggctcgagctcaaccacatcgctcggcgctacaacgagactgcggacgagctggctaagatagcctcggggcgaacgacggttcccccagacgtcttctcccgggatctacatcaaccctccgtcaagatcgacgacacgcccgagcccgaggcaccctcggcccagcccgaggcaacctcggcccagcccgaggcaccctcggccccgcccgaggtaccctcggctcagtccgaggcaaccttggctcggtccgaggcatcctcggttcagcccgaggtaccctcggcccccgagggcgagacgctgcacgttgggggggagcgaagtgtggtcacacctgatcaaagctggcagaccctgtacctgcaatatctccaccgaggagagctaccctccgaccgagccgaagctcggcggctggcgcggcgcgccaagtcgttcgtcttgctgggagatgagaaggagctctaccaccgcagcccctcaggcatcctccagcgatgcatctccatcgctgaaggtcaggaactcctacaagagatacactcgggggcttgcggccatcacgctgcacctcgagcccttgtcgggaatgccttccgacaaggcttctactggccgacggcggtggccaacgccactagaaatgtccgcacctgcgaagggtgtcaattctacgcaaggcagacccacctgcctgcccaggctctgcagacgatacccatcacctggccttttgccgtgtggggtctggacctcgtcggccccttgcagaaggcacccgggggctacacacacctgctggtcgccatcgacaaattctccaagtggatcgaggtccgacccctgaacagcatcaggtccgagcaggcgatggcgttcttcaccaacatcatccatcgcttcggggtcccgaactccatcatcaccgacaacggcacccagttcaccggcagaaagttcctggacttctgcgaggatcatcacatccgggtggactgggccgccgtggctcatcccatgtcaaatgggcaagtagagcgtgccaacgacatgattctacaagggctcaagcctcggatctacaacgacctcaacaagttcggcaagcgatggatgaaggaactcccctcggtggtctggagtctgaggacaacgccaagccgagccatgggcttcacgccgttcttcctagtctacgaggccgaggccgtcttgcccacagacctggaatacggctccccgaggacgagggcctacaccgaccaaagcaaccaagctagccgagaagactcgctggaacagctggaggaggctcgggacaaggccttactacactcggcgcggtaccagcagtccctgcgacgctaccacgcccgaggggtccggtcccgagacctccaggtgggcgacctggtgcttcggctgcgataagacgcccgagggcggcacaagctcacgccccctaggaggggccgttcgtcatcgccaaggttctga

SEQ ID NO: 47131 - DNA, 262 bp, Zea mays
  Clone ID: MRT4577_142991C.1
gggtacgccgccgtccggaagcacgcgccggcggcctacgtggtcatatccaaccgcctatcgtcgaggaactccacggagctcctctagttcgccgaccatgggttcccgggcgccgtcgtcaaagtgcataattaaacggttttcaaaaactttttaggaaatttcaccgcgaacagaacatcgacttcgtccgagataacttctccgacgagatcgccgccgtcaccacccgaaatggccgctcaccttcgtcggcgaa

SEQ ID NO: 47132 - DNA, 467 bp, Zea mays
  unsure (1)..(467): unsure at all n locations
  Clone ID: MRT4577_142992C.1
cggggaaccaaaacccaaccancnaccagcgacacagcgagcgagagcagaacacacgcaacgagcgaggagcagcagcagcagcggcgagggcggcccccaagaacgccacgncagcncgggcggaggcgccacagggccngccgcccaacggccgccgcgccgccaccaacgccgacgncggccccaagaagaagaacaagaccgacaagcccgacggggaagggggaggccagaccgacgacgacgacgccaacgggagaaagggcaagggcaagggcgagaaccaggacgacgacaaggacggggcgaacgacgacggaaacagcccaagcaacaacgaggaagaccgggcncccaccggagacgacaacggagggggaaccacagggcaagcagaacaggaccgaaacccacgaaagaaagccacggaggaggagcccacgcaaggcaacaacaccaagggc

SEQ ID NO: 47133 - DNA, 163 bp, Zea mays
  Clone ID: MRT4577_142993C.1
ggtgcggggtgcaagaacctgagaatagtgcacaaattattcggctccaaaattggagattctttggacaaatgcacattccactagcgttgctagatcaccccgctctttctgttgcatggttgtggccgtaggaaggcatcgtaaatagacttttttaagg

SEQ ID NO: 47134 - DNA, 453 bp, Zea mays
  Clone ID: MRT4577_142994C.1
gggaaaaaaaaaaaaataaaaaaaggaaaaaggggggcaccaaaaaagaaaagaaacccaagcaggaggggggggaaaaaaaggagaggagaggggggctaaacaacaaagggggttttataaaaaagagaccccacaaaaaaaacgagaacaccggggggggggaggggggggagcacaagcgcgcaaaggaaacacgaccccgggacgcgtgaaaaaaaaaacccccgacctgggccgagaggaaacctgggaaaaaagggatcccaacatttgcaaaaccggaggggggggggggacaaaaaaggccaaaaacagcctgggggaaatcaaaatgggggacaagaaaaaccccggcgaggggaaaatttccggaaagaggctttacaatttccacaaaaatccccaacccggggaggaacgctggaaggaaacccgggggaagacccgggg

SEQ ID NO: 47135 - DNA, 369 bp, Zea mays
  Clone ID: MRT4577_142995C.1
gaggccaggggcttcgtgttcggcccggcgatggcgctgcctattggcgctaagttcatacctctgcgcaagccaaggaagctcccaggtgagagattccatgaccatgcatgttctgtttttcttcttcttcttaacccatctccacactctgcactgtacccagctgttgcttttgtcgatctagtgcccagcctgtggcgacaccctgatcaagtatatgtttagcgaggagggttcttgcttagcccataatctctgacaccgccagagttgtttgtctggcctgcatgcagttgcagtcccgtgaatgggatattaaaagaaaaatgcaacagacggtttatacgagaccgatcattcattcat

SEQ ID NO: 47136 - DNA, 145 bp, Zea mays
  Clone ID: MRT4577_142996C.1
cccgtcacgcgtactactactgtaaacatacaaatgcacttgcgtgaccaactggcaggggctgaattatacacgagggtggcgacccgaccgacctgctaacaatgcacagcacatggccactttaatactcgactatcgtata

SEQ ID NO: 47137 - DNA, 560 bp, Zea mays
  Clone ID: MRT4577_142997C.1
agaagtggcgttatcaatttattagcgtcatacacgcaccggatacagtacttgctacacacataataaataacaaacataataattacaacaacaaaaccaaatctttaatcgacagtctacacgcacgccacttcactgcactttttataacttattcatgcatgcgcgagcatgcgtctacagtctacacgcacgcggcacgccagctagcctattcgccctgttcgctagccagtattacgcggtgcaccctctcgatgtaatcagaggccctccggttgatgtcgcgatcggcataccagttctgaccgtagtagtcgtcgatcgtcgtcatcgctccgccgcacccttgatagggccgatgcgtcaaaggtggcctcgccgccgccgattcctcctgcctcccgccggagacctgcttcttgcagccgaacagagatgcaaaaaaggagctcttacctctccccatcgacaccgcaccacactatatatacgacctcgctctgtcacccttcagcaagtctagctacaccaggatttcgctgcggacgcgtggg

SEQ ID NO: 47138 - DNA, 332 bp, Zea mays
  unsure (1)..(332): unsure at all n locations
  Clone ID: MRT4577_142998C.1
atcctntatagcgacctcccttttttcttctcttttcttttttctacccacaaaacaaaagaaaaaagaaaggtttattttcctttaaacccctttaccaacccataaaaatcccttttctaacttattatcccatctgtacctaaacaacctaatcttttttatcctttctccctctatacctaacacaattataccaaaaaaaaaccctttttcttctaactacaacccaacatttatttttcccttacaaacaaaaaaaccccctacctaaacattcatatctttacacgccaacaaaacctcaccccactattttaccttttaataaa

SEQ ID NO: 47139 - DNA, 679 bp, Zea mays
  unsure (1)..(679): unsure at all n locations
  Clone ID: MRT4577_142999C.1
accccgcccccgcctcgccctccgtcgtctcagcgtatgttgtgcatgtgaagagagagagagaaggtgacgagcgagaaaaaaactagtagagtgataggttggcaagacgcattgaagcgaaggccacgcataccaaagcaacctcaccatcgctcgcaagctactcgatcaaggacattattattgtcgccgcaacgagctagcaagaatccgcgttaattagtttcgcgaagcggtacatatggctcgcatcctcgtgctgctggctctgctcaccatcgcgagcctcctcctgccgccggtcgtcgcgagccagcaggcggcggcgaagtgcgagtacagaaagcactccggccaccggtacaggcgtcgtcgtgcagatcaacgccggcacgtacatagagaaggtggtagtgccggcgtcgaagccgtacgtcacgttccagggcgccgggcgcgacgtgacnggtggtgaagtggcacgaccgggccagcgaccgcggccccgacgggcagccgctccgcacctacaacaccgnctcagtaaccatcctagctaactatttcaacgctaagaacatcagcttcaaggtgagcagccgtttgcccagcagaccacccagtacgtggccgagagacgatggggcagcaggggcaggcaaagtgacaaaacctc

SEQ ID NO: 47140 - DNA, 280 bp, Zea mays
  unsure (1)..(280): unsure at all n locations
  Clone ID: MRT4577_14299C.1
aattttccagttcaatggttccagctcatgcattcaagaaagagcaaaagctcttgaagttgtacagtatatcaaagatactttccatgacggcaagtgcgaagttgcaggggttgaggatggaaaattgatggccagcgtgganactggtgaattttgggctttgtttggtggttatgctccccttccaagaaaggcaccttctgaagataaagggcgagacaagaaaattgtcatcaaattgatatgcctcaaacaagggaaattgggagccaattaa

SEQ ID NO: 47141 - DNA, 153 bp, Zea mays
  Clone ID: MRT4577_1429C.1
acgactctgcccaatacttctcctatctcgtgcagacgtccatactcaaagggtacaccgtaaacacttaaatcgtgggatgacaaccagacacccaaaattctctgtgtctccaacatatgaacgacactgcatcacccatgtctgacaaca

SEQ ID NO: 47142 - DNA, 210 bp, Zea mays
  Clone ID: MRT4577_142C.1
tttcaccatactacccttcaactactgtttccctccatcaactaccctcctgccgtcggatttctaccatccgtagggctaccctactcactactctcatactcctcctccacatcatcatcttatcatccttccttccttcatttacacatactacattcttttctataccactttcttgcacttcatcctctcattaattaatcctaa

SEQ ID NO: 47143 - DNA, 2168 bp, Zea mays
  Clone ID: MRT4577_143000C.1
cattgggcgtcgcccgggccggggtaccccgcgctcgccctccgtcgtctcagcgtatgttgtgcatgtgaagagagagaggaagagggtgacgagcgagaaaaaagctagtagagtgataggttgacaagacgcattgaagcgaaggccacgcataccaaagcaacctcaccatcgctcgcaagctactcgatcaaggacattattgtcgcaacgagctagcaagaataatccgcgtgttagtttcgcgaagcggtacatatggctcgcatcctcgtgctgctggctctgctcaccatcgcgagcctcctcctgccgccggtcgtcgcgagccagcaggcggcggcgaagtgcgagtacagaaagcactccggccaccggtacaggcacccggtgggcgtgcggaagatcgtggtggacgcgggcggcgccggcgacttcgtctccatccagcgcgccgtcgactccgtgccggagggcaacaccgtgcgcgtcatcgtgcagatcaacgccggcacgtacatagagaaggtggtagtgccggcgtcgaagccgtacgtcacgttccagggcgccgggcgcgacgtgacggtggtggagtggcacgaccgggccagcgaccgcggccccgacgggcagccgctccgcacctacaacaccgcctcagtaaccatcctagctaactatttcaacgctaagaacatcagcttcaaggtgagcagccgtttgcccagcagaccacccagtacgtggccgagagacgatggtgcagcaggggcaggcaaagtgacaaaacctctcagagagtcacaagtctctggacttttgcttctaaacgccgctgtctctgtgtatctcgttccttttcgaaaattttgaatccgatcgatccgcgtgttttcacacactaagctagcaagatcgacgctatcacgctactgcgtgccctgtatctgttgaagttgtgcctgtaggctgcaggttggctgggtgtgtgtggcttcaaaattcggcggcgacaggcatcctggacgagcaaaacgcgcattcgatctggctgattttttcggttggccgtcttggtccaatgcagcaggggcaggctcctaactgacgcaccttttccctttccaatgtctcgtcttgacacgcagaacacagctccggcgccgatgcccggcacgcaaggagggcaggcggtggcgttccgcatctccggcgacaaggccttcttcttcggctgcgggttctacggcgcgcaggacacgctgtgcgacgacgccggccggcactacttccgcgactgctacatcgagggctccatcgacttcgtcttcggcaacgcccgctccctctacaaggactgcgagctgcactcgacggcgcagcggttcggctcggtggcggcgcacgggcggcgcgacccgtgcgagcgcaccggcttcgccttcgtcaactgccgggtgaccggcacggggcggctctacgtggggcgggccatggggcagtactcgcgcatcgtctacgcctacacctacttcgacagcgtcatcgcgccaggcggctgggatgactgggaccacaccagcaacaagagcatgacggcgttcttcgggatgtacaggaactgggggcccggcgtcgacgccgtgcacggcgtctcctgggcgcgagagctcgactacttcgccgcccgccctttcctcggcaagagcttcgtcaacggataccactggctcacacctgatgtctgaaaaacacacaaacacacgcgcgagagtcaggagacacatcgattacagcaaaccagattaatttattcgtacagcaacagcataaacacagaataggacaccatttacaagctagccgctgaatatgtatagtgatccactggcacagaagtcagattcaagattcatttcgtctatacaaagtagtttccaaaacttcgtcatgtataccagtgtaaactagacagtgagcagtgagtctgttatgtctctgcataggagaccttggatgtgcaattcaagttgttccattatgtttgaatctgcaaaggagcatggacacaaagtttgtaaaaaaataaaaaacatgaaaaaaatatccatgagtaacttgaatctatctgaagattcaactggactgaccggaaaaacctt

SEQ ID NO: 47144 - DNA, 1054 bp, Zea mays
  Clone ID: MRT4577_143001C.1
tggcgttccgcatctccggcgacaaggccttcttcttcggctgcgggttctacggcgcgcaggacacgctgtgcgacgacgccggccggcactacttccgcgactgctacatcgagggctccatcgacttcgtcttcggcaacgcccgctccctctacaaggtgcgtagtaccgccgccgccgccgcgtacgtgcgctcacgcgcactggctactgaccgacgccgcccgtcaaataactgtggaaacgcgcgcgcgcaggactgcgagctgcactcgacggcgcagcggttcggctcggtggcggcgcacgggcggcgcgacccgtgcgagcgcaccggcttcgccttcgtcaactgccgggtgaccggcacggggcggctctacgtggggcgggccatggggcagtactcgcgcatcgtctacgcctacacctacttcgacagcgtcatcgcgccaggcggctgggatgactgggaccacaccagcaacaagagcatgtaacgttcagcagttcatcacgccagttacattacataccgtgccgtccctgcggcgctaacgtcagtgactgttattgttacctcctcgccggcgcgcacaggtgtgcgttcttcgggatgtacaggaactgggggcccggcgtaaacgccgtgcacggcgtctcatgggcgcgagagatcgactacttcgccgcccgccctttcctcggcaagagcttcgtcaacggataccactggctcacacctgatgtctgaaaaacgcacaaacacacgcgcgagagtcaggagacagatcgataacagcaaaccagattaatttattcgtacagcataaacacagaataagacaccatttacaagccactgaatatatgtatagtgatccactggcacagaagtcagattcaagattcatttcgtctatacaaagtagtttccaaaacttcgtcatgtataccagtgtaaactagacagtgagcagtgagtccgttactccgttatacctgttatacctgcatatgagaccttggatgtgcaattcaagttgttccg

SEQ ID NO: 47145 - DNA, 571 bp, Zea mays
  Clone ID: MRT4577_143002C.1
aatcggggggaacttttgctgccccctccaattgcccattttactttaccagtttcattagctacgcggttacttttacataagcctcaacctgcatagtagccgcaaaggctcccacatgagggggatctgaaaaaaaaataagggggggcgggtttagctccacaaatgcgagaggaccgctcatatttctggaatcgggagggccttacttaaatttaccctaaagggccctggtagcaattccacttcaacatgtttggccaaagtagatgttgcaaaataaatcaccaagcgaccggagcccctgatacattacaccaggccggagatcatcaagggtatcaacgtttttatagcccccataccccctgaaaaatggcccccccccccgagacaggaaatctcgaaaggcctcttcagggaaaaatgttttgttttttggcgtttgcatgcggtttgcatcacaaagtttggttggcctcccatcatcaaaattaagggggtatgttccaactggcatgtctttttccaaggttcgaacaacctcttttttttttttaagccaaaa

SEQ ID NO: 47146 - DNA, 222 bp, Zea mays
  Clone ID: MRT4577_143003C.1
caacgcacttttccacactttacccgcctaggcgccatggctaagctcgcgctggcgctcctcctcctgctggccgggggggatccgcgtcggccagcagcgggaggccacctggatatcgacctgggctttcctttcttctggggaaccccggagggagtgccaaggcacgggtggcccgagtgcctttccgaggagtcggatgaggagggccttggacct

SEQ ID NO: 47147 - DNA, 323 bp, Zea mays
  Clone ID: MRT4577_143004C.1
atcatggttgacggtacggtggtctcagatgatcctcaagttaagtatttgttggggacgagcagagtgcttcagtgcttgggtttgtctacgaaccatggaacaacccacttgtatctttagcgtcacagcacaatcacaagcgctgttgtggcccttcgagggcaacaggaggtaaaaaagtactttatgaaggtaggaatatttggtagcatctcctctctttttttgacaaaagggaaattcattcatttgtcatgagcacaacaaactccattctaagttttgaagccaattggatgttacaacgttgagattgtgct

SEQ ID NO: 47148 - DNA, 510 bp, Zea mays
  Clone ID: MRT4577_143005C.1
aattcggcacgaggcgcctttccccgtacctgttctcgtgtgtctcttcttttagatgtggctagagtaggtgcagttgtacttacgtcgggagttgatttttgttcgcttatcttgtgcaaaatctgggggttttccgacgcgctgcaaggttcgcgcaacgcgggtctggagtgatttctgggattgcttccggttccagcatttcgtaacgagaggcggcgccgcggtcgacgcgtttctggatggatttcttgtccttttttcgtcgcgcattttccaaatctcatcactagaggacggggggagggtgagatgtggaagtacaaagcgatgattctgctgttgctttatcggaattcgggacttcgtttgtttggtgcatctcacagctgtaattttcctcgcgctctttttatcttctggggtttacggggatgctcaggcaatccctttaagcaggcgaccattgttccatcggatttcgtcgatgcgctctctgtctgcgcg

SEQ ID NO: 47149 - DNA, 670 bp, Zea mays
  Clone ID: MRT4577_143006C.1
ttctcgagtttttttttttttttttttttttttttttttttttttttttttttttttttttttttttttaccaaaagcagggttccttagcacaaaaaaaatacatacgtcaacagcgacggaatggcccacgagggggggtcccctaccagtaaaaagatggcaacaacccaaaggggaaccccgaactcatgggggcccgtttgccctagggaccaaaaggtttaacacaaaaacagccctcccctaaaatgtaatgggcctgcacctcctcctcgtcctcgaactcctcctcgggggaagccgcgtcctggaactggtggaactccaacacaagggcgttcatgttgctttcggcctggggaaactccattttgtccatgccctcgcccgggtaccagggcaaaaaagccttcctcctgaacatggaaggaaactgttcgctcaccctccggaacatttcctggatggaggtcaagttcccaataaagggggaccccatggacaggcccctgggcggaatgtcccacaccctggacttgacgttgttggggacccactccacaaagtaggacaagtttttgttctggacgttgatcatttgctcgaaaacctccttggggctcattttcccggggaacatggccgaggcggggaggaaacgcccatg

SEQ ID NO: 47150 - DNA, 458 bp, Zea mays
  Clone ID: MRT4577_143007C.1
gcaagcggaaccccctgcccaacagcacgggcgcaggccgggcaaagaggccgggggccacagggaaaccaagcgggcgaaaccaaaccaaacccaaccccccccaacgccacccccacaaaacccccggcccccagccccaaaaaccccaagcggcacgggggacgggcgagggggggaagcggggaacaggggaaagggccccttggcgcccaaggggacccacaaaaaaacgccgacggcccgggacccggggggggacccccgggcccccccgggaagcccggcccggcccccggaagccgcccaagggccccgggggggggccgccttaaacctgggcggagccaagggcaaagcggggccccgggggaaaagggaaacccgcccgcaacccccagcccaaaggccccggggccaaaacagggaagccccggggggccaaagaagggcgctaa

SEQ ID NO: 47151 - DNA, 400 bp, Zea mays
  Clone ID: MRT4577_143008C.1
tttttgttttttttttttttttttttttttttttttttccagggggaaaaaaggggttttttaaaaaaaacaaacagctttccaaggatttgtttagttttttttgacaaacgggcggcaccggaccccaggggtttgggggggttttccggttttaaaaacctttgtttaaaacccgggccctttggggaagccaggggatttttttttttttcgccttccttttaaggggccagtttttcccggggcagtttttttggtgcctgaatcggtgaagggggttttgcctgaacccggggaattcccttttccggggggggccttaaaaaccaagggtcccaatgggcccaaatgggtgggggagcccatccctgctcccctcccttgaggcccccgggga

SEQ ID NO: 47152 - DNA, 418 bp, Zea mays
  Clone ID: MRT4577_143009C.1
tcgtttccggaaaggcgctctgacctgcatggtcgggttggtgtacatcatccggatgggcctggtgatgcttaagaccaagagccggcgcggggcagggacgatcacgaagaataggaaaagtgtggtggtcgatgtgtgcaggcactggccggcttgggcctgtcggcttctgctggaggacggagggtaccggtggtacttttgtctgctcacggaggtgcggagggtggttgtgttcaagtgcgggatccagtgggagttcgagttggggaccaagggcgtcgcgcgtatactgtgtcgggttcacgtgcgtaagacgatggggtgacttgacccgaccgtcgctggagaccagtggatgtttttctggacaccgttcattagcttgtgcaagtgcacactattgccggacatg

SEQ ID NO: 47153 - DNA, 604 bp, Zea mays
  Clone ID: MRT4577_14300C.1
gtgtcagtgtgagcaatgacctgaatgaacaattgaaatgaaaagaaaaaaaaaaaaaaaaaaaaaaaaaaaaaaaaaaaaaaaaaaaaaaaaaaaaaaaaaaaaaaaaaaaaccaaaaaaaaaaaaaaaaaaaaaaaaaaaaattttgtccttgccgggggggcctttcaaaagggcaaattttgaaaatttccataaaattgggggccgttcaaccttccttttaaagggccaaattcgccttatagggagtggtattaaaattaattggccggggttttaaaacgtggggattggaaaaaccttggggttcccaaattaaatcgctttgaagaaaatccccttttcgccagttgccttattaccaaaaaggcccgaaccgatcgcctttccaaaaatttgcccaccctaaatggcaaatgaaccccccttgtagcggcgaattaagcgcggggggtgtggggggttacgcccaaggtgaccgttaaatttgcaagggccttaacgcccgttcttttcgtttttttcctttcttttttcccccttttggccggttttccccgtaaagttttaaatgggggggctccttttagggttccaatt

SEQ ID NO: 47154 - DNA, 830 bp, Zea mays
  Clone ID: MRT4577_143010C.1
ccggccgggagggagcctcgcctccggcgccgcggcggcgatcacccaattccacccccactgccttctggcatctccccgcactaccgctctgtttcctccaccatccgcttgcgtccacgcgctctctcgttaagccatcgcttgcgtcaacggccgcgccctctagtcgttcgacgaaacgccaccgagccactgacgcgtccgctgcacgcgtagtcgcgcttccatcttgctccgccgccccgcagctcttagccggagggaggccaccgatccatgtctgtcgccaagcgctacgtgctgcgcctcttcatctcgctcaagtacgtgacggcgaacgtggtggaccggcagagcggtcgcatcgtgacgaccgcctcgaccgcggagcggcccctgcgagacgggctggagtgcggccgcgcctgcaacgcaaaggcggcggcagccgtcggcgaggtgctcgccatgcgcctcaaggtggacggcctcgcgcgggagcccatatacgccaacgcggagaaagaggtcgcgaagaaagggttcaagaaccagaccaaggtctgggccatcctcaatgcgttgcgcagtcacggggtcaacctccacatcgacgacgatggcgaccacaggccgcacgtctgaaacaaccataagttcaggagtttgctcctccaactaacaaaagtatgagctttgagcatgttgattgttgcgtgctgttttatgttgcttcagtaaccttgcccttgactctcatttaattgaacactatgactttctgtgtgtagcaatatcactgctggatctactacttcgatatcatc

SEQ ID NO: 47155 - DNA, 232 bp, Zea mays
  Clone ID: MRT4577_143011C.1
gcaagggaacactgtagctaactattcacctttcgcccacacgactattctatctagagtacaggcgacttcaaaacagacacacagtcccgcgctgcctgatctctgaccttgttgacaactaccgaaactccaaccacctgatcgcggacaccgtatcttcctgactgagccttgaacccaccgttcaccaccagtcccgcactttcctctagtgtgacactgacgaaca

SEQ ID NO: 47156 - DNA, 430 bp, Zea mays
  Clone ID: MRT4577_143012C.1
ttcgggaaatccggcccgggccgacactattagcgtacctgagagcctgagacgatggccgactactaccacgttggcagggccatgtactccatcactgacgagtgctatgacgccggcaggcacgtcggctgcgtgagggcgtactcgcgcaccgacaagtactacgacgacgtggacgatcgcatgaggaggaccgcgtacggggccgacgactgcgcgtacggcggcaggcagaccggcgagtacgccgacgagtactcccgcggcggtcgctacgaaagatacggggtctagtgcgagcacttcaagatgaaggacaaagactatatgcataaggagcgcctcgcggaggtgtcagtactttacgctctgacctttgatctgtgcgacgcgcgccatgccaagagagtcacggaggacccccttg

SEQ ID NO: 47157 - DNA, 574 bp, Zea mays
  Clone ID: MRT4577_143013C.1
cccctctcgagtttttttttttctttttttttttttttttttttttttttttttttttttttttttgggaaccccaaatttttctctcagcagttcatcaattacccctcttcaaacagctacaggggctacaaagtttttttctcaaaaatcttatgaaaaaacatttttgttagcctcaaaaatctcagggcatatccagatcttacaaggcccattcctttaaaagcggaggcaaaaggattccaatggttttttttttccctccaagggaaacagggggcggggccctaaactaaatcccccgcggattaacaattgggccttaaaaaaaaataggggattttcccatagccaagcacccgactgatccccaggggctcaatcgctcccctgataaaaaaagacctgaaaaagggtcagttctacattcttaacaaaccgggggggatttaccactcaaggacaaatttttgggcaacacagtttgctttcaactagcaaaatcagctttgaataaggggggccctacctcttggcctagtttctcaaaattctttgggggccgctttgg

SEQ ID NO: 47158 - DNA, 695 bp, Zea mays
  Clone ID: MRT4577_143014C.1
gacgcctgcaggttccggtccggaattcccgggtcgacccacgcgtccgctcatcctgggcttcatcattgcatttgtcttggcattctccgtgggagccaatgatgtagcaaattcgttcggtacagctgtaggctcaggtgtagtgaccctgaagcaagcctgcatcttagctagcatcttcgaaactgtgggctccgccttgctgggggccaaagtgagcgaaaccatccggaacggcttgatagatgtggagctgtacaacgaaactcaagatctgctcatggctggctccgtcagtgctatgtttggttctgctgtgtggcagctcgtggcttcgtttttgaagcttccgatttctgggacccattgtattgtcggtgcaaccattggtttctcccttgtggcaaatgggcagaagggtgtcaagtggtctgaactgataaaaattgtgatgtcgtggttcgtctctccgctgctttctggtattatgtctggaattttattcttccttgttcgtgcgttcatcctccgtaaggcagatccggttcctaatggcttacgagctttaccaattttttatgcctgcacaatcggaatcaacctcttttccattatgtatactggagcaccgttgctgggctttgacaaacttcctctgtggggtaccatcctcatctcggtgggatgtgcag

SEQ ID NO: 47159 - DNA, 360 bp, Zea mays
  unsure (1)..(360): unsure at all n locations
  Clone ID: MRT4577_143015C.1
ggatcatgaccaggcgccatccaccagtctggtcaaagaagctcatgccctcgggctggaagtgtatgcatccggaggtgccaatgatatcgacttgagctacaactacagctacgatcccagagaatatttcttgcagntcatggacaatccagacttctctgaggacggtgtgctcacggacttcccgtccaccgcatcaagatctggtgctagctagggtcattccaagggctatcctctaccgcctcctggaaaggacaccaggccggtgatcatcacccataaaggcgcgagcggagagtttcccgggagcacagatcttgcctaccagcaagcgatcaaagatgccgccgacat

SEQ ID NO: 47160 - DNA, 590 bp, Zea mays
  unsure (1)..(590): unsure at all n locations
  Clone ID: MRT4577_143016C.1
aactagtgggnaggggttgtgtgcccagtgatnncgatcgaggnaagacgagnagagcttttcgcttgcttagcttaccgcgccgcgccgggtgtggctgtgcgatctgtggccccgaccgcgcaagccgtaagtcctgaagggcgagcagnncagtgcgtcaagtgtcatgcgagtcgtgcggcatcgtactatccgcgccggcgccgtccattgggcgcgagggcaaggggtgcagctttgcggcgccattcgagaaaccccgggtgcggaccgggcaggtgaaccccttctgcannagcgccgcgccccgggctgctttcaaaaagggcgccgggnagcgtcttccgtgccttcttgcgaacgcccacgtgcggcgatcattcgtctttcttccgcgccacgggcaagcgtcttacgaccnttcgccaccaccgggnacccatggaagaaagctgatcgagaaggtacanggactgcgcagnncagcggagaaagnncagccgacggcgtttgcggcgacaattaacagnnaatggacnngcaaaacaaggaaaaccatggtgctttgcaacagggaaatcaacctg

SEQ ID NO: 47161 - DNA, 338 bp, Zea mays
  Clone ID: MRT4577_143017C.1
cgagactcctcgactgcacgcctctgtcctgctgtcatacgaccgcatcggccggcgatcctaccgcatctggaagcgcgggccggctccggaccactgacctcgctggctcacggcttccgcatccagcgctcggaccagacgtcctcttctcgggacggcgccaggcccgagatgccggggcaaggagctgactcggctcgctaataggctggcgcacaagataggagatacggatgcctgggggggcggcgtgcagcccagagtctgagggggcatgaggtacgctatggcaagaccacatgtaccgccagggatcgacgcacgctgcagagctc

SEQ ID NO: 47162 - DNA, 161 bp, Zea mays
  Clone ID: MRT4577_143018C.1
tccgccccgcgtccgcatactgtcccacatatgactgagtaataagaacctactttaaaagcaaaacctttaatcagtatagtgcatgattgaaggttttgcttttaaagtaggttcttattactcagtcatactgtgggacaagtctgcggacgcgtggg

SEQ ID NO: 47163 - DNA, 645 bp, Zea mays
  unsure (1)..(645): unsure at all n locations
  Clone ID: MRT4577_143019C.1
cattgggtacctcgaggccggccggnggttcttcttttaacgcaagaaagaaagaaatccacgctgcctaattagtcgaacttcacaccccgctcccctcggcgaacgagaccggacagcgcccgcgccccttgcaaccacgatcatctgccccggctccagaccctgtttctcaacactgttaggctcaacatctgattgacttacttcgccatcacagcccccgaatgggcaaaaataggagctctcgaggtgaattctcttattccatttcacccctctgagctgggttgtcaattgccatatgaatgaatatatgctcacttggctgatgctccgaatataatgcaatctcacttctggtgaatatacaaaaaacaaatcgtgcactctcctgtactcatgaaacgtgatgaaaatatgtggaccgactccttattccataggataaattgtgctaaaatctttgtggatcttcactataaactgaacaacataatctccatgtgatggctccacgagatgtctgacaaagggaggactaccagtgctgagaatgctgaactgatgactaacatcctctatttccatttggagaaggcactgacaatatatcctctgatcactgtaaacagatcaatgact

SEQ ID NO: 47164 - DNA, 1603 bp, Zea mays
  Clone ID: MRT4577_14301C.1
cgacttagccctcgatcacgggcgcacaacaacacagcgacgctatctgaccgagtgttcaaataaatacccacacgggcacgccacgagacgatgagacccctctgcctctgctccaatccgccgctccactccaagtcacacggaggcagccatcgtagcctcgcccgactccgcttcccctgttctttgggcatggagctgatcacaaatgtcaccgagtacgagaagctcgcgaaggagaggctgccgaagatggtgtacgactactacgcctccggcgcagaagatcagtggacgctcaaggagaaccgggaggccttctccagaattctgtttaggccacgggtactgatcgacgtctcccgtatcgacatggccacaaacattctgggcttcagcatttccatgcctatcatgatcgctccttcagccatgcagaaaatggctcatcctgatggagagcttgccacggcaagagctgcagcttccgcaggaacaataatgacattgtcctcatggtctacttccagcgttgaagaggtcaactcagttgggccgggcatacgtttcttccagctctatgtctacaaggacaggaatatcgtacggcaactcgtgaaaagggctgagatggctggcttcaaggccattgcactcacggtagacactccaatacttggccgcagggaagctgacattaagaacaggttcgccttacctccacatctggtgttgaaaaacttccaagcgctggatcttggcacgatggacaagacaaatgattccggccttgcttcctacgttgctggtcaagttgaccgcaccctttcctggaaggacgtcaagtggctgcagacaattacctcgttgccgatcctagtcaaagggatcgtgactgcagaagacactaggcttgcgatcgaatatggcgctgctgggatcatcgtgtccaaccacggcgcgcgccagctagattatgttcctgcgactatcagctgcctggaagaggtcgtcagggaagcgaaaggccggctaccggtgttcctcgacggcggcgtccgccgtggcacggacgtcttcaaggccctggcgttgggagcttcaggagtgttcatcggccggcccgtgctgttctcgctggcggtggacggcgaggccggcgtgcggaaggtgctgcagatgctgagggacgagctggagctcaccatggcgctcagcggctgcacgtcgctgagggagataacccgcgcacacgtcatcaccgacagcgaccggatcggccgctcgcggctgtagaatcattgtgcagttcacctcaggaatgatgttggtctcgactgaactgtcctgattcgggatctatttgtagctcttgtgctctcattttacgttaggcaaataaggaagctgcgtgcgtatgtgtgactgctgctgacgtttgtttgcgccgctgtcgtggttgcctggttggcacttggcagtgttgattggcgttagtggttggtttgggtgaaaggagtttatgagatctggtgccggtttctaagatactagcccaacaacgataccccctctggggcgcggcccccaccccatatca

SEQ ID NO: 47165 - DNA, 610 bp, Zea mays
  Clone ID: MRT4577_143020C.1
ttcatttagcataatgaatttaacgatgacaaagttatgggtaagggctagtttggtaaccccattttttcaaaggattttcatttttttcaagagaaattagtttattttttgcttaaaaaatgtgattccattgggaaaaatggagttgtcaaattagccctaaaagatatagtcatgtttttaagcaggctatgcgttctttctccgagaaagtaatccttcttttatcaatttgaagaaaaccatttgtattatgatttttctatcctaattcctggaaactgaattctgaattttctatttcttgtaatgttcatttcagatattctttctccaattgctaaacttgtactaaggggtgttgaacaagtaagtctgcaatcatattcgcttcctactacaaagtagtttttatttttttgttatgtgaaatttaggtttgtatatgtcgttacaatataaataaaaagaaatgctgaatgttttcttaatcaccaacccaaagccgagtcttgttaggcacaacattatagtattgattatctaatcatacattgcctcctcaagtttgaatagactacaaggaaaatatggtttctagaaaaac

SEQ ID NO: 47166 - DNA, 468 bp, Zea mays
  Clone ID: MRT4577_143021C.1
tggcttggaacctttgggctgatttatgtgcttggagtgtatatatatataattagactctttttaaacttatttgctggtattcttgtcctaagacgtagactcccgcgaaaatttcgattggtaagatcactatttctgaggcggagctgctcgatattaccgataatgccaaggttaagacttaggataaggagggtacttttttagattagtagtggtctactcctgtcggtaaatagtccgaggatgggtgtatgtccgtcgatcataatacttagaaggagagtatttcttattccgcgtcttgttctaggggaggtacgtagactcccgcgaaaatttcgattggtaagatcactatttctgaggcggagcttctcgatattaccgataatgctaaggttaagacttaggataaggagggtactttcttagattagtagtggtctactcccgtcgggaagt

SEQ ID NO: 47167 - DNA, 239 bp, Zea mays
  Clone ID: MRT4577_143022C.1
cccatgccaacttcatcagccacgcaaggcctttccttgaccgcgacgccaatagagtatggaacacacgttcggacatcctgagaaccagttaatcaccatgtacacagacaggctgccaactaaattacttatatgctttttctgaactgaggtgacaaagctcaggcctaaactgaacgagatagtgattcctgccatccttcacaaggagggcgggcgattgaactattcgtttt

SEQ ID NO: 47168 - DNA, 423 bp, Zea mays
  Clone ID: MRT4577_143023C.1
gggtacctcgagggccggccgggaaaaaatataataaaaaactcccacccacctttctcctctccttcattcctccccgtcccgcgtcgcgtcccacgccgccgcacctccgcggcagcgctactcctctccgtgacgtcggggaggcctcgctcgggggagggctgcctgcctgcctggctggctgtcagtcggaacgtataggaggaggtgggcaaacgagcttgatctggggcgcatgccccccctcccctgcacggtaaggatgtacatgccgacggcgcctttcaccgccagacacctgttcgctggcaaagctcttgcagatattgttcctacatcacacaaccgtgtcgttcggcatgtgaaccgtactgactatcgtgtgattgatatttctgaggatggatttgcgatacttct

SEQ ID NO: 47169 - DNA, 364 bp, Zea mays
  Clone ID: MRT4577_143024C.1
ccagcaagaaggaaaacagataacatttgccatcatgagaacatgaaaaaaaaactcaggtaagttcacagattattaaatgtacaacattgccatccatccattagagcattagtccttttctccatgtaggcaagggtctgtttacctgaaaaccgaaaaggctgaaaaagggaatcccctaaaagcaccttcaaaagagaatagctaaaaatgtccatttgcacaaatccatcagtgtgattggcccgcaaaaatgtttaatacggtgctgtttgcaggcagggaaacaacaccataaaaaaaatccccaaagtaatggcggggctcatgcaccagtttggaaattttgtccctaaagggg

SEQ ID NO: 47170 - DNA, 277 bp, Zea mays
  Clone ID: MRT4577_143025C.1
cagtgggattcattcatgttatgttaaccgctccctaccgccttatagttagagaaaggtgagcgagatctgagtcgttggatcttatgttagcgatttaattaaacaagggggtacacttccttgtaattgtgatgctcatctctagctagatcatcagccacacgtcttccttccacctcccaacacccagcagcttcgacgaacaacaactcattatgcccagagcacggtgaaacaatcaagggtggtcttaccgaggatcaaggcggcaatg

SEQ ID NO: 47171 - DNA, 454 bp, Zea mays
  unsure (1)..(454): unsure at all n locations
  Clone ID: MRT4577_143026C.1
ggcaaaggcagacacacagagggngagggcggaccagcaggagacgcacgggcaaacacaccaaagcacagagaccggcccggcccacacgcagaacagcaaaagccaaccaaacgagggaggcaggaaggncagcgacagcgacacaagcgggggggcagnnnnnacagnngccaaacanncacgagccgnacgagcagaggaggaagnggngcaaacanggcnagagagggacacgcngcnnacacaacagcaagaagaaccagaccgggagcaggagcgagggcaagaacaancacacccggagcgcgaaccagagcaccgccaaggcggacccagagcaaanccaaggcggggcgaaaangcaaggcaagcccgagagcgncgaccaagnaagcacgccaagcacgacaccgggcaaaaaggagaccagagnaagagcaacaagagcaac

SEQ ID NO: 47172 - DNA, 654 bp, Zea mays
  unsure (1)..(654): unsure at all n locations
  Clone ID: MRT4577_143027C.1
cgccncgttttttttttttattttattttattttatttttatttttttttattatttttatttttattttattttattttttttttttttttttttttgacttaaaaagccaaaaaaaacccaaaaacgaaccccgacccccccgccaaaaaaaaccgggggaacaaaacccacccccagggaccaacgaaaacaaaaaaaagggggggacaaaaacaaccaaaaccacccaacaaaaaaggaaaaaaaagggaaggggaacaaaaacaaccaaaaaaagggcaaagcccaacccccacgggaaaaaacaacaaaaacaggggggggcaaaaaactgggccccccccccaaaaaaaacgggccccccccgggacggcctttggggggattttggcccccaaaaaccccatcccccggggggggggaggcccaaagggccaagttaccccccagggggggcaagaaaaaagggcaaccccgggaggaccccccaccaaggggggttaacccagagaaagcttaaaaaaacgccgggttggccaaggagaaagcccttgcgggggggtccaaaactcccaaagagaccccggaaaaaaaaaaagcaggccccccccctaacgggggggaagggggcacccaacccaaaacaagggc

SEQ ID NO: 47173 - DNA, 807 bp, Zea mays
  Clone ID: MRT4577_143028C.1
cattgggtacctcgaggccggccggggtcgtccagtcctcatcagtggtcctttcgataatggaggtaccagcaccaccagcatgggcgtcccccctcgcgacgacgacgacgatcctgctggtcacggccgccctcgtcctcgtgacgacgaccgtcctccgccggcgtgcccaccgccaccggaaacgacaacgacaagcgccgccgggccctcggccctggccggtgatcggcaacctgaacctgctaggcgcgctgccgcaccgctccatccacgagctctcggcgcggtacggcccgctcatgtcgctccgcttcggctccttccccgtcgtcgtgggctcctccgtcgaggtggccgaggtcgtcctcaggacccaggacctggcgtacctcgaccggccccgcatggcctgcggcaagtacaccgtgtacaactactccggcatgctgtggtcgcactacgggccctactggcgtcagctccgcaagttgtgggtcacggagctgctcagcgcgcgccagctccgcctcacggagcgcgtccgcgccgaggaggtccgcgccatgctgcgcgacctgcacccgcacccggccaccagcaccaccagcacggccgcggtggtgctcaaggagcgcctgctcatggtgacgctcaacgtgatctcgcgcatggtgctgggcaagaagtacgtgggcgaggacgacgccggcgggccgggcgccgcggccacgcccgaggagttcaggtggatgatcgaggagatcttcttcctcaacggcgcgctgcacgtgggcgacatgg

SEQ ID NO: 47174 - DNA, 116 bp, Zea mays
  Clone ID: MRT4577_143029C.1
tgagaatcctaccatacctagctaccaactcgatcgttgtcatcactctcgatcgcacaactgctccgatgtgaggagatctaaaaactactacatcttttatagctacacatcta

SEQ ID NO: 47175 - DNA, 587 bp, Zea mays
  Clone ID: MRT4577_14302C.1
gtcgacccacgccgtccgttcgacagtgagcaactagaggtccatgaagttccccaggaggttgtagacaagggtagtgtttgggtgagggctgatactgtagctttggggcagctaacacatcagtagacagtagtctcaggactcaggagtgatgtgcagctctcttgcatattcgagaaaaaaatcaagaggagtttgaaaagaaaaacaagtatggagctgtttcatcttcacgggggctttgatcgataaggattcaggagtgctggaagaagatttggagcaagagctgtcgctgtccggcgtctggcggtctgggggagaccagtgattttcctacgcacgcctgccaaaagtgggatggagttgaacgcaaaatgtgttgtttgtcattgggtagatggaggaggacacctcgtttatacgcgcggaggaggtgtagtgcgactgtgcgagttgaatttgtaagaaactcagccgcatgcttgcttggagatacttgagatggaacggaaaactcaggtctcaacagctgtagagaaggtgaggggagggaagcaaacaacctagcttacattgtgatg

SEQ ID NO: 47176 - DNA, 445 bp, Zea mays
  Clone ID: MRT4577_143030C.1
tccctccttttttttttttttttttttttttttttggtgggttttttttttaggccaccccgagaaaaacaccaacgaaccaccaaattttttttatacggcccaacattaaaggaagaaaaagaaaatgggtcacgtgcatatgtaacactagctttacaaccgggggactggtttttgaatataccggaactacaactttattgctcagcaggggaacggacacctttgcagctttgccatatggcccatttcttgaccagggctttcctttccattcttcccggggaggaatatcaaaagacgggggaccctaaaacaacatgatcattttcaccaaaaaaagaacccaccctggatatttgaaaaaaccgagcaagctttaaccgggactccaaaccccgaatggagtgacccaggagcatgcaccaaaacagaaaacgtg

SEQ ID NO: 47177 - DNA, 711 bp, Zea mays
  Clone ID: MRT4577_143031C.1
ccccccctcgagttttttttttttttttttccgtctttcacttactcctttctattattccattacatttcataatttgataggggcatcagacaatgggtttttgatgagcacaactatggatacaagatgaacagagcaacaagtgcacctgtgcttgctacaatttccataaaacacacaagtctcagtttttttctggctaaaaaattgagtcttgagccaacatcactagatcagcgttatgtgacaacactacagcaatcacctggtggcctctgacagactactcccccttcccttcacttgagaagataaattattcagtggcaggtgcaactccacaagaagtgtgacgacctgagaatcctaacattcacttatacaccaaataagagaactgattccaagctcttcacgtcagcaagacactgcatatttctcaaggagagagtggaaaggtaaagccagttgtccaactagcagttgagttattcagttcactctacacatgcatcttacaaatccagtggcattccaaacatatcgttgatctctgccatgacatcacgagtggtgattgtgggttcaaatagaccattctcatccccaaatttgaaagaattgctctgactcgctttactggtgcagccctcttttaggtcatcatcagctaatatagagaaacccgaaatcggagctgcttttcca

SEQ ID NO: 47178 - DNA, 566 bp, Zea mays
  unsure (1)..(566): unsure at all n locations
  Clone ID: MRT4577_143032C.1
caagaacaccatcgtgctgcacaacacctgtgagggctcgcgcctcgccgcacctatcatccttgatctggtgctcctggctgagctcagcaccaggatccagctgaaagctgagggagaggacaaattccactccttccacccggtggccaccatcctgagctacctcaccaaggcacccctggttccccctggcacaccggtggtgaacgctctggcaaagcaaagggcgatgctggagaacatcatgagggcgtgcgttgggctggccccagagaacaacatgatcctggagtacaagtgagccaagtggcgtggcctgcagtgcgaggttagctgctggaagggaactagaaaggcgagattagctgtgggattgtgttgggcttgtgttttattttgcgttctttcctagccatcgctgttgcgcttctgtatttgtcggacccgtaactaccagggctctgctattagcggcacggagcctgtaattgtattgtatgataatgtgatcgagggtgctacttccccccgccattcctagtgttggttaaaaaaatntattt

SEQ ID NO: 47179 - DNA, 471 bp, Zea mays
  Clone ID: MRT4577_143033C.1
aagcctaccttgccctgccacctgcatctagcatccgagcgactaagcgaagactcccttttccccgatcaccacagaaccatggcggagcagactgattacggtgtcttcaaagggaagcttggttgtcctacggatgcccccgagctgcagatcaaccgaatccggatcacactctcatccaaaaacggcaagaacttggagatagtttgcgcgacatttggtaaaaggagccaaggacaactatttggacggttaaatggacctgccatgatcccttgactactagtctctccacatcaccactcgtgagaccccttgcggtgataggaacgaacacatgtaatcttgttgagatccactatctctccacagggtgattgaccatacatcaggctcccctgataggacgtaacaacatcaccgctcatcatcactgcatgccttccgttgagagattgaaggtgacca

SEQ ID NO: 47180 - DNA, 1673 bp, Zea mays
  Clone ID: MRT4577_143034C.1
cgcttgtctctgtctgacggatgatgccaacttttctgttctggtggtgcagggtgatgcttgtggggtggggaggcaacaacgggtccacgctgacggctggggtcattgccaacagggaggggatctcatgggcgaccaaggacaaggtgcagcaagccaactactacggctccctcacccaggcctccaccatcagagtcggcagctacaacggggaggagatctatgcgccgttcaagagcctccttcccatagtgaacccagacgacattgtgttcggaggctgggacattagcaacatgaacctggccgactccatgaccagggccaaggtgctggatattgacctgcagaagcagctcaggccctacatggagtccatggtgccacttcccggtatctatgatccggacttcatcgcggctaaccagggctctcgcgccaacagtgtcatcaagggcaccaagaaagaacaggtggagcagatcatcaaggatatcagggagtttaaggagaagaacaaagtggacaagatagttgtgttgtggactgcaaacactgaaaggtacagcaatgtgtgcgctggtctcaacgacacgatggagaatctgctggcatctgtggacaagaacgaggcggagatatcgccatcaacactatatgccattgcctgtgtcatggagggggtgccgttcatcaacgggagcccccagaacacctttgtgcctgggctgattgatcttgctataaaaaacaactgcttgattggtggtgatgacttcaagagtggacagaccaagatgaaatctgtcttggtcgatttccttgttggtgctggaataaagcccacctcaatcgtgagctacaaccacttgggaaacaacgatggcatgaacctgtctgcccctcaaacattcaggtccaaggagatctccaagagcaacgtggtggatgacatggtctcgagcaatgccatcctctatgagcctggcgagcatcccgatcatgtcgttgtcatcaagtatgtgccgtacgtgggagacagcaagagggctatggacgagtacacctcagagatcttcatgggcggcaagaacaccatcgtgctgcacaacacctgtgaggactcgctcctcgccgcacctatcatccttgacctggtgctcctggctgagctcagcaccaggatccagctgaaagctgagggagaggacaaattccactccttccacccggtggccaccatcctgagctacctcaccaaggcacccctggttccccctggcacaccagtggtgaatgctctggcaaagcagagggcgatgctggagaacatcatgagggcctgcgttgggctggccccagagaacaacatgatcatggagtacaagtgagccgagtggcgtggcctgcagcgcgaggttagctgctggaaggaaactagaaaggcgagattagctgtgggattgtgttgggcttctcgtgttttattttgcgttctttcctagtcatcgctgttgcgcttgtgtatttgtcggacccgtaactaccagggctctgctattaacggcacggagcctgtaattgtactgtatgataatgtgatcgagggtgctacttcccctcggcattcctagtgttgggttaaaaaaaaaaaaaaaaaaaaaaaa

SEQ ID NO: 47181 - DNA, 609 bp, Zea mays
  Clone ID: MRT4577_143035C.1
acacctctgagatcttcatgggcggcaagaacaccatcgtgctgcacaacacctgtgaggactcgctcctcgccgcacctatcatccttgacctggtgctcctggctgagctcagcaccaggatccagctgaaagctgagggagaggacaaattccactccttccacccggtggccaccatcctgagctacctcaccaaggcacccctggttccccctggcacaccggtggtgaacgctctggcaaagcagagggcgatgctggagaacatcatgagggcctgcgttggactagccccagagaacaacatgatcctggagtacaagtgagccaagtggcatggcctgcagcgcgatgttagctgctggaagggaactaaaaaggcgagattagctgtgggattgtgttgggcttctcgtgttttattttgcattctttcctagtcatcgctgttgcgcttctgtatttgtcggacccgtaactaccagggctttgctattagcggcccggagcctgtaattgtattgtatgataatgtgatcgagggtgctacttcccctcggcattcctagtgttggttaaaagtcgttcgccagcaacttatcgccc

SEQ ID NO: 47182 - DNA, 1789 bp, Zea mays
  Clone ID: MRT4577_143036C.1
aggaattcggcacgaggcttggaccccccccccccccccccccctgggtttcgttcctgttcctatgcatgttgcctacgtgcagctcgttgtgttacggtgtccgccacctgtctttgtctaacggatgatgctgtctttttctgccctgatggtgcagggtcatgcttgtggggtggggaggcaacaacgggtccacgctgacggctggggtcattgccaacagggaggggatctcatgggcgaccaaggacaaggtgcagcaagccaactactacggctccctcacccaggcttccaccatcagagtaggcagctacaacggggaggagatatatgcgccgttcaagagcctcctacccatggtgaacccagacgaccttgtgtttggaggctgggatatcagcagcatgaacctggcagatgccatgaccagggccaaggtgctggacattgacctgcagaagcagctcaggacctacatggagtccatggtgccacttcccggtgtctatgatccggacttcatcgccgctaaccagggctctcgtgccaacaatgtcatcaagggcaccaagaaagaacaggtggagcagatcatcaaggatatcagggagtttaaggagaagaacaaagtggacaaggtagttgtgctgtggactgcaaacactgaaaggtacagcaatgtatgcgctggtctcaacgacacaatggagaatctgctggcatctgtggacaagaacgaggcggagatctcgccatcaacactatatgccattgcctgtgtcacggagggggtgccgttcatcaatgggagcccccagaacacttttgtgcctgggctgattgatcttgctatcaagaacaactgcctgatcggtggtgacgacttcaagagtgggcagaccaagatgaaatcggtcctggttgattttcttgttggtgctggaataaagcccacctcgattgtgagctacaaccacttgggaaacaacgacggcatgaacctgtctgcccctcaaacattcaggtccaaggagatctccaagagcaacgtggtggatgacatggtctcaagcaatgccattctctatgggcccggcgagcatcccgatcatgttgttgtcatcaagtatgtgccgtatgtgggagacagtaagagggctatggacgagtacacatcagagatcttcatgggcggcaagagcaccatcgtgctgcacaacacctgcgaggactcgctcctcgccgcgcctatcatccttgatctggtgctcctggctgagctcagcaccaggatccagctaaaacctgagggaacggacaagttccactccttccacccggtggccaccatccttagctacctcaccaaggcaccactggttccgcccggcacaccggtggtgaacgctcttgcaaagcagagggcgatgctggagaacatcttgagggcctgcgttggcctggccccagagaataacatgatcctggagtacaagtgagcgaagtggcgtggcctgcagctagatatggaggaggctgcacgaaggggagggactagagaggcgagattagctgtggagttgtgttggcttctcgtgttttcttttgcgttcttttcctggtcttcgctgtggcgcttttgtattttaattgttggacccgtaactatcagggctctgctattagcgcttgaagcctgtaatggcatcgtatgatataatgtgatcgagggtgctagttccccgcaaaaaaaaaaaagaaaaaaaaaaaaaaaaaagcggcc

SEQ ID NO: 47183 - DNA, 350 bp, Zea mays
  Clone ID: MRT4577_143037C.1
cgccctttacatcgtccgggggggggggcccttcaccaactatgtctagggcgtgggataacccaataattcaactcctacaaactccaacacacaataacacttaaaaatgtcacctccatcacccttgtgcctccaacaaccctcatccctattacaaaacataccttgggtttgtttaggggcacacaacatcaaggcacatcacctacaacagctcgggctaccaaaccatcctacctactgtgataacatcagtaggttccattcctcccaccagctggcttgatctctgctatttatttgcgccgccttcacctacccttccgccctcttcctgccgcctgccc

SEQ ID NO: 47184 - DNA, 356 bp, Zea mays
  Clone ID: MRT4577_143038C.1
aaaaaaaacgttgcccaattttttttagggtttatcctacagaaaaaatttttttgataccctttttgtcacacccaggttttagggacctgggcccaaacccaatttttggggggggggggaccaagtctcacccatttgattaatcttggtcccaaaacaaatgtgacaacttttctttttaatgggggttttgtccaaaacaaaataaataatttcccttgtggggggacagcgatccaaccccccaaagttggtggggagacgatgttttaaacctttcacaaacacattggagatttctccatgcccctaatcctgggggacctgtttttgacccgggacttggaaattta

SEQ ID NO: 47185 - DNA, 534 bp, Zea mays
  Clone ID: MRT4577_143039C.1
actggggaacaagtttatatttgcatagaacatacaaaaatgttaacaatctatgagtgaagtttatgtaaattttcctaaactgaccttttgagggaaactactctatgcccgttacaaactaacaggacggggttacattaaccttggcgacacacgaaggcctcttcgctttatagtagaaatgcgcaatcatatgaaccaattcatccgccgggcgaaagtctttctccctgtacaaaaaccggtttccgcgtaaaaaaaaaaactgggggcattccttaactttaaaaacatatgccaaatctgtctcgatgttcaggtcaatcttaaccgcccgtggagggaatcgatctttcgcatcccaataaactttgatagctttctcaagctccttcaatgtcttccagttatcactagcttttttgtatcggtcgaaacaaggacaacgagtggactatgatgaaaagcaaagctttcccattcctaacaattgatctccttgacccaactatcatcaatctcaccttccca

SEQ ID NO: 47186 - DNA, 1584 bp, Zea mays
  Clone ID: MRT4577_14303C.1
tccgccgctccactccaagtcacacggaggcagccatcgtagcctcgcccgactccgcttcccctgttctttgggcatggagctgatcacaaatgtcaccgagtacgagaagctcgcgaaggagaggctgccgaagatggtgtacgactactacgcctccggcgcagaagatcagtggacgctcaaggagaaccgggaggccttctccagaattctgtttaggccacgggtactgatcgacgtctcccgtatcgacatggccacaaacattctgggcttcagcatttccatgcctatcatgatcgctccttcagccatgcagaaaatggcctggaatgcaggagagcttgccacggcaagagctgcagcttccgcaggaacaataatggtttgaaagatcacactgcctgtggtacctcaagtcatgacccaaacactaatccattgtgctgatcttatggtttttccagacattgtcctcatggtctacttccagcgttgaagaggtcaactcagttgggccgggcatacgtttcttccagctctatgtctacaaggacaggaatatcgtacggcaactcgtgaaaagggctgagatggctggcttcaaggccattgcactcacggtagacactccaatacttggccgcagggaagctgacattaagaacaggttcgccttacctccacatctggtgttgaaaaacttccaagcgctggatcttggcacgatggacaagacaaatgattccggccttgcttcctacgttgctggtcaagttgaccgcaccctttcctggaaggacgtcaagtggctgcagacaattacctcgttgccgatcctagtcaaagggatcgtgactgcagaagacagcttgcgatcgaatatggcgctgctgggatcatcgtgtccaaccacggcgcgcgccagctagattatgttcctgcgactatcagctgcctggaagaggtcgtcagggaagcgaaaggccggctaccggtgttcctcgacggcggcgtccgccgtggcacggacgtcttcaaggccctggcgttgggagcttcaggagtgttcgtaaggacgacgacgacgacgcgcccactgcctgctaaaaacgctgctatttcgttcgagcccggcacctgacgctgttgcttggtgcgtgctgcagatcggccggcccgtgctgttctcgctggcggtggacggcgaggccggcgtgcggaaggtgctgcagatgctgagggacgagctggagctcaccatggcgctcagcggctgcacgtcgctgagggagataacccgcgcacacgtcatcaccgacagcgaccggatcggccgctcgcggctgtagaatcattgtgcagttcacctcaggaatgatgttggtctcgactgaactgtcctgattcgggatctatttgtagctcttgtgctctcattttacgttaggcaaataaggaagctgcgtgcgtatgtgtgactgctgctgacgtttgtttgcgccgctgtcgtggttgcctggttggcacttggcagtgttgattggcgttagtggttggtttgggtgaaaggagtttatg

SEQ ID NO: 47187 - DNA, 2233 bp, Zea mays
  Clone ID: MRT4577_143040C.1
gccggccgggtcgggagcataagttcgggacttccggcaatccgccggcgcccgtcggctcaaatcgcatctaccgcggctagaagctctctcttcctccctccgatccggtggggtccatttccttcaattgtggcagtggccgtctcgaaccctctataaatcccccaccccggacacccttccccgaccacacggtccacacagcccaacaaaggagcgcggcggcccctccttccttcctcccacttctctcgcgcggcgctcgcttacctcgcctcgcattccgttcgagcaggggagcggcagtgagaagggagggaattaaggcaagatgttcatcgagagcttccgcgtcgagagcccccacgtgcggtacggcccgacggagatcgagtcggagtaccggtacgacacgacggagctggtgcacgaggccaaggacggcgcctcccgctgggtcgtccgccccaagtccgtcaagtacaacttccggaccagcaccgccgtccccaagctcggggtcatgcttgtggggtggggaggcaacaacgggtccacgctgacggctggggtcattgccaacagggaggggatctcatgggcgaccaaggacaaggtgcagcaagccaactactacggctccctcacccaggcttccaccatcagagtaggcagctacaacggggaggagatatatgcgccgttcaagagcctcctacccatggtgaacccagacgaccttgtgtttggaggctgggacatcagcagcatgaacctggcagatgccatgaccagggccaaggtgctggacattgacctgcagaagcagctcaggccctacatggagtccatggtgccacttcccggtgtctatgatccggacttcatcgccgctaaccagggctctcgtgccaacaatgtcatcaagggcaccaagaaagaacaggtggagcagatcatcaaagatatcagggagtttaaggagaagaacaaagtggacaaggtagttgtgctgtggactgcaaacactgaaaggtacagcaatgtatgtgctggtctcaacgacacaatggagaatctgctggcatctgtggacaagaacgaggcggaaatctcgccatcaacactatatgccattgcctgtgtcacggagggggtgccgttcatcaatgggagcccccagaacacttttgtgcctgggctgattgatcttgctatcaagaacaactgcctgatcggtggtgacgacttcaagagtgggcagaccaagatgaaatcggtcctggttgattttcttgttggtgctggaataaagcccacctcgattgtgagctacaaccacttgggaaacaacgacggcatgaacctgtctgcccctcaaacattcaggtccaaggagatctccaagagcaacgtggtggatgacatggtctcaagcaatgccattctctatgggcccggcgagcatcccgatcatgttgttgtcatcaagtatgtgccgtatgtgggagacagtaagagggctatggacgagtacacatcagagatcttcatgggcggcaagagcaccatcgtgctgcacaacacctgcgaggactcgctcctcgccgcaccgatcatcctcgatctggtgctcctggctgagctcagcaccaggatccagttaaaacctgagggaacggacaagttccactccttccacccggtggccaccatccttagctacctcaccaaggcaccactggttccacccggcacaccggtggtgaacgctcttgcaaagcagagggcgatgctggagaacatcatgagggcttgcgttggcctggccccagagaacaacatgatcctggagtacaagtgagcgaagtggcgtggcctgcagctagatatggaggaggctgcacgaaggggactagagaggcgagattagctgtggaattgtgttggcttctcgtgttttcttttgcgttcttttcctggtcatcgctgtggcgcttttgtattttatttgttggacccgtaacactatcagggctctgctattagcgcttgaagcctgtaatggcattggcatcgtatgataatgtgatcgagggtgctagttcccctaagcattatttatataagttcaaatggcggcccggcccggtccggcctgagcctgagcccgctgtggcctggcacgaattgggacaggccccgttacgtcacaaaaaaaaaaaaaaaa

SEQ ID NO: 47188 - DNA, 397 bp, Zea mays
  Clone ID: MRT4577_143041C.1
tacaagcttttttttttttttttttttttttttttgtacaagctttattttttttttttatacaaggaattttttttttctttttatgttaatttttgatttatatatttttttcttttagtcatgtaaaaataaaataaaccctaatcaggctttgaacatttcaaattcacttgaagggaaaaggttggaatcacccttaaggaaaattaagcggatataagtttcattaaaacacaaaactaattttgaccaagagaaaataaattggcaacattgggggtggaacaaccaaagggcgaactttggaaaaaaacaaaaaaattgggggggccctggcattaattaaaagggcccaattcccccaaatgggggttttattaaaattaattggccc

SEQ ID NO: 47189 - DNA, 2284 bp, Zea mays
  Clone ID: MRT4577_143042C.1
cgaggccggccggggaaagccttcattcggctcactgtcttctttctatcgctcacaaccatagcccacaggccgccggcgcccgccagccgacgtcctcccatttcgctcccctcctccgctgcggtcgagcaaaagttccggccatccggcaatcccccggcacccggcggttcaaatcgtatctgacctgacgcggctacgacgtcgctcctccggtcccttcgatccggtggggtccgtttctttcaagcgcggcctcgctggccgcctcgtggcagtgaccgtcgaaccctctataaatcccgtgccccgagcacccttcctcgatcacacaacccaaagcagccacagcagcctccttcctggcttcctcctctcactctcgctcgtgctgcgctcgctacctcgcttcgcattccattcgaggagagcggtgagaggggaggaaaggcaagatgttcatcgagagcttccgcgtcgagagcccccacgtgcggtacggcccgacggagatcgagtcggagtaccggtacgacacgacggagctggtacacgagggcaaggacggcgcctcacgctgggtcgtccgccccaagtccgtcaagtacaacttccggaccagaaccgccgtccccaagctcggggtgatgcttgtggggtggggaggcaacaacgggtccacgctgacggctggggtcattgccaacagggaggggatctcatgggcgaccaaggacaaggtgcagcaagccaactactacggctccctcacccaggcctccaccatcagagtcggcagctacaacggggaggagatctatgcgccgttcaagagcctccttcccatggtgaacccagacgacattgtgttcggaggctgggacattagcaacatgaacctggccgactccatgaccagggccaaggtgctggatattgacctgcagaagcagctcaggccctacatggagtccatggtgccacttcccggtatctatgatccggacttcatcgcggctaaccagggctctcgcgccaacagtgtcatcaagggcaccaagaaagaacaggtggagcagatcatcaaggatatcagggagtttaaggagaagaacaaagtggacaagatagttgtgttgtggactgcaaacactgaaaggtacagcaatgtgtgcgctggtctcaacgacacgatggagaatctgctggcatctgtggacaagaacgaggcggagatctcgccatcaacactatatgccattgcctgtgtcatggagggggtgccgttcatcaacgggagcccccagaacacctttgtgcctgggctgattgatcttgctatcaaaaacaactgcttgattggtggtgacgacttcaagagtggacagaccaagatgaaatctgtcttggtcgatttccttgttggtgctggaataaagcccacctcaatcgtgagctacaaccacttgggaaacaacgatggcatgaacctgtctgcccctcaaacattcaggtccaaggagatctccaagagcaacgtggtggatgacatggtctcgagcaatgccatcctctatgagcccggcgagcatcccgatcatgtcgttgtcatcaagtatgtgccgtacgtgggagacagcaagagggctatggacgagtacacctctgagatcttcatgggcggcaagaacaccatcgtgctgcacaacacctgtgaggactcgctcctcgccgcacctatcatccttgacctggtgctcctggctgagctcagcaccaggatccagctgaaagctgagggagaggacaaattccactccttccacccggtggccaccatcctgagctacctcaccaaggcacccctggttccccctggcacaccggtggtgaacgctctggcaaagcagagggcgatgttggagaacatcatgagggcctgcgttgggctggccccagagaacaacatgatcctggagtacaagtgagccgagtggcgtggcctgcagcgcgaggttagctgctggaagggaactagaaaggcgagattagctgtgggattgtgttgggcttctcgtgttttattttgcgttctttcctagtcatcgctgttgcgcttgtgtatttgtcggacccgtaactaccagggctctgctattagcggcacggagcctgtaattgtactgtatgataatgtgatcgagggtgctacttcccctcggcattcctagtgttgggttaaaagtcgttcgccagcaaaaaaaaaaaaagaaaagcggcc

SEQ ID NO: 47190 - DNA, 1997 bp, Zea mays
  Clone ID: MRT4577_143043C.1
ggccgcttttttttttttttttttgttttttttttttttttttttttttttttttttttactagcaccctcgatcacattatcatacgatgccattacaggcttcatgcgctaatagctgagccctgatagttacgggtccaacaaataaaatacaaaagcgcgacagcggtgaccagaaaagaacgcaaaaggaaaatacgagaagccaacacaatcccacaactaatctcgcctctctagttcccttcgtgcagcctcctccatatccagctgcaggccacgccgcttggctcacttgtactccaggatcatgttgttctctggggccaggccaacgcaggccctcatgatgttctccagcatcgccctctgctttgccagagcattcaccaccggtgtgccgggcggaaccagtggtgccttggtgaggtagctaaggatggtggccaccgggtggaaggagtggaacttgtccgttccctcaggttttagctggatcctggtgctgagctcagccaggagcaccagatcaaggatgataggcgcggcgaggagcgagtcctcgcaggtgttgtgcagcacgatggtgctcttgccgcccatgaagatctctgatgtgtactcgtccatagccctcttactgtctcccacgtacggcacgtacttgatgacaacaacatgatcgggatgctcgccgggcccatagagaatggcattgcttgagaccatgtcatccaccacgttgctcttggagatctccttggacctgaatgtttgaggggcagacaggttcatgccgtcgttgtttcccaagtggttgtagctcacaatcgaggtgggctttattccagcaccaataaggaaatcaaccaagaccgatttcatcttggtctgcccactcttgaagtcgtcaccaccgatcaggcagttgttcttgatagcaagatcaatcagcccaggcacaaaagtgttctgggggctcccattgatgaatggcaccccttccgtgacacaggcaatggcatatagtgttgatggcgagatttccgcctcgttcttgtccacagatgccagcagattctccattgtgtcgttgagaccagcgcatacattgctgtacctttcagtgtttgcagtccacagcacaacaaccttgtccactttgttcttctccttaaactccctgatatccttgatgatctgctccacctgttctttcttggtgcccttgatgacattgttggcacgagagccctggttagcggcgatgaagtccggatcatagacaccgggaagtggcaccatggactccatgtagggcctgagctgcttctgcaggtcaatgtccagcaccttggccctggtcatggcatctgccaggttcatgctgctgatgtcccagcctccaaacacaaggtcgtctgggttcaccatgggtaggaggctcttgaacggcgcatatatctcctccccgttgtagctgcctactctgatggtggaagcctgggtgagggagccgtagtagttggcttgctgcaccttgtccttggtcgcccatgagatcccctccctgttggcaatgaccccagccgtcagcgtggacccgttgttgcctccccaccccacaagcatgaccccgagcttggggaccgcggtgctggtccggaagttgtacttgacggacttggggcggacgacccagcgggaggcgccgtccttggcctcgtgcaccagctccgtcgtgtcgtaccggtactccgactcgatctccgtcgggccgtaccgcacgtgggggctctcgacgcggaagctctcgatgaacatcttgccttaattccctcccttctcactgccgctcccctgctcgaacggaatgcgaggcgaggtaagcgagcgccgcgcgagagaagtgggaggaaggaaggaggggccgccgcgctccttgttgttgggctgtgtggaccgtgtgcccggccggcctcgaggtacccaatg

SEQ ID NO: 47191 - DNA, 581 bp, Zea mays
  Clone ID: MRT4577_143044C.1
acacatcagagatcttcatgggcggcaagaacaccatcgtgctgcacaacacctgcgaggactcgctccttgccgcgccgatcatccttgatctggtgctcctggctgagctcagcaccaggatccagctaaaacctgagggaacggacaagttccactccttccatccggtggccaccatcctaagctacctcaccaaggcaccgctggttccccctggcacaccggtggtgaacgctctggcaaagcagagggcgatgctggagaacatcatgagggcatgcgttggcctggccccagagaacaacatgatcctggagtacaagtgagcgaagtggcgtggcctatatgcaggaggctgctggaagggaactagaatggcgagattagctgtgggattgtattggcttctcgtgttttcttttgcgttctttcctggtcattgctgttacgcttgtgtatttgtcggacccgtaactatcagggctctgctattagcggcacgaagcctgtaatagtatcaggtatcgtatgataatttgatggagggtgctagtttccctcggcattcctagtgttcc

SEQ ID NO: 47192 - DNA, 250 bp, Zea mays
  Clone ID: MRT4577_143045C.1
gccgaaccccccgaagtatggcggagccgcggcggcggcgaagaagacacgggtaacgccgtacgaggtcgcaagaccatcggggagggcatcttcgccaaggtgacgcacgcccacgactcccgcacgggcgccgtccgcgctatcccggtgctcgaccgcagccacgttactccgccacaagatggtcgagcagatcaaacgggagatttcgatttgaagctaatcaaacatcccaacgtggttcagc

SEQ ID NO: 47193 - DNA, 564 bp, Zea mays
  Clone ID: MRT4577_143046C.1
cattgggtacctcgaggccggccgggataccatctcccctacctagcaatacgcataagcggctcttgctttgctgcttccagacattgtgcacgagccactagcactagaaggcgctcgcaaccaaattaaggactgaagcataggcatccaagagagtcctctgcttggctctcaacctcctagatcttcacagaggacaacgcctgcggcagctgccctgaccccaactcccccggtcgagcctgagccgcaggcccctgctgataccccacccccttcatcactgccgggtgaaatgccccctgaacacgctcaaggtcagcatgcagcgtcatgcgctccgcctcgtcataggcgagaatagcaagagtacctgataatatacgctgaaacctcatgaataggcttgcagacttcaaagccgcagcctgactctgctcatacatcataggcatagtgctcggcatagtcttagatgtccctatcaagcccaacgcccccgccaactacagcggcaactgcgtacccaaaggctacacgcgcgcggtaaatccggacatc

SEQ ID NO: 47194 - DNA, 2309 bp, Zea mays
  Clone ID: MRT4577_143047C.1
cattgggtacctcgaggccggccgggcacacagcccacaaaggagcgcggcggcccctccttccttccttccacttcgcattccgttcgagcaggggagcggcagtgagaagggagggaattaaggcaagatgttcatcgagagcttccgcgtcgagagcccccacgtgcggtacggcccgacggagatcgagtcggagtaccggtacgacacgacggagctggtgcacgaggccaaggacggcgcctcccgctgggtcgtccgccccaagtccgtcaagtacaacttccggaccagcaccgccgtccccaagctcggggtcatgcttgtggggtggggaggcaacaacgggtccacgctgacggctggggtcattgccaacagggaggggatctcatgggcgaccaaggacaaggtgcagcaagccaactactacggctccctcacccaggcttccaccatcagagtaggcagctacaacggggaggagatatatgcgccgttcaagagcctcctacccatggtgaacccagacgaccttgtgtttggaggctgggacatcagcagcatgaacctggcagatgccatgaccagggccaaggtgctggacattgacctgcagaagcagctcaggccctacatggagtccatggtgccacttcccggtgtctatgatccggacttcatcgccgctaaccagggctctcgtgccaacaatgtcatcaagggcaccaagaaagaacaggtggagcagatcatcaaagatatcagggagtttaaggagaagaacaaagtggacaaggtagttgtgctgtggactgcaaacactgaaaggtacagcaatgtatgtgctggtctcaacgacacaatggagaatctgctggcatctgtggacaagaacgaggcggagatctcgccatcaacactatatgccattgcctgtgtcacggagggggtgccgttcatcaatgggagcccccagaacacttttgtgcctgggctgattgatcttgctatcaagaacaactgcctgatcggtggtgacgacttcaagagtgggcagaccaagatgaaatcggtcctggttgatttccttgttggtgctggaataaagcccacctcgattgtgagctacaaccacttgggaaacaacgacggcatgaacctgtctgcccctcaaacattcaggtccaaggagatctccaagagcaacgtggtggatgacatggtctcaagcaatgccattctctatgggcccggcgagcatcccgatcatgttgttgtcatcaagtacgtgccgtacgtgggagacagtaagagggctatggacgagtacacatcagagatcttcatgggcggcaagagcaccatcgtgctgcacaacacctgcgaggactcgctcctcgccgcgcctatcatccttgatctggtgctcctggctgagctcagcaccaggatccagctaaaacctgagggaacggacaagttccactcctttcacccggtggccaccatcctaagctacctcaccaaggcaccactggttccccctggcacaccggtggtgaacgctctggcaaagcagagggcgatgctggagaacatcatgagggcctgtgttggcctggccccagagaacaacatgatcctggagtacaagtgagcgaaatggcgtggcctgcagctagatatgcaggaggctgcacgaaggaaactagagaggcgagattagatgtgagattgtgttggcttctcgtgttttcttttgcgttctttcctggtcatcgctgtcgcgcttttgtattttatttgttggacccgtaactatcagggctctgctattagcgcatgaagcctataatggcatcgtatgataatgtgatcgggggtgctagttcccctaaggcctacaatctcaaataatattttgatagatcgatttcaaaaaaaaaaaaaaaaaaaaaaaaaaaaaaaaaaaaaaaaaaaaaaaaaaaaaaccaaaaaaaaggaaaaaaaaaaaaaaaaaaaaaaaaaaaaaaaaaaaaaaaaaaaaaaaaaaaaaaaacccggggggggaccccctttaaggggcaatttttgaaaatacccttcccctgggggccccttcgaacttcctttaaagggccccattcccccttaagggggggggaataaaaatccccggcccggggtttcccaacggggggccgggaaaacccgggggggcccccaattaaaggcctttgaaaaaatcccccttttccccaggggggaaaaaagaaaaaagccccccccgaaccccctttcca

SEQ ID NO: 47195 - DNA, 1142 bp, Zea mays
  Clone ID: MRT4577_143048C.1
tggattgaatgtactggtttcaacatgtggctaccactctgcttgatctatttactccacctcctaaccaggaagaattcataggatactttgctcctatttgtatacgtagttgattgtagtcgagctgtgtgtgtcagcctcaaattgtttacatcttttttgtgcaatatcttccccttatcttaactagacttttgaaccttatttactattacagagaaaaggcagtccgaatctgccaggatcagggataagtatcccgacagaattcctgtgattgttgagaaagctggcaaaactgatgtccccgagattgataagaagaagtaccttgtccctgctgatctcactgtcggccagtttgtctatgtggtgaggaagagaatcaagctgagcccagagaaggccatctttgtctttgtgaagaacaccttgccaccaactgcctctttgatgtctgcaatctacgaagagaacaaggacgaggatggcttcctttacatgacctacagtggtgaaaacaccttcggctctgcctagagcaatcgcccctgccactgtaaataaacgagcatgatggggctgctgctattgtaaacctgtgtatatacctcagtctctagtatgctgctgccggattgccttcaatggcttcaatgacacccttagctttcaactgtttggatttctcctgtgacattgaattccttcggtatcgaaacatttgatcatttcactattacttcacttaaaaaaaaaaaaaaaaaaaaaaaaaaaaaaaaaaaaaaaaaaaaaaaaaaaaaaaaaaaaaaaaggggggagggaaaaaaaaaaaaaaaaaaaaaaaatggggggggggggggggccccccccccccttttttttttttggggggacggtttttggttggggggggccccccaaaaaaaaccccggaaaaaaaaaatttttttttcgggggggggggggggggtgttaaaaggggaaaaaaaaaattaggttttttcccccaaagggggggtttacaaaaaaaagggttctcccccccctgggggggggggggggaaaaaaaaaaccccaaacagccaaaaatttttttgggggagaggggggtggttttttaaatttccccccccccc

SEQ ID NO: 47196 - DNA, 524 bp, Zea mays
  Clone ID: MRT4577_143049C.1
caaaactagattgatttcaaacaagaccttagtcattacaagtttgattgtccggccacaatccacagaatattagcatcagggatgagcttaaaagcaagatcgttagcaaggctccagctaagtcgatggacatttagggtttgtttgaatagcaaaagcattttagcctctccaatcctatttggtatccttgctcccaaacaagcgagaagatgtatgttatcggagcccttggacaagaacggaaggtattccttacagctgctatgtggtatgaccaactctaatcagtattaagaaggggccgcagggtaatatttacaccaaaagtcctcttcacacttcagaactctatcggttgtcgatcacgttctccagctcatttaatacagagcaaccaaggacaatggaacagtgtcacgactgtcaaaagaatctactggggcagcatttgttgaagagaacactttgtacagttcagccagcaggcgatcacccctagaaaaccagaagttgctggc
